(19) United States
(12) Patent Application Publication
(10) Pub. No.: US 2023/0313210 A1
(43) Pub. Date: Oct. 5, 2023

(54) ENGINEERED ORAL BACTERIA AND USES THEREOF

(71) Applicant: ARIZONA BOARD OF REGENTS ON BEHALF OF THE UNIVERSITY OF ARIZONA, Tucson, AZ (US)

(72) Inventors: Eric H. Lyons, Tucson, AZ (US); Scott Zentack, Tucson, AZ (US); David A. Baltrus, Tucson, AZ (US)

(21) Appl. No.: 18/024,647

(22) PCT Filed: Sep. 3, 2021
(86) PCT No.: PCT/US2021/049114

§ 371 Date: Mar. 3, 2023

Related U.S. Application Data
(60) Provisional application No. 63/074,802, filed on Sep. 4, 2020.

(51) Int. Cl. C12N 15/78; C12N 9/10; C12N 9/88; C12N 9/90; A61K 8/99; A61Q 11/00; A23K 10/16; A23K 50/40

(52) U.S. Cl. CPC C12N 15/78; C12N 9/1007; C12N 9/88; C12Y 402/99021; C12N 9/90; C12Y 504/04002; C12N 9/1029; C12Y 203/01084; A61K 8/99; A61Q 11/00; A23K 10/16; A23K 50/40

(57) ABSTRACT

Described herein are engineered bacteria that can produce a volatile compound and formulations thereof. Also described herein are methods of improving the breath odor of a mammal by administering the engineered bacteria or formulation thereof to the oral cavity of the mammal.

### CROSS-REFERENCE TO RELATED APPLICATIONS

[0001] This application claims the benefit of and priority to co-pending U.S. Provisional Patent Application No. 63/074,802, filed on Sep. 4, 2020, entitled “ENGINEERED ORAL BACTERIA AND USES THEREOF,” the contents of which is incorporated by reference herein in its entirety.

### SEQUENCE LISTING

[0002] This application contains a sequence listing filed in electronic form as an ASCII.txt file entitled UAZ-0115WP created on Sep. 3, 2021, and having the size of 6,415,931 bytes. The content of the sequence listing is incorporated herein in its entirety.

### TECHNICAL FIELD

[0003] The subject matter disclosed herein is generally directed to engineered bacteria containing gene(s) to express one or more proteins associated with the production of volatile compounds.

### BACKGROUND

[0004] Dogs and cats can have bad breath. Not only can this be a nuisance for their human companions, the offensive odor has roots in an unhealthy microflora. Although treats, chews, mouthwashes, and toothpastes exist for pets, most fail to have long term efficacy and do not mask the odor for sustained periods of time. While some aid in inhibiting or preventing gum disease and tooth decay by mechanical action (e.g., chews), the market is devoid of options that assist in establishing the healthy commensal oral microflora. As such, there exists a need for compositions, techniques, and/or methods that can address halitosis in at least companion animals.

[0005] Citation or identification of any document in this application is not an admission that such a document is available as prior art to the present invention.

### SUMMARY

[0006] Described in certain aspects is an engineered bacterium or population thereof, wherein the engineered bacterium containing one or more polynucleotides that each encode one or more enzymes capable of catalyzing one or more reactions to produce a volatile compound, one or more polypeptides produced therefrom, or both, and wherein the engineered bacterium is of a strain that is a commensal bacterium strain found in the oral cavity of a mammal, optionally a canine or a feline.

[0007] In certain example embodiments, the one or more enzymes is/are
[0008] a. a methyltransferase that catalyzes the production of methyl salicylate from salicylic acid;
[0009] b. an isochorismate synthase;
[0010] c. an ischorisomate-pyruvate lyase;
[0011] d. is an alcohol acetyl transferase that is capable of condensing isoamyl alcohol and acetyl CoA into isoamyl acetate; or
[0012] e. any combination thereof.

[0013] In certain example embodiments, the one or more polynucleotides each encode a methyltransferase that catalyzes the production of methyl salicylate from salicylic acid, an isochorismate synthase, an ischorisomate-pyruvate lyase, or any combination thereof.

[0014] In certain example embodiments, the volatile compound produced has a mint odor.

[0015] In certain example embodiments, the one or more polynucleotides each comprise a PCHBA gene or mRNA, a BSMT1 gene or mRNA, or any combination thereof.

[0016] In certain example embodiments, at least one of the one or more polynucleotides encodes an alcohol acetyltransferase that is capable of condensing isoamyl alcohol and acetyl CoA into isoamyl acetate.

[0017] In certain example embodiments, the engineered bacterium or population thereof produces a fruity odor. In certain example embodiments, the fruity odor is a banana odor or a pear odor.

[0018] In certain example embodiments, at least one of the one or more polynucleotides includes an ATF gene or mRNA, an BAT2 gene or mRNA, a THI3 gene or mRNA, or any combination thereof.

[0019] In certain example embodiments, the ATF gene or mRNA is an ATF1 gene or mRNA or an ATF2 gene or mRNA.

[0020] In certain example embodiments, one or more of the one or more polynucleotides each comprise a gene or mRNA independently selected from a BSTM1 gene, a BSTM1 mRNA, an ATF gene, an ATF mRNA, a PCHBA gene, a PCHBA mRNA, a BAT2 gene, a BAT2 mRNA, a THI3 gene, a THI3 mRNA, or any combination thereof.

[0021] In certain example embodiments, the ATF gene or ATF mRNA is an ATF1 gene or mRNA or an ATF2 gene or mRNA.

[0022] In certain example embodiments,
[0023] a. the BSTM1 gene or mRNA has a polynucleotide sequence that is about 90-100 percent identical to any one of SEQ ID NO: 2, 8, 11, or 13;
[0024] b. the PCHBA gene or mRNA has a polynucleotide sequence that is about 90-100 percent identical to SEQ ID NO: 1 or 10;
[0025] c. the ATF gene or mRNA has a polynucleotide sequence that is about 90-100 percent identical to SEQ ID NO: 49 or 51;
[0026] d. the BAT2 gene or mRNA has a polynucleotide sequence that is about 90-100 percent identical to SEQ ID NO: 53;
[0027] e. the THI3 gene or mRNA has a polynucleotide sequence that is about 90-100 percent identical to SEQ ID NO: 55;
[0028] f. or any combination thereof

[0029] In certain example embodiments, one or more of the one or more polynucleotides has a sequence that is about 40-100% identical to any one of SEQ ID NOs.: 1, 2, 8, 10-11, 13, 49, 51, 53, or 55 or any region therein of at least 20 nucleotides.

[0030] In certain example embodiments, one or more of the one or more polynucleotides encodes a polypeptide having a sequence that is about 40 to 100% identical to any one of SEQ ID NOS.: 3-7, 9, 50, 52, 54, or 56.

[0031] In certain example embodiments, the engineered bacterium or population thereof further contains one or more expression vectors, wherein the one or more expression vectors comprise the one or more polynucleotides.

[0032] In certain example embodiments, the engineered bacterium is from genus selected from Escherichia, Pseudomonas, Brevundimonas, Xanthomonas, Deinococcus, or Pedobacter.

[0033] In certain example embodiments, the engineered bacterium is an isolate of a commensal canine oral bacterium or population thereof.

[0034] In certain example embodiments, the commensal canine oral bacterium or population thereof is of the genus Pseudomonas.

[0035] In certain example embodiments, the engineered bacterium is an isolated commensal canine oral bacterium or population thereof having a genome having sequence that is 90-100 percent identical to any one or more of SEQ ID NOs: 12 or 14-48.

[0036] Described in certain aspects is an expression vector capable of expressing a BSTM1 polypeptide, a PCHB polypeptide, a PCHA polypeptide, an ATF1 polypeptide, an ATF2 polypeptide, BAT2 polypeptide, a THI3 polypeptide or any combination thereof having:
[0037] a. a BSTM1 polynucleotide having a sequence that is about 90-100 percent identical to any one of SEQ ID NO: 2, 8, 11, or 13;
[0038] b. a PCHBA polynucleotide having a sequence that is about 90-100 percent identical to SEQ ID NO: 1 or 10;
[0039] c. an ATF polynucleotide having a sequence that is about 90-100 percent identical to SEQ ID NO: 49 or 51;
[0040] d. the BAT2 polynucleotide having a sequence that is about 90-100 percent identical to SEQ ID NO: 53;
[0041] e. the THI3 polynucleotide having a sequence that is about 90-100 percent identical to SEQ ID NO: 55;
[0042] f. or any combination thereof.

[0043] In certain example embodiments, (a), (b), (c), (d), (e), or (0 of the expression vector is/are operatively coupled one or more regulatory elements.

[0044] In certain example embodiments, the expression vector includes a sequence that is about 90-100 percent identical to SEQ ID NO: 13.

[0045] Described in certain aspects is a formulation having an engineered bacterium as described herein, an expression vector of as described herein, or both, optionally wherein the engineered bacterium contains the expression vector and a liquid, semi-solid, or solid carrier.

[0046] In certain example embodiments, the formulation is a foodstuff suitable for a mammal. In certain example embodiments, the mammal is a non-human animal. In certain example embodiments, the mammal is a canine or a feline.

[0047] In certain example embodiments, the formulation is a liquid solution or semi-solid suitable for administration to the oral cavity of a mammal. In certain example embodiments, the mammal is a non-human animal. In certain example embodiments, the mammal is a canine or a feline.

[0048] In certain example embodiments, the formulation is a formed object that is configured to be chewed on by a mammal. In certain example embodiments, the mammal is a non-human animal. In certain example embodiments, the mammal is a canine or a feline.

[0049] Described in certain aspects herein is a method of improving the breath of a mammal, the method including administering an engineered bacterium or population thereof as described herein, an expression vector as described herein, or both, or a formulation thereof to the mammal.

[0050] In certain example embodiments, the method further includes allowing the engineered bacterium or population thereof to produce a volatile compound.

[0051] In certain example embodiments, the mammal is a non-human animal. In certain example embodiments, the mammal is canine or a feline.

[0052] Described in certain aspects herein is an isolated commensal canine oral bacterium or population thereof having: a genome having a sequence that is 90-100 percent identical to any one or more of SEQ ID NOs: 12 or 14-48.

[0053] In certain example embodiments, the isolated commensal canine oral bacterium or population thereof is of the genus Pseudomonas.

[0054] These and other embodiments, objects, features, and advantages of the example embodiments will become apparent to those having ordinary skill in the art upon consideration of the following detailed description of example embodiments.

### BRIEF DESCRIPTION OF THE DRAWINGS

[0055] An understanding of the features and advantages of the present invention will be obtained by reference to the following detailed description that sets forth illustrative embodiments, in which the principles of the invention may be utilized, and the accompanying drawings of which:

[0056] FIG. 1—Genomes in CoGe analyzed using BLAST alignment tool.

[0057] FIG. 2—Confirmation that the two scaffolds isolated (termed DOG53 (top) and DOG91 (bottom)).

[0058] FIG. 3—Mint plasmid map.

[0059] FIG. 4—Comparative genomics demonstrating DOG53 and DOG91 are nearly 100% identical.

[0060] FIG. 5—DOG53 and DOG91 have DNA sequence and genome structure divergence.

[0061] FIG. 6—Comparison of Dog53 v. Pseudomonas stutzeri strain RCH2.

[0062] FIG. 7—Comparison of Pseudomonas stutzeri strain DSM 4166 v Pseudomonas stutzeri strain RCH2 for an example of what two strains from the same species of Pseudomonas looks like.

[0063] FIG. 8—GC/MS spectrograph of bacteria supernatant containing methyl salicylate.

[0064] FIGS. 9A-9C—Persistence of Dog53 and production of methyl salicylate. (FIG. 9A) Bacteria recovered from dog mouths at 0 min, 30 min, 60 min, 90 min, and 120 min after feeding. (FIG. 9B) Control for GC/MS of pure methyl salicylate. (FIG. 9C) GC/MS of dog saliva showing presences of methyl salicylate.

[0065] The figures herein are for illustrative purposes only and are not necessarily drawn to scale.

### DETAILED DESCRIPTION OF THE EXAMPLE EMBODIMENTS

[0066] Before the present disclosure is described in greater detail, it is to be understood that this disclosure is not limited to particular embodiments described, and as such may, of course, vary. It is also to be understood that the terminology used herein is for the purpose of describing particular embodiments only and is not intended to be limiting.

[0067] Unless defined otherwise, all technical and scientific terms used herein have the same meaning as commonly understood by one of ordinary skill in the art to which this disclosure belongs. Although any methods and materials similar or equivalent to those described herein can also be used in the practice or testing of the present disclosure, the preferred methods and materials are now described.

[0068] All publications and patents cited in this specification are cited to disclose and describe the methods and/or materials in connection with which the publications are cited. All such publications and patents are herein incorporated by references as if each individual publication or patent were specifically and individually indicated to be incorporated by reference. Such incorporation by reference is expressly limited to the methods and/or materials described in the cited publications and patents and does not extend to any lexicographical definitions from the cited publications and patents. Any lexicographical definition in the publications and patents cited that is not also expressly repeated in the instant application should not be treated as such and should not be read as defining any terms appearing in the accompanying claims. The citation of any publication is for its disclosure prior to the filing date and should not be construed as an admission that the present disclosure is not entitled to antedate such publication by virtue of prior disclosure. Further, the dates of publication provided could be different from the actual publication dates that may need to be independently confirmed.

[0069] As will be apparent to those of skill in the art upon reading this disclosure, each of the individual embodiments described and illustrated herein has discrete components and features which may be readily separated from or combined with the features of any of the other several embodiments without departing from the scope or spirit of the present disclosure. Any recited method can be carried out in the order of events recited or in any other order that is logically possible.

[0070] Where a range is expressed, a further embodiment includes from the one particular value and/or to the other particular value. Where a range of values is provided, it is understood that each intervening value, to the tenth of the unit of the lower limit unless the context clearly dictates otherwise, between the upper and lower limit of that range and any other stated or intervening value in that stated range, is encompassed within the disclosure. The upper and lower limits of these smaller ranges may independently be included in the smaller ranges and are also encompassed within the disclosure, subject to any specifically excluded limit in the stated range. Where the stated range includes one or both of the limits, ranges excluding either or both of those included limits are also included in the disclosure. For example, where the stated range includes one or both of the limits, ranges excluding either or both of those included limits are also included in the disclosure, e.g., the phrase “x to y” includes the range from ‘x’ to ‘y’ as well as the range greater than ‘x’ and less than ‘y’. The range can also be expressed as an upper limit, e.g., ‘about x, y, z, or less’ and should be interpreted to include the specific ranges of ‘about x’, ‘about y’, and ‘about z’ as well as the ranges of ‘less than x’, less than y′, and ‘less than z’. Likewise, the phrase ‘about x, y, z, or greater’ should be interpreted to include the specific ranges of ‘about x’, ‘about y’, and ‘about z’ as well as the ranges of ‘greater than x’, greater than y′, and ‘greater than z’. In addition, the phrase “about ‘x’ to ‘y’”, where ‘x’ and ‘y’ are numerical values, includes “about ‘x’ to about ‘y’”.

[0071] It should be noted that ratios, concentrations, amounts, and other numerical data can be expressed herein in a range format. It will be further understood that the endpoints of each of the ranges are significant both in relation to the other endpoint, and independently of the other endpoint. It is also understood that there are a number of values disclosed herein, and that each value is also herein disclosed as “about” that particular value in addition to the value itself. For example, if the value “10” is disclosed, then “about 10” is also disclosed. Ranges can be expressed herein as from “about” one particular value, and/or to “about” another particular value. Similarly, when values are expressed as approximations, by use of the antecedent “about,” it will be understood that the particular value forms a further embodiment. For example, if the value “about 10” is disclosed, then “10” is also disclosed.

[0072] It is to be understood that such a range format is used for convenience and brevity, and thus, should be interpreted in a flexible manner to include not only the numerical values explicitly recited as the limits of the range, but also to include all the individual numerical values or sub-ranges encompassed within that range as if each numerical value and sub-range is explicitly recited. To illustrate, a numerical range of “about 0.1% to 5%” should be interpreted to include not only the explicitly recited values of about 0.1% to about 5%, but also include individual values (e.g., about 1%, about 2%, about 3%, and about 4%) and the sub-ranges (e.g., about 0.5% to about 1.1%; about 5% to about 2.4%; about 0.5% to about 3.2%, and about 0.5% to about 4.4%, and other possible sub-ranges) within the indicated range.

### General Definitions

[0073] Unless defined otherwise, technical and scientific terms used herein have the same meaning as commonly understood by one of ordinary skill in the art to which this disclosure pertains. Definitions of common terms and techniques in molecular biology may be found in Molecular Cloning: A Laboratory Manual, 2nd edition (1989) (Sambrook, Fritsch, and Maniatis); Molecular Cloning: A Laboratory Manual, 4th edition (2012) (Green and Sambrook); Current Protocols in Molecular Biology (1987) (F. M. Ausubel et al. eds.); the series Methods in Enzymology (Academic Press, Inc.): PCR 2: A Practical Approach (1995) (M. J. MacPherson, B. D. Hames, and G. R. Taylor eds.): Antibodies, A Laboratory Manual (1988) (Harlow and Lane, eds.): Antibodies A Laboratory Manual, 2nd edition 2013 (E. A. Greenfield ed.); Animal Cell Culture (1987) (R. I. Freshney, ed.); Benjamin Lewin, Genes IX, published by Jones and Bartlet, 2008 (ISBN 0763752223); Kendrew et al. (eds.), The Encyclopedia of Molecular Biology, published by Blackwell Science Ltd., 1994 (ISBN 0632021829); Robert A. Meyers (ed.), Molecular Biology and Biotechnology: a Comprehensive Desk Reference, published by VCH Publishers, Inc., 1995 (ISBN 9780471185710); Singleton et al., Dictionary of Microbiology and Molecular Biology 2nd ed., J. Wiley & Sons (New York, N.Y. 1994), March, Advanced Organic Chemistry Reactions, Mechanisms and Structure 4th ed., John Wiley & Sons (New York, N.Y. 1992); and Marten H. Hofker and Jan van Deursen, Transgenic Mouse Methods and Protocols, 2nd edition (2011).

[0074] As used herein, the singular forms “a”, “an”, and “the” include both singular and plural referents unless the context clearly dictates otherwise.

[0075] As used herein, “about,” “approximately,” “substantially,” and the like, when used in connection with a measurable variable such as a parameter, an amount, a temporal duration, and the like, are meant to encompass variations of and from the specified value including those within experimental error (which can be determined by e.g. given data set, art accepted standard, and/or with e.g. a given confidence interval (e.g. 90%, 95%, or more confidence interval from the mean), such as variations of +/−10% or less, +/−5% or less, +/−1% or less, and +/−0.1% or less of and from the specified value, insofar such variations are appropriate to perform in the disclosed invention. As used herein, the terms “about,” “approximate,” “at or about,” and “substantially” can mean that the amount or value in question can be the exact value or a value that provides equivalent results or effects as recited in the claims or taught herein. That is, it is understood that amounts, sizes, formulations, parameters, and other quantities and characteristics are not and need not be exact, but may be approximate and/or larger or smaller, as desired, reflecting tolerances, conversion factors, rounding off, measurement error and the like, and other factors known to those of skill in the art such that equivalent results or effects are obtained. In some circumstances, the value that provides equivalent results or effects cannot be reasonably determined. In general, an amount, size, formulation, parameter or other quantity or characteristic is “about,” “approximate,” or “at or about” whether or not expressly stated to be such. It is understood that where “about,” “approximate,” or “at or about” is used before a quantitative value, the parameter also includes the specific quantitative value itself, unless specifically stated otherwise.

[0076] The term “optional” or “optionally” means that the subsequent described event, circumstance or substituent may or may not occur, and that the description includes instances where the event or circumstance occurs and instances where it does not.

[0077] The recitation of numerical ranges by endpoints includes all numbers and fractions subsumed within the respective ranges, as well as the recited endpoints.

[0078] As used herein, a “biological sample” is a sample that contains whole cells and/or live cells, cell debris, cell components, and/or other biologic material and/or molecules. The biological sample can contain (or be derived from) a “bodily fluid”. The biological sample can contain (or be derived from) a plant. The biological sample can be derived from the environment (e.g., water, soil, air, or other environmental component). Bodily fluids include, but are not limited to, is whole blood or component thereof (e.g., plasma, serum, etc.) amniotic fluid, aqueous humour, vitreous humour, bile, breast milk, cerebrospinal fluid, cerumen (earwax), chyle, chyme, endolymph, perilymph, exudates, feces, female ejaculate, gastric acid, gastric juice, lymph, mucus (including nasal drainage and phlegm), pericardial fluid, peritoneal fluid, pleural fluid, pus, rheum, saliva, sebum (skin oil), semen, sputum, synovial fluid, sweat, tears, urine, vaginal secretion, vomit and mixtures of one or more thereof. Biological samples include cell cultures, bodily fluids, cell cultures from bodily fluids, cell cultures from environmental samples, and/or the like. Bodily or other fluids may be obtained from an organism, for example by puncture, or other collecting or sampling procedures.

[0079] As used herein, “organism”, “host”, “patient”, “individual”, and “subject” refers to any entity composed of at least one cell. An organism can be as simple as, for example, a single isolated eukaryotic cell or cultured cell or cell line, or as complex as a mammal, including a human and non-human animals (e.g., vertebrates, amphibians, fish, mammals, e.g., cats, dogs, horses, pigs, cows, sheep, rodents, rabbits, squirrels, bears, primates (e.g., chimpanzees, gorillas, and humans)). “Subject” may also be a cell, a population of cells, a tissue, an organ, or an organism, and constituents thereof. Tissues, cells and their progeny of a biological entity obtained in vivo or cultured in vitro are also encompassed by this term.

[0080] As used herein, “cDNA” refers to a DNA sequence that is complementary to a RNA transcript in a cell. It is a man-made molecule. Typically, cDNA is made in vitro by an enzyme called reverse-transcriptase using RNA transcripts as templates.

[0081] As used herein, “deoxyribonucleic acid (DNA)” and “ribonucleic acid (RNA)” generally refer to any polyribonucleotide or polydeoxribonucleotide, which may be unmodified RNA or DNA or modified RNA or DNA. RNA may be in the form of a tRNA (transfer RNA), snRNA (small nuclear RNA), rRNA (ribosomal RNA), mRNA (messenger RNA), anti-sense RNA, RNAi (RNA interference construct), siRNA (short interfering RNA), ribozymes, crRNA, non-coding RNA, long non-coding RNA, engineered guide RNA for a RNA guided nuclease, and/or the like.

[0082] As used herein, “DNA molecule” can include nucleic acids/polynucleotides that are made of DNA.

[0083] As used herein, “expression” refers to the process by which polynucleotides are transcribed into RNA transcripts. In the context of mRNA and other translated RNA species, “expression” also refers to the process or processes by which the transcribed RNA is subsequently translated into peptides, polypeptides, or proteins. In some instances, “expression” can also be a reflection of the stability of a given RNA. For example, when one measures RNA, depending on the method of detection and/or quantification of the RNA as well as other techniques used in conjunction with RNA detection and/or quantification, it can be that increased/decreased RNA transcript levels are the result of increased/decreased transcription and/or increased/decreased stability and/or degradation of the RNA transcript. One of ordinary skill in the art will appreciate these techniques and the relation “expression” in these various contexts to the underlying biological mechanisms.

[0084] As used herein, the term “encode” refers to principle that DNA can be transcribed into RNA, which can then be translated into amino acid sequences that can form proteins. As such, related terms, such as “encoding” in the context of an “encoding polynucleotide” refer to any polynucleotide capable of indirectly or directly being translated into a protein, including but not limited to DNA, cDNA, and mRNA.

[0085] As used herein, “gene” refers to a hereditary unit corresponding to a sequence of DNA that occupies a specific location on a chromosome and that contains the genetic instruction for a characteristic(s) or trait(s) in an organism. The term gene can refer to translated and/or untranslated regions of a genome. “Gene” can refer to the specific sequence of DNA that is transcribed into an RNA transcript that can be translated into a polypeptide or be a catalytic RNA molecule, including but not limited to, tRNA, siRNA, piRNA, miRNA, long-non-coding RNA and shRNA.

[0086] As used herein, “identity,” is a relationship between two or more nucleotide or polypeptide sequences, as determined by comparing the sequences. In the art, “identity” also refers to the degree of sequence relatedness between nucleotide or polypeptide as determined by the match between strings of such sequences. “Identity” can be readily calculated by known methods, including, but not limited to, those described in (Computational Molecular Biology, Lesk, A. M., Ed., Oxford University Press, New York, 1988; Biocomputing: Informatics and Genome Projects, Smith, D. W., Ed., Academic Press, New York, 1993; Computer Analysis of Sequence Data, Part I, Griffin, A. M, and Griffin, H G., Eds., Humana Press, New Jersey, 1994; Sequence Analysis in Molecular Biology, von Heinje, G., Academic Press, 1987; and Sequence Analysis Primer, Gribskov, M and Devereux, J., Eds., M Stockton Press, New York, 1991; and Carillo, H, and Lipman, D., SIAM J. Applied Math. 1988, 48: 1073. Preferred methods to determine identity are designed to give the largest match between the sequences tested. Methods to determine identity are codified in publicly available computer programs. The percent identity between two sequences can be determined by using analysis software (e.g., Sequence Analysis Software Package of the Genetics Computer Group, Madison Wis.) that incorporates the Needelman and Wunsch, (J. Mol. Biol., 1970, 48: 443-453,) algorithm (e.g., NBLAST, and XBLAST). The default parameters are used to determine the identity for the polypeptides of the present disclosure, unless stated otherwise.

[0087] As used herein, “isolated” means separated from constituents, cellular and otherwise, in which the polynucleotide, peptide, polypeptide, protein, antibody, or fragments thereof, bacteria, are normally associated with in nature. A non-naturally occurring polynucleotide, peptide, polypeptide, protein, antibody, or fragments thereof, or bacteria do not require “isolation” to distinguish it from its naturally occurring counterpart.

[0088] As used herein, “mammal,” for the purposes of treatments, refers to any animal classified as a mammal, including human, domestic and farm animals, nonhuman primates, and zoo, sports, or pet animals, such as, but not limited to, dogs, horses, cats, and cows.

[0089] The term “molecular weight”, as used herein, generally refers to the mass or average mass of a material. If a polymer or oligomer, the molecular weight can refer to the relative average chain length or relative chain mass of the bulk polymer. In practice, the molecular weight of polymers and oligomers can be estimated or characterized in various ways including gel permeation chromatography (GPC) or capillary viscometry. GPC molecular weights are reported as the weight-average molecular weight (M_{w}) as opposed to the number-average molecular weight (Mₙ). Capillary viscometry provides estimates of molecular weight as the inherent viscosity determined from a dilute polymer solution using a particular set of concentration, temperature, and solvent conditions.

[0090] As used herein, “nucleic acid” and “polynucleotide” generally refer to a string of at least two base-sugar-phosphate combinations and refers to, among others, single- and double-stranded DNA, DNA that is a mixture of single- and double-stranded regions, single- and double-stranded RNA, and RNA that is mixture of single- and double-stranded regions, hybrid molecules including DNA and RNA that may be single-stranded or, more typically, double-stranded or a mixture of single- and double-stranded regions. In addition, polynucleotide as used herein refers to triple-stranded regions including RNA or DNA or both RNA and DNA. The strands in such regions may be from the same molecule or from different molecules. The regions may include all of one or more of the molecules, but more typically involve only a region of some of the molecules. One of the molecules of a triple-helical region often is an oligonucleotide. “Polynucleotide” and “nucleic acids” also encompasses such chemically, enzymatically or metabolically modified forms of polynucleotides, as well as the chemical forms of DNA and RNA characteristic of viruses and cells, including simple and complex cells, inter alia. For instance, the term polynucleotide includes DNAs or RNAs as described above that contain one or more modified bases. Thus, DNAs or RNAs having unusual bases, such as inosine, or modified bases, such as tritylated bases, to name just two examples, are polynucleotides as the term is used herein. “Polynucleotide” and “nucleic acids” also includes PNAs (peptide nucleic acids), phosphorothioates, and other variants of the phosphate backbone of native nucleic acids. Natural nucleic acids have a phosphate backbone, artificial nucleic acids may contain other types of backbones, but contain the same bases. Thus, DNAs or RNAs with backbones modified for stability or for other reasons are “nucleic acids” or “polynucleotide” as that term is intended herein.

[0091] As used herein, “nucleic acid sequence” and “oligonucleotide” also encompasses a nucleic acid and polynucleotide as defined above.

[0092] As used herein, “overexpressed” or “overexpression” can refer to an increased expression level of an RNA or protein product encoded by a gene as compared to the level of expression of the RNA or protein product in a normal or control cell.

[0093] As used herein, “operatively linked” can indicate that the regulatory sequences useful for expression of the coding sequences of a nucleic acid are placed in the nucleic acid molecule in the appropriate positions relative to the coding sequence so as to effect expression of the coding sequence. This same term can be applied to the arrangement of coding sequences and/or transcription control elements (e.g., promoters, enhancers, and termination elements), and/or selectable markers in an expression vector. “Operatively linked” can also refer to an indirect attachment (i.e., not a direct fusion) of two or more polynucleotide sequences or polypeptides to each other via a linking molecule (also referred to herein as a linker).

[0094] As used herein, “plasmid” as used herein can refer to a non-chromosomal double-stranded DNA sequence including an intact “replicon” such that the plasmid is replicated in a host cell.

[0095] As used herein, “protein” as used herein can refer to a molecule composed of one or more chains of amino acids in a specific order. The term protein is used interchangeable with “polypeptide.” The order is determined by the base sequence of nucleotides in the gene coding for the protein. Proteins are required for the structure, function, and regulation of the body's cells, tissues, and organs.

[0096] As used herein, the term “recombinant” or “engineered” generally refer to a non-naturally occurring nucleic acid, nucleic acid construct, or polypeptide. Such non-naturally occurring nucleic acids may include natural nucleic acids that have been modified, for example that have deletions, substitutions, inversions, insertions, etc., and/or combinations of nucleic acid sequences of different origin that are joined using molecular biology technologies (e.g., a nucleic acid sequences encoding a fusion protein (e.g., a protein or polypeptide formed from the combination of two different proteins or protein fragments), the combination of a nucleic acid encoding a polypeptide to a promoter sequence, where the coding sequence and promoter sequence are from different sources or otherwise do not typically occur together naturally (e.g., a nucleic acid and a constitutive promoter), etc. Recombinant or engineered can also refer to the polypeptide encoded by the recombinant nucleic acid. Non-naturally occurring nucleic acids or polypeptides include nucleic acids and polypeptides modified by man.

[0097] As used herein, “separated” can refer to the state of being physically divided from the original source or population such that the separated compound, agent, particle, or molecule can no longer be considered part of the original source or population.

[0098] As used herein, the term “vector” is used in reference to a vehicle used to introduce an exogenous nucleic acid sequence into a cell and/or from one environment to another. A vector can include a DNA molecule, linear or circular (e.g., plasmids), which includes a segment encoding a polypeptide of interest optionally operatively linked to additional segments that provide for its transcription and translation upon introduction into a host cell or host cell organelles. Such additional segments may include promoter and terminator sequences, and may also include one or more origins of replication, one or more selectable markers, an enhancer, a polyadenylation signal, etc. In some embodiments, vectors, such as expression vectors, can be derived from yeast or bacterial genomic or plasmid DNA, or viral DNA, or may contain elements of both. A vector can be a replicon, such as a plasmid, phage, or cosmid, into which another DNA segment may be inserted so as to bring about the replication of the inserted segment.

[0099] As used herein, “plasmid” refers to a circular double stranded DNA loop into which additional DNA segments can be inserted, such as by standard molecular cloning techniques. Plasmids generally have a genetic structure that allows them to exist and replicate within a cell independently of the chromosomes and within the cytoplasm of the cell.

[0100] As used herein, term “biodegradable”, generally refers to a material that will degrade or erode under physiologic conditions to smaller units or chemical species that are capable of being metabolized, eliminated, or excreted by the subject. The degradation time is a function of composition and morphology. Degradation times can be from hours to weeks.

[0101] As used herein, “transforming” when used in the context of engineering or modifying a cell, refers to the introduction by any suitable technique and/or the transient or stable incorporation and/or expression of an exogenous gene in a cell.

[0102] As used herein, “selectable marker” refers to a gene whose expression allows one to identify cells that have been transformed or transfected with a vector containing the marker gene. For instance, a recombinant nucleic acid may include a selectable marker operatively linked to a gene or insert of interest and a promoter, such that expression of the selectable marker indicates the successful transformation of the cell with the gene or insert of interest. Examples of selectable markers include, but are not limited to, DNA and/or RNA segments that contain restriction enzyme sites; DNA segments that encode products that provide resistance against otherwise toxic compounds including antibiotics, such as, spectinomycin, ampicillin, kanamycin, tetracycline, Basta, neomycin phosphotransferase II (NEO), hygromycin phosphotransferase (HPT)) and the like; DNA and/or RNA segments that encode products that are otherwise lacking in the recipient cell (e.g., tRNA genes, auxotrophic markers); DNA and/or RNA segments that encode products which can be readily identified (e.g., phenotypic markers such as β-galactosidase, GUS; fluorescent proteins such as green fluorescent protein (GFP), cyan (CFP), yellow (YFP), red (RFP), luciferase, and cell surface proteins); the generation of new primer sites for PCR (e.g., the juxtaposition of two DNA sequence not previously juxtaposed), the inclusion of DNA sequences not acted upon or acted upon by a restriction endonuclease or other DNA modifying enzyme, chemical, etc.; epitope tags (e.g. FLAG- and His-tags), and, the inclusion of a DNA sequences required for a specific modification (e.g., methylation) that allows its identification. Other suitable markers will be appreciated by those of skill in the art.

[0103] As used herein, “promoter” includes all sequences capable of driving transcription of a coding sequence. In particular, the term “promoter” as used herein refers to a DNA sequence generally described as the 5′ regulator region of a gene, located proximal to the start codon. The transcription of an adjacent coding sequence(s) is initiated at the promoter region. The term “promoter” also includes fragments of a promoter that are functional in initiating transcription of the gene.

[0104] As used herein, “polypeptides” or “proteins” are as amino acid residue sequences. Those sequences are written left to right in the direction from the amino to the carboxy terminus. In accordance with standard nomenclature, amino acid residue sequences are denominated by either a three letter or a single letter code as indicated as follows: Alanine (Ala, A), Arginine (Arg, R), Asparagine (Asn, N), Aspartic Acid (Asp, D), Cysteine (Cys, C), Glutamine (Gln, Q), Glutamic Acid (Glu, E), Glycine (Gly, G), Histidine (His, H), Isoleucine (Ile, I), Leucine (Leu, L), Lysine (Lys, K), Methionine (Met, M), Phenylalanine (Phe, F), Proline (Pro, P), Serine (Ser, S), Threonine (Thr, T), Tryptophan (Trp, W), Tyrosine (Tyr, Y), and Valine (Val, V).

[0105] As used herein, “regulatory element” refers to and includes promoters, operons, enhancers, internal ribosomal entry sites (IRES), and other expression control elements (e.g., transcription termination signals, such as polyadenylation signals and poly-U sequences). Such regulatory elements are described, for example, in Goeddel, GENE EXPRESSION TECHNOLOGY: METHODS IN ENZYMOLOGY 185, Academic Press, San Diego, Calif (1990).

[0106] As used herein, the term “exogenous DNA” or “exogenous nucleic acid sequence” or “exogenous polynucleotide” refers to a nucleic acid sequence that was introduced into a cell, organism, or organelle via transfection. Exogenous nucleic acids originate from an external source, for instance, the exogenous nucleic acid may be from another cell or organism and/or it may be synthetic and/or recombinant. While an exogenous nucleic acid sometimes originates from a different organism or species, it may also originate from the same species (e.g., an extra copy or recombinant form of a nucleic acid that is introduced into a cell or organism in addition to or as a replacement for the naturally occurring nucleic acid). Typically, the introduced exogenous sequence is a recombinant sequence.

[0107] As used herein, “wild-type” is the average form of an organism, variety, strain, gene, protein, or characteristic as it occurs in a given population in nature, as distinguished from mutant forms that may result from selective breeding, recombinant engineering, and/or transformation with a transgene.

[0108] Various embodiments are described hereinafter. It should be noted that the specific embodiments are not intended as an exhaustive description or as a limitation to the broader embodiments discussed herein. One embodiment described in conjunction with a particular embodiment is not necessarily limited to that embodiment and can be practiced with any other embodiment(s). Reference throughout this specification to “one embodiment”, “an embodiment,” “an example embodiment,” means that a particular feature, structure or characteristic described in connection with the embodiment is included in at least one embodiment of the present invention. Thus, appearances of the phrases “in one embodiment,” “in an embodiment,” or “an example embodiment” in various places throughout this specification are not necessarily all referring to the same embodiment, but may. Furthermore, the particular features, structures or characteristics may be combined in any suitable manner, as would be apparent to a person skilled in the art from this disclosure, in one or more embodiments. Furthermore, while some embodiments described herein include some, but not other features included in other embodiments, combinations of features of different embodiments are meant to be within the scope of the invention. For example, in the appended claims, any of the claimed embodiments can be used in any combination.

[0109] All publications, published patent documents, and patent applications cited herein are hereby incorporated by reference to the same extent as though each individual publication, published patent document, or patent application was specifically and individually indicated as being incorporated by reference.

### Overview

[0110] Dogs and cats can have bad breath. Not only can a nuisance for their human companions, the offensive odor has roots in an unhealthy microflora. Although treats, chews, mouthwashes, toothpastes exist for pets, most fail to have long term duration and thus, do not effectively mask the odor for sustained periods of time.

[0111] With that said, described herein are engineered bacteria that express various genes that result in the production of aromatic compounds. The engineered bacteria can be based on bacteria that are part of the commensal oral microbiome of a dog or cat. When present in the oral cavity of a dog or cat the engineered bacteria can produce aromatic compounds and can result in pleasant breath. The engineered bacteria can be incorporated into an article (e.g., chews and toys), treats, foods, oral rinses or pastes that can be taken into the oral cavity of the dog or cat when eating, chewing, playing with and/or otherwise administered to the dog or cat.

[0112] Other compositions, compounds, methods, features, and advantages of the present disclosure will be or become apparent to one having ordinary skill in the art upon examination of the following drawings, detailed description, and examples. It is intended that all such additional compositions, compounds, methods, features, and advantages be included within this description, and be within the scope of the present disclosure.

### Engineered Volatile-Producing Bacteria

[0113] Described herein are engineered bacteria that can express genes that result in the production of volatile compounds by the bacteria. In some embodiments, the aromatic compounds can have a pleasant odor when smelled by a human. In some embodiments, the engineered bacteria can produce the volatile compound methyl salicylate, which can produce a mint odor. In some embodiments, the engineered bacteria can produce the volatile compound isoamyl acetate, which can produce a pear/banana odor. The engineered bacteria can be engineered express an exogenous PCHA gene, an exogenous PCHB gene, an exogenous ATF gene (e.g., ATF1 and/or ATF2), exogenous BAT2 gene, an exogenous THI3 gene, or an exogenous BSMT1 gene.

[0114] Without being bound by theory, gene expression of BSMT1 results in production of a methyltransferase that is involved in the biosynthesis of methyl salicylate from salicylic acid. Engineered bacteria that express the BSMT1 gene can produce methyl salicylate and a mint smell. In some embodiments, the engineered bacteria are also exposed to and/or contain an amount of salicylic acid.

[0115] The genes PCHB and PCHA (collectively PCHBA) are part of the pchDCBA operon that Pseudomonas species use to encode enzymes to make pyochelin. PchA is isochorismate synthase, while pchB encodes isochorisomate-pyruvate lyase. PhcA takes chorismate and converts it to isochorismate. PchB turns isochorismate into salicylate and pyruvate. The salicylate can be converted by BSMT into a volatile compound as previously described. Without being bound by theory, expression PCHB and PCHA in the engineered bacteria can provide the enzymatic pathway to produce a substrate for BSMT.

[0116] In some embodiments, the PCHB gene or protein expressed therefrom has or includes a sequence that is about 90% to 100% identical to SEQ ID NOs: 1 and/or 10 (gene or mRNA) or SEQ ID NOs: 4 and/or 6 (protein). For example, the PCHB gene or protein can be about 90, 91, 92, 93, 94, 95, 96, 97, 98, 99, 99.1, 99.2, 99.3, 99.4, 99.5, 99.6, 99.7, 99.8, 99.9, to/or about 100% identical to SEQ ID NOs: 1 and/or 10 (gene or mRNA) or SEQ ID NOs: 4 and/or 6 (protein).

[0117] In some embodiments, the PCHA gene or protein expressed therefrom has or includes a sequence that is about 90% to 100% identical to SEQ ID NOs: 1 and/or 10 (gene or mRNA) or SEQ ID NOs: 3 and/or 5 (protein). For example, the PCHA gene or protein can be about 90, 91, 92, 93, 94, 95, 96, 97, 98, 99, 99.1, 99.2, 99.3, 99.4, 99.5, 99.6, 99.7, 99.8, 99.9, to/or about 100% identical to SEQ ID NOs: 1 and/or 10 (gene or mRNA) or SEQ ID NOs: 3 and/or 5 (protein).

[0118] In some embodiments, the BSMT (e.g., BSMT1) gene or protein expressed therefrom has or includes a sequence that is about 90% to 100% identical to SEQ ID NOs: 2 and/or 8 (gene or mRNA) or SEQ ID NOs: 9 and/or 7 (protein). For example, the BSMT (e.g., BSMT1) gene or protein can be about 90, 91, 92, 93, 94, 95, 96, 97, 98, 99, 99.1, 99.2, 99.3, 99.4, 99.5, 99.6, 99.7, 99.8, 99.9, to/or about 100% identical to SEQ ID NOs: 2 and/or 8 (gene or mRNA) or SEQ ID NOs: 9 and/or 7 (protein).

[0119] The ATF gene (e.g., ATF1 and/or ATF2), BAT2 gene, or THI3 gene encode enzymes that can result in production of an alcohol acetyl transferase, which can result in the condensation of isoamyl alcohol and acetyl-CoA to isoamyl acetate. Without being bound by theory, bacteria engineered to express an ATF, BAT2 gene, and/or THI3 gene can produce isoamyl acetate and a corresponding fruity odor (e.g., banana or pear). See e.g., Mason and Dufour. Yeast. 2000.16(14):1287-1298 and Verstrepen et al., Appl Environ Microbiol. 2003. 69(9):5228-5237.

[0120] In some embodiments, the ATF gene and/or protein, the BAT gene and/or protein, and/or the THI3 gene or protein is from a Saccharomyces sp., including but not limited to S. cerevisiae.

[0121] In some embodiments, the ATF1 gene or protein expressed therefrom has or includes a sequence that is about 90% to 100% identical to GenBank Accession No. NM 001183797.3 (gene or mRNA) (SEQ ID NO: 49) or UniprotID: UniProtKB-P40353 (protein) (SEQ ID NO: 50). For example, the ATF1 gene or protein can be about 90, 91, 92, 93, 94, 95, 96, 97, 98, 99, 99.1, 99.2, 99.3, 99.4, 99.5, 99.6, 99.7, 99.8, 99.9, to/or about 100% identical to GenBank Accession No. NM 001183797.3 (gene or mRNA) (SEQ ID NO: 49) or UniprotID: UniProtKB-P40353 (protein) (SEQ ID NO: 50).

[0122] In some embodiments, the ATF2 gene or mRNA or protein expressed therefrom has or includes a sequence that is about 90% to 100% identical to GenBank Accession No. NM_001181306.1 (gene or mRNA) (SEQ ID NO: 51) or UniprotID: UniProtKB-P53296 (protein) (SEQ ID NO: 52). For example, the ATF2 gene or protein can be about 90, 91, 92, 93, 94, 95, 96, 97, 98, 99, 99.1, 99.2, 99.3, 99.4, 99.5, 99.6, 99.7, 99.8, 99.9, to/or about 100% identical to GenBank Accession No. NM 001181306.1 (gene or mRNA) (SEQ ID NO: 51) or UniprotID: UniProtKB-P53296 (protein) (SEQ ID NO: 52).

[0123] In some embodiments, the BAT2 gene or mRNA or protein expressed therefrom has or includes a sequence that is about 90% to 100% identical to GenBank Accession No. NM 001183797.3 (gene or mRNA) (SEQ ID NO: 53) or UniprotID: UniProtKB-P47176 (protein) (SEQ ID NO: 54). For example, the BAT2 gene or protein can be about 90, 91, 92, 93, 94, 95, 96, 97, 98, 99, 99.1, 99.2, 99.3, 99.4, 99.5, 99.6, 99.7, 99.8, 99.9, to/or about 100% identical to GenBank Accession No. NM 001181306.1 (gene or mRNA) (SEQ ID NO: 53) or UniprotID: UniProtKB-P47176 (protein) (SEQ ID NO: 54).

[0124] In some embodiments, the THI3 gene or protein expressed therefrom has or includes a sequence that is about 90% to 100% SEQ ID NO: 55 (gene or mRNA) or SEQ ID NO: 56 (protein). For example, the BAT2 gene or mRNA or protein can be about 90, 91, 92, 93, 94, 95, 96, 97, 98, 99, 99.1, 99.2, 99.3, 99.4, 99.5, 99.6, 99.7, 99.8, 99.9, to/or about 100% identical to SEQ ID NO: 55 (gene or mRNA) or SEQ ID NO: 56 (protein).

Exemplary ATF1 gene/mRNA
(GenBank Accession No.: NM_001183797.3)
(SEQ ID NO: 49)
(SEQ ID NO: 49)
ATGAATGAAATCGATGAGAAAAATCAGGCCCCCGTGCAAC
AAGAATGCCTGAAAGAGATGATTCAGAATGGGCATGCTCG
GCGTATGGGATCTGTTGAAGATCTGTATGTTGCTCTCAAC
AGACAAAACTTATATCGAAACTTCTGCACATATGGAGAAT
TGAGTGATTACTGTACTAGGGATCAGCTCACATTAGCTTT
GAGGGAAATCTGCCTGAAAAATCCAACTCTTTTACATATT
GTTCTACCAACAAGATGGCCAAATCATGAAAATTATTATC
GCAGTTCCGAATACTATTCACGGCCACATCCAGTGCATGA
TTATATTTCAGTATTACAAGAATTGAAACTGAGTGGTGTG
GTTCTCAATGAACAACCTGAGTACAGTGCAGTAATGAAGC
AAATATTAGAAGAATTCAAAAATAGTAAGGGTTCCTATAC
TGCAAAAATTTTTAAACTTACTACCACTTTGACTATTCCT
TACTTTGGACCAACAGGACCGAGTTGGCGGCTAATTTGTC
TTCCAGAAGAGCACACAGAAAAGTGGAAAAAATTTATCTT
TGTATCTAATCATTGCATGTCTGATGGTCGGTCTTCGATC
CACTTTTTTCATGATTTAAGAGACGAATTAAATAATATTA
AAACTCCACCAAAAAAATTAGATTACATTTTCAAGTACGA
GGAGGATTACCAATTATTGAGGAAACTTCCAGAACCGATC
GAAAAGGTGATAGACTTTAGACCACCGTACTTGTTTATTC
CGAAGTCACTTCTTTCGGGTTTCATCTACAATCATTTGAG
ATTTTCTTCAAAAGGTGTCTGTATGAGAATGGATGATGTG
GAAAAAACCGATGATGTTGTCACCGAGATCATCAATATTT
CACCAACAGAATTTCAAGCGATTAAAGCAAATATTAAATC
AAATATCCAAGGTAAGTGTACTATCACTCCGTTTTTACAT
GTTTGTTGGTTTGTATCTCTTCATAAATGGGGTAAATTTT
TCAAACCATTGAACTTCGAATGGCTTACGGATATTTTTAT
CCCCGCAGATTGCCGCTCACAACTACCAGATGATGATGAA
ATGAGACAGATGTACAGATATGGCGCTAACGTTGGATTTA
TTGACTTCACCCCCTGGATAAGCGAATTTGACATGAATGA
TAACAAAGAAAATTTTTGGCCACTTATTGAGCACTACCAT
GAAGTAATTTCGGAAGCTTTAAGAAATAAAAAGCATCTCC
ATGGCTTAGGGTTCAATATACAAGGCTTCGTTCAAAAATA
TGTGAACATTGACAAGGTAATGTGCGATCGTGCCATCGGG
AAAAGACGCGGAGGTACATTGTTAAGCAATGTAGGTCTGT
TTAATCAGTTAGAGGAGCCCGATGCCAAATATTCTATATG
CGATTTGGCATTTGGCCAATTTCAAGGATCCTGGCACCAA
GCATTTTCCTTGGGTGTTTGTTCGACTAATGTAAAGGGGA
TGAATATTGTTGTTGCTTCAACAAAGAATGTTGTTGGTAG
TCAAGAATCTCTCGAAGAGCTTTGCTCCATTTACAAAGCT
CTCCTTTTAGGCCCTTAG
Exemplary ATF1 protein
(UniProtKB-P40353)
(SEQ ID NO: 50)
(SEQ ID NO: 50)
MNEIDEKNQAPVQQECLKEMIQNGHARRMGSVEDLYVALN
RQNLYRNFCTYGELSDYCTRDQLTLALREICLKNPTLLHI
VLPTRWPNHENYYRSSEYYSRPHPVHDYISVLQELKLSGV
VLNEQPEYSAVMKQILEEFKNSKGSYTAKIFKLTTTLTIP
YFGPTGPSWRLICLPEEHTEKWKKFIFVSNHCMSDGRSSI
HFFHDLRDELNNIKTPPKKLDYIFKYEEDYQLLRKLPEPI
EKVIDFRPPYLFIPKSLLSGFIYNHLRFSSKGVCMRMDDV
EKTDDVVTEIINISPTEFQAIKANIKSNIQGKCTITPFLH
VCWFVSLHKWGKFFKPLNFEWLTDIFIPADCRSQLPDDDE
MRQMYRYGANVGFIDFTPWISEFDMNDNKENFWPLIEHYH
EVISEALRNKKHLHGLGFNIQGFVQKYVNIDKVMCDRAIG
KRRGGTLLSNVGLFNQLEEPDAKYSICDLAFGQFQGSWHQ
AFSLGVCSTNVKGMNIVVASTKNVVGSQESLEELCSIYKA
LLLGP
Exemplary ATF2 gene/mRNA
(GenBank Accession
No.: NM_001181306.1)
(SEQ ID NO: 51)
(SEQ ID NO: 51)
ATGGAAGATATAGAAGGATACGAACCACATATCACTCAAG
AGTTGATAGACCGTGGCCATGCAAGACGTATGGGCCACTT
GGAAAACTACTTTGCTGTTTTGAGTAGGCAGAAAATGTAC
TCGAATTTTACTGTTTACGCGGAATTGAATAAAGGTGTTA
ATAAGAGACAACTAATGCTTGTCTTGAAAGTATTACTTCA
AAAATACTCAACTCTTGCGCATACAATCATTCCTAAGCAT
TATCCTCATCATGAAGCGTACTACTCTAGCGAAGAGTACC
TTAGTAAACCTTTTCCACAGCATGATTTCATAAAGGTGAT
TTCTCATCTTGAATTCGATGACTTGATTATGAATAATCAA
CCAGAATACAGAGAAGTCATGGAGAAAATCTCAGAACAGT
TCAAAAAGGATGATTTCAAAGTCACCAATAGGTTAATCGA
ATTGATTAGCCCTGTAATCATACCTCTGGGTAATCCGAAG
AGGCCTAATTGGAGATTGATTTGTTTACCAGGTAAGGATA
CTGATGGGTTTGAAACGTGGAAAAACTTCGTTTATGTCAC
TAACCACTGCGGCTCCGACGGTGTCAGTGGATCGAATTTT
TTCAAAGATTTAGCTCTACTCTTTTGTAAAATCGAAGAAA
AAGGGTTTGATTATGATGAAGAGTTCATCGAAGATCAAGT
CATCATTGACTATGATCGAGACTACACTGAAATTTCTAAA
TTGCCAAAACCGATTACGGATCGTATTGACTACAAGCCAG
CATTGACTTCATTACCCAAATTCTTTTTAACAACCTTCAT
TTATGAACATTGTAATTTTAAAACCTCCAGCGAATCTACA
CTTACAGCTAGATATAGCCCCTCTAGTAATGCTAATGCTA
GTTACAATTACTTGTTGCATTTCAGTACTAAGCAAGTAGA
ACAAATCAGAGCTCAGATCAAGAAAAATGTTCACGATGGG
TGCACCCTAACACCCTTCATTCAAGCGTGCTTTCTTGTAG
CCCTGTATAGACTGGATAAGCTGTTCACAAAATCTCTTCT
CGAGTATGGGTTCGATGTGGCTATTCCAAGCAACGCAAGA
AGGTTTTTACCAAACGATGAAGAGTTAAGAGATTCTTATA
AATACGGCTCCAACGTTGGAGGTTCGCATTACGCCTATCT
AATCTCCTCATTCGACATTCCCGAAGGTGACAATGACAAG
TTTTGGAGTCTTGTCGAATACTACTATGACCGCTTTTTAG
AATCGTACGACAACGGTGACCACTTGATTGGTCTGGGGGT
CCTACAACTTGATTTTATCGTTGAAAACAAGAATATAGAC
AGCCTTCTTGCCAACTCTTATTTGCACCAGCAAAGAGGCG
GTGCAATCATCAGTAATACAGGACTTGTCTCGCAAGATAC
GACCAAGCCGTACTACGTTCGGGATTTAATCTTCTCGCAG
TCTGCAGGCGCCTTGAGATTTGCGTTCGGCCTAAACGTTT
GCTCCACAAACGTGAATGGTATGAACATGGACATGAGCGT
GGTTCAGGGCACTCTACGGGATCGTGGCGAATGGGAATCG
TTCTGCAAGCTCTTCTACCAAACCATCGGCGAATTTGCGT
CGCTTTAA
Exemplary ATF2 protein
(UniProtKB-P53296)
(SEQ ID NO: 52)
(SEQ ID NO: 52)
MEDIEGYEPHITQELIDRGHARRMGHLENYFAVLSRQKMY
SNFTVYAELNKGVNKRQLMLVLKVLLQKYSTLAHTIIPKH
YPHHEAYYSSEEYLSKPFPQHDFIKVISHLEFDDLIMNNQ
PEYREVMEKISEQFKKDDFKVTNRLIELISPVIIPLGNPK
RPNWRLICLPGKDTDGFETWKNFVYVTNHCGSDGVSGSNF
FKDLALLFCKIEEKGFDYDEEFIEDQVIIDYDRDYTEISK
LPKPITDRIDYKPALTSLPKFFLTTFIYEHCNFKTSSEST
LTARYSPSSNANASYNYLLHFSTKQVEQIRAQIKKNVHDG
CTLTPFIQACFLVALYRLDKLFTKSLLEYGFDVAIPSNAR
RFLPNDEELRDSYKYGSNVGGSHYAYLISSFDIPEGDNDK
FWSLVEYYYDRFLESYDNGDHLIGLGVLQLDFIVENKNID
SLLANSYLHQQRGGAIISNTGLVSQDTTKPYYVRDLIFSQ
SAGALRFAFGLNVCSTNVNGMNMDMSVVQGTLRDRGEWES
FCKLFYQTIGEFASL
Exemplary BAT2 gene or portion thereof
GenBank Accession No.:
NM_001181806.1
(SEQ ID NO: 53)
(SEQ ID NO: 53)
ATGACCTTGGCACCCCTAGACGCCTCCAAAGTTAAGATAA
CTACCACACAACATGCATCTAAGCCAAAACCGAACAGTGA
GTTAGTGTTTGGCAAGAGCTTCACGGACCACATGTTAACT
GCGGAATGGACAGCTGAAAAAGGGTGGGGTACCCCAGAGA
TTAAACCTTATCAAAATCTGTCTTTAGACCCTTCCGCGGT
GGTTTTCCATTATGCTTTTGAGCTATTCGAAGGGATGAAG
GCTTACAGAACGGTGGACAACAAAATTACAATGTTTCGTC
CAGATATGAATATGAAGCGCATGAATAAGTCTGCTCAGAG
AATCTGTTTGCCAACGTTCGACCCAGAAGAGTTGATTACC
CTAATTGGGAAACTGATCCAGCAAGATAAGTGCTTAGTTC
CTGAAGGAAAAGGTTACTCTTTATATATCAGGCCTACATT
AATCGGCACTACGGCCGGTTTAGGGGTTTCCACGCCTGAT
AGAGCCTTGCTATATGTCATTTGCTGCCCTGTGGGTCCTT
ATTACAAAACTGGATTTAAGGCGGTCAGACTGGAAGCCAC
TGATTATGCCACAAGAGCTTGGCCAGGAGGCTGTGGTGAC
AAGAAACTAGGTGCAAACTACGCCCCCTGCGTCCTGCCAC
AATTGCAAGCTGCTTCAAGGGGTTACCAACAAAATTTATG
GCTATTTGGTCCAAATAACAACATTACTGAAGTCGGCACC
ATGAATGCTTTTTTCGTGTTTAAAGATAGTAAAACGGGCA
AGAAGGAACTAGTTACTGCTCCACTAGACGGTACCATTTT
GGAAGGTGTTACTAGGGATTCCATTTTAAATCTTGCTAAA
GAAAGACTCGAACCAAGTGAATGGACCATTAGTGAACGCT
ACTTCACTATAGGCGAAGTTACTGAGAGATCCAAGAACGG
TGAACTACTTGAAGCCTTTGGTTCTGGTACTGCTGCGATT
GTTTCTCCCATTAAGGAAATCGGCTGGAAAGGCGAACAAA
TTAATATTCCGTTGTTGCCCGGCGAACAAACCGGTCCATT
GGCCAAAGAAGTTGCACAATGGATTAATGGAATCCAATAT
GGCGAGACTGAGCATGGCAATTGGTCAAGGGTTGTTACTG
ATTTGAACTGA
Exemplary BAT2 protein UniProt
ID P47176
(SEQ ID NO: 54)
(SEQ ID NO: 54)
MTLAPLDASKVKITTTQHASKPKPNSELVFGKSFTDHMLT
AEWTAEKGWGTPEIKPYQNLSLDPSAVVFHYAFELFEGMK
AYRTVDNKITMFRPDMNMKRMNKSAQRICLPTFDPEELIT
LIGKLIQQDKCLVPEGKGYSLYIRPTLIGTTAGLGVSTPD
RALLYVICCPVGPYYKTGFKAVRLEATDYATRAWPGGCGD
KKLGANYAPCVLPQLQAASRGYQQNLWLFGPNNNITEVGT
MNAFFVFKDSKTGKKELVTAPLDGTILEGVTRDSILNLAK
ERLEPSEWTISERYFTIGEVTERSKNGELLEAFGSGTAAI
VSPIKEIGWKGEQINIPLLPGEQTGPLAKEVAQWINGIQY
GETEHGNWSRVVTDLN
Exemplary THI3 gene or portion thereof-
SEQ ID NO: 55
(SEQ ID NO: 55)
ATGAATTCTAGCTATACACAGAGATATGCACTGCCGAAGT
GTATAGCAATATCAGATTATCTTTTCCATCGGCTCAACCA
GCTGAACATACATACCATATTTGGACTCTCCGGAGAATTT
AGCATGCCGTTGCTGGATAAACTATACAACATTCCGAACT
TACGATGGGCCGGTAATTCTAATGAGTTAAATGCTGCCTA
CGCAGCAGATGGATACTCACGACTAAAAGGCTTGGGATGT
CTCATAACAACCTTTGGTGTAGGCGAATTATCGGCAATCA
ATGGCGTGGCCGGATCTTACGCTGAACATGTAGGAATACT
TCACATAGTGGGTATGCCGCCAACAAGTGCACAAACGAAA
CAACTACTACTGCATCATACTCTGGGCAATGGTGATTTCA
CGGTATTTCATAGAATAGCCAGTGATGTAGCATGCTATAC
AACATTGATTATTGACTCTGAATTATGTGCCGACGAAGTC
GATAAGTGCATCAAAAAGGCTTGGATAGAACAGAGGCCAG
TATACATGGGCATGCCTGTCAACCAGGTAAATCTCCCGAT
TGAATCAGCAAGGCTTAATACACCTCTGGATTTACAATTG
CATAAAAACGACCCAGACGTAGAGAAAGAAGTTATTTCTC
GAATATTGAGTTTTATATACAAAAGCCAGAATCCGGCAAT
CATCGTAGATGCATGTACTAGTCGACAGAATTTAATCGAG
GAGACTAAAGAGCTTTGTAATAGGCTTAAATTTCCAGTTT
TTGTTACACCTATGGGTAAGGGTACAGTAAACGAAACAGA
CCCGCAATTTGGGGGCGTATTCACGGGCTCGATATCAGCC
CCAGAAGTAAGAGAAGTAGTTGATTTTGCCGATTTTATCA
TCGTCATTGGTTGCATGCTCTCCGAATTCAGCACGTCAAC
TTTCCACTTCCAATATAAAACTAAGAATTGTGCGCTACTA
TATTCTACATCTGTGAAATTGAAAAATGCCACATATCCTG
ACTTGAGCATTAAATTACTACTACAGAAAATATTAGCAAA
TCTTGATGAATCTAAACTGTCTTACCAACCAAGCGAACAA
CCCAGTATGATGGTTCCAAGACCTTACCCAGCAGGAAATG
TCCTCTTGAGACAAGAATGGGTCTGGAATGAAATATCCCA
TTGGTTCCAACCAGGTGACATAATCATAACAGAAACTGGT
GCTTCTGCATTTGGAGTTAACCAGACCAGATTTCCGGTAA
ATACACTAGGTATTTCGCAAGCTCTTTGGGGATCTGTCGG
ATATACAATGGGGGCGTGTCTTGGGGCAGAATTTGCTGTT
CAAGAGATAAACAAGGATAAATTCCCCGCAACTAAACATA
GAGTTATTCTGTTTATGGGTGACGGTGCTTTCCAATTGAC
AGTTCAAGAATTATCCACAATTGTTAAGTGGGGATTGACA
CCTTATATTTTTGTGATGAATAACCAAGGTTACTCTGTGG
ACAGGTTTTTGCATCACAGGTCAGATGCTAGTTATTACGA
TATCCAACCTTGGAACTACTTGGGATTATTGCGAGTATTT
GGTTGCACGAACTACGAAACGAAAAAAATTATTACTGTTG
GAGAATTCAGATCCATGATCAGTGACCCAAACTTTGCGAC
CAATGACAAAATTCGGATGATAGAGATTATGCTACCACCA
AGGGATGTTCCACAGGCTCTGCTTGACAGGTGGGTGGTAG
AAAAAGAACAGAGCAAACAAGTGCAAGAGGAGAACGAAAA
TTCTAGCGCAGTAAATACGCCAACTCCAGAATTCCAACCA
CTTCTAAAAAAAAATCAAGTTGGATACTGA
Exemplary THI3 protein-SEQ ID NO: 56
(SEQ ID NO: 56)
MNSSYTQRYALPKCIAISDYLFHRLNQLNIHTIFGLSGEF
SMPLLDKLYNIPNLRWAGNSNELNAAYAADGYSRLKGLGC
LITTFGVGELSAINGVAGSYAEHVGILHIVGMPPTSAQTK
QLLLHHTLGNGDFTVFHRIASDVACYTTLIIDSELCADEV
DKCIKKAWIEQRPVYMGMPVNQVNLPIESARLNTPLDLQL
HKNDPDVEKEVISRILSFIYKSQNPAIIVDACTSRQNLIE
ETKELCNRLKFPVFVTPMGKGTVNETDPQFGGVFTGSISA
PEVREVVDFADFIIVIGCMLSEFSTSTFHFQYKTKNCALL
YSTSVKLKNATYPDLSIKLLLQKILANLDESKLSYQPSEQ
PSMMVPRPYPAGNVLLRQEWVWNEISHWFQPGDIIITETG
ASAFGVNQTRFPVNTLGISQALWGSVGYTMGACLGAEFAV
QEINKDKFPATKHRVILFMGDGAFQLTVQELSTIVKWGLT
PYIFVMNNQGYSVDRFLHHRSDASYYDIQPWNYLGLLRVF
GCTNYETKKIITVGEFRSMISDPNFATNDKIRMIEIMLPP
RDVPQALLDRWVVEKEQSKQVQEENENSSAVNTPTPEFQP
LLKKNQVGY

[0125] Described in certain aspects is an engineered bacterium or population thereof, wherein the engineered bacterium having one or more polynucleotides that each encode one or more enzymes capable of catalyzing one or more reactions to produce a volatile compound, one or more polypeptides produced therefrom, or both, and wherein the engineered bacterium is of a strain that is a commensal bacterium strain found in the oral cavity of a mammal, optionally a canine or a feline.

[0126] In certain example embodiments, the one or more enzymes is/are
[0127] a. a methyltransferase that catalyzes the production of methyl salicylate from salicylic acid;
[0128] b. an isochorismate synthase;
[0129] c. an ischorisomate-pyruvate lyase;
[0130] d. is an alcohol acetyl transferase that is capable of condensing isoamyl alcohol and acetyl CoA into isoamyl acetate; or
[0131] e. any combination thereof.

[0132] In certain example embodiments, the one or more polynucleotides each encode a methyltransferase that catalyzes the production of methyl salicylate from salicylic acid, an isochorismate synthase, an ischorisomate-pyruvate lyase, or any combination thereof.

[0133] In certain example embodiments, the volatile compound produced has a mint odor.

[0134] In certain example embodiments, the one or more polynucleotides each comprise a PCHBA gene or mRNA, a BSMT1 gene or mRNA, or any combination thereof.

[0135] In certain example embodiments, at least one of the one or more polynucleotides encodes an alcohol acetyl transferase that is capable of condensing isoamyl alcohol and acetyl CoA into isoamyl acetate.

[0136] In certain example embodiments, the engineered bacterium or population thereof produces a fruity odor. In certain example embodiments, the fruity odor is a banana odor or a pear odor.

[0137] In certain example embodiments, at least one of the one or more polynucleotides includes an ATF gene or mRNA, an BAT2 gene or mRNA, a THI3 gene or mRNA, or any combination thereof.

[0138] In certain example embodiments, the ATF gene or mRNA is an ATF1 gene or mRNA or an ATF2 gene or mRNA.

[0139] In certain example embodiments, one or more of the one or more polynucleotides each comprise a gene or mRNA independently selected from a BSTM1 gene, a BSTM1 mRNA, an ATF gene, an ATF mRNA, a PCHBA gene, a PCHBA mRNA, a BAT2 gene, a BAT2 mRNA, a THI3 gene, a THI3 mRNA, or any combination thereof.

[0140] In certain example embodiments, the ATF gene or ATF mRNA is an ATF1 gene or mRNA or an ATF2 gene or mRNA.

[0141] In certain example embodiments,
[0142] a. the BSTM1 gene or mRNA has a polynucleotide sequence that is about 90-100 percent identical to any one of SEQ ID NO: 2, 8, 11, or 13;
[0143] b. the PCHBA gene or mRNA has a polynucleotide sequence that is about 90-100 percent identical to SEQ ID NO: 1 or 10;
[0144] c. the ATF gene or mRNA has a polynucleotide sequence that is about 90-100 percent identical to SEQ ID NO: 49 or 51;
[0145] d. the BAT2 gene or mRNA has a polynucleotide sequence that is about 90-100 percent identical to SEQ ID NO: 53;
[0146] e. the THI3 gene or mRNA has a polynucleotide sequence that is about 90-100 percent identical to SEQ ID NO: 55;
[0147] f. or any combination thereof.

[0148] In certain example embodiments, one or more of the one or more polynucleotides has a sequence that is about 40-100% identical to any one of SEQ ID NOs.: 1, 2, 8, 10-11, 13, 49, 51, 53, or 55, or any region therein of at least 20 nucleotides.

[0149] In certain example embodiments, one or more of the one or more polynucleotides encodes a polypeptide having a sequence that is about 40 to 100% identical to any one of SEQ ID NOs.: 3-7, 9, 50, 52, 54, or 56.

[0150] In certain example embodiments, the engineered bacterium or population thereof further contains one or more expression vectors, wherein the one or more expression vectors comprise the one or more polynucleotides.

[0151] In certain example embodiments, the engineered bacterium is from genus selected from Escherichia, Pseudomonas, Brevundimonas, Xanthomonas, Deinococcus, or Pedobacter.

[0152] In certain example embodiments, the engineered bacterium is an isolate of a commensal canine oral bacterium or population thereof.

[0153] In certain example embodiments, the commensal canine oral bacterium or population thereof is of the genus Pseudomonas.

[0154] In certain example embodiments, the engineered bacterium is an isolated commensal canine oral bacterium or population thereof having a genome that has one or more sequences that is/are 90-100 percent identical to any one or more of SEQ ID NOs: 12 or 14-48.

[0155] Described in certain aspects herein is an isolated commensal canine oral bacterium or population thereof having a genome having a sequence that is 90-100 percent identical to any one or more of SEQ ID NOs: 12 or 14-48.

[0156] In certain example embodiments, the isolated commensal canine oral bacterium or population thereof is of the genus Pseudomonas.

### Polynucleotides and Polypeptides Relevant to Producing Volatile Compounds

[0157] Described herein are polynucleotides relevant to producing a volatile compound in an engineered bacterium. Such polynucleotides can include one or more polypeptides relevant to and/or capable of producing, either alone or in combination with one or more other polypeptides, a volatile compound in a bacterium or other cell. In some embodiments, the engineered bacteria are engineered to contain and/or express or overexpress a polynucleotide corresponding to and/or containing a PCHBA, ATF1, ATF2, and/or BSMT1 gene. In some embodiments, the engineered bacteria are engineered to express and/or contain a PCHBA, ATF1, ATF2, and/or BSMT1 polypeptide. In some embodiments, the PCHBA, ATF1, ATF2, and/or BSMT1 gene and/or polypeptide is exogenous to the engineered bacteria. In some embodiments, the engineered bacteria express or overexpress a polynucleotide that encodes an alcohol acetyl transferase and/or alcohol acetyl transferase polypeptide that can condense isoamyl alcohol and acetyl CoA into isoamyl acetate. In some embodiments, the alcohol acetyl transferase encoding polynucleotide and/or polypeptide are exogenous to the engineered bacteria. In some embodiments, the engineered bacteria are engineered to contain and/or express or overexpress a polynucleotide that encodes a methyltransferase and/or a methyltransferase polypeptide that is involved in the biosynthesis of methyl salicylate from salicylic acid. In some embodiments, the methyltransferase encoding polynucleotide and/or polypeptide are exogenous to the engineered bacteria.

[0158] In some embodiments, the engineered bacteria are engineered to contain and/or express or overexpress a polynucleotide that is about 40 to 100 percent identical to any one of SEQ ID NOs.: 1, 2, 8, or 10-11 or any region of at least 20 consecutive nucleotides thereof. In some embodiments, the engineered bacteria are engineered to contain and/or express or overexpress a polynucleotide that is about 40 to/or 41, 42, 43, 44, 45, 46, 47, 48, 49, 50, 51, 52, 53, 54, 55, 56, 57, 58, 59, 60, 61, 62, 63, 64, 65, 66, 67, 68, 69, 70, 71, 72, 73, 74, 75, 76, 77, 78, 79, 80, 81, 82, 83, 84, 85, 86, 87, 88, 89, 90, 91, 92, 93, 94, 95, 96, 97, 98, 99, or 100 percent identical to any one of SEQ ID NOs.: 1, 2, 8, 10-11, 13, 49, 51, 53, or 55 or any region of at least 20 consecutive nucleotides thereof. In some embodiments, the engineered bacteria are engineered to contain and/or express or overexpress a polynucleotide that is about 95, to/or 95.1, 95.2, 95.3, 95.4, 95.5, 95.6, 95.7, 95.8, 95.9, 96, 96.1, 96.2, 96.3, 96.4, 96.5, 96.6, 96.7, 96.8, 96.9, 97, 97.1, 97.2, 97.3, 97.4, 97.5, 97.6, 97.7, 97.8, 97.9, 98, 98.1, 98.2, 98.3, 98.4, 98.5, 98.6, 98.7, 98.8, 98.9, 99, 99.1, 99.2, 99.3, 99.4, 99.5, 99.6, 99.7, 99.8, 99.9, or 100 percent identical to any one of SEQ ID NOs.: 1, 2, 8, 10-11, 13, 49, 51, 53, or 55 or any region of at least 20 consecutive nucleotides thereof.

[0159] In some embodiments, the engineered bacteria express or overexpress a methyl transferase that is involved in the biosynthesis of methyl salicylate from salicylic acid and is encoded by a BSMT1 polynucleotide. In some of these embodiments, the engineered bacteria are engineered to contain and/or express or overexpress a BSMT1 encoding polynucleotide. In some embodiments, the engineered bacteria can express or overexpress an alcohol acetyl transferase that can condense isoamyl alcohol and acetyl CoA into isoamyl acetate and is encoded by an ATF polynucleotide. In some of these embodiments, the engineered bacteria are engineered to contain and/or express or over express an ATF encoding polynucleotide. In some embodiments, the polynucleotide in the engineered bacteria encodes a polypeptide that is about 40 to 100 percent identical to any one of SEQ ID NOs.: 3-7, 9, 50, 52, 54, or 56 or any region of at least 20 consecutive nucleotides thereof. In some embodiments, the polynucleotide in the engineered bacteria encodes a polypeptide that is about 40 to/or 41, 42, 43, 44, 45, 46, 47, 48, 49, 50, 51, 52, 53, 54, 55, 56, 57, 58, 59, 60, 61, 62, 63, 64, 65, 66, 67, 68, 69, 70, 71, 72, 73, 74, 75, 76, 77, 78, 79, 80, 81, 82, 83, 84, 85, 86, 87, 88, 89, 90, 91, 92, 93, 94, 95, 96, 97, 98, 99, or 100 percent identical to any one of SEQ ID NOs.: 3-7, 9, 50, 52, 54, or 56 or any region of at least 20 consecutive nucleotides thereof. In some embodiments, the polynucleotide in the engineered bacteria encodes a polypeptide that is about 95, to/or 95.1, 95.2, 95.3, 95.4, 95.5, 95.6, 95.7, 95.8, 95.9, 96, 96.1, 96.2, 96.3, 96.4, 96.5, 96.6, 96.7, 96.8, 96.9, 97, 97.1, 97.2, 97.3, 97.4, 97.5, 97.6, 97.7, 97.8, 97.9, 98, 98.1, 98.2, 98.3, 98.4, 98.5, 98.6, 98.7, 98.8, 98.9, 99, 99.1, 99.2, 99.3, 99.4, 99.5, 99.6, 99.7, 99.8, 99.9, or 100 percent identical to any one of SEQ ID NOs.: 3-7, 9, 50, 52, 54, or 56 or any region of at least 20 consecutive nucleotides thereof.

[0160] In some embodiments, the bacteria are engineered to transiently express one or more polynucleotides and/or polypeptides described herein. In some embodiments, the bacteria are engineered to stably express one or more polynucleotides and/or polypeptides described herein.

[0161] In some embodiments the polynucleotide, vector, plasmid, and the like do not contain an antibiotic resistance selectable marker or an antibiotic resistance gene. In some embodiments, the engineered bacteria are engineered such that they do not contain exogenous or endogenous antibiotic resistance genes.

### Codon Optimization of Polynucleotides

[0162] The polynucleotide(s) relevant to producing a volatile compound in an engineered bacterium described herein can be codon optimized. In general, codon optimization refers to a process of modifying a nucleic acid sequence for enhanced expression in the host cells of interest by replacing at least one codon (e.g., about or more than about 1, 2, 3, 4, 5, 10, 15, 20, 25, 50, or more codons) of the native sequence with codons that are more frequently or most frequently used in the genes of that host cell while maintaining the native amino acid sequence. Various species exhibit particular bias for certain codons of a particular amino acid. Codon bias (differences in codon usage between organisms) often correlates with the efficiency of translation of messenger RNA (mRNA), which is in turn believed to be dependent on, among other things, the properties of the codons being translated and the availability of particular transfer RNA (tRNA) molecules. The predominance of selected tRNAs in a cell is generally a reflection of the codons used most frequently in peptide synthesis. Accordingly, genes can be tailored for optimal gene expression in a given organism based on codon optimization. Codon usage tables are readily available, for example, at the “Codon Usage Database” available at www.kazusa.orjp/codon/ and these tables can be adapted in a number of ways. See Nakamura, Y., et al. “Codon usage tabulated from the international DNA sequence databases: status for the year 2000” Nucl. Acids Res. 28:292 (2000). Computer algorithms for codon optimizing a particular sequence for expression in a particular host cell are also available, such as Gene Forge (Aptagen; Jacobus, PA), are also available. In some embodiments, one or more codons (e.g., 1, 2, 3, 4, 5, 10, 15, 20, 25, 50, or more, or all codons) in a sequence encoding a polypeptide relevant to and/or capable of producing a volatile compound corresponds to the most frequently used codon for a particular amino acid. As to codon usage, a codon usage table can be referenced to determine bias and codon optimization of polynucleotides. Such tables for all species and tissues in GenBank and RefSeq can be found, for example, at the HIVE lab https://hive.biochemistry.gwu.edu. See also, e.g., Athey J., et al. A new and updated resource for codon usage tables. BMC Bionformatics, 2017; 18(1):391; Alexaki, A., et. al., C. Codon and Codon-Pair Usage Tables (CoCoPUTs): facilitating genetic variation analyses and recombinant gene design. Journal of Molecular Biology. 2019; and Kames, J., et al. TissueCoCoPUTs: novel human tissue-specific codon and codon-pair usage tables based on differential tissue gene expression. Journal of Molecular Biology. 2019; in press. Other resources for codon usage tables that can be appropriate for use with the present disclosure are available from GenScript at https://www.genscript.com/tools/codon-frequency-table, and include bacteria such as E. coli.

[0163] As to codon usage in bacteria, reference is made to the Microbial genome database available from NCBI at https://www.ncbi.nlm.nih.gov/genome/microbes/, the codon usage tables as previously discussed, and e.g., Ermolaeva., Curr. Issues Mol. Biol. (2001) 3(4): 91-97. As to codon usage in yeast, reference is made to the online Yeast Genome database available at http://www.yeastgenome.org/community/codon_usage.shtml, or Codon selection in yeast, Bennetzen and Hall, J Biol Chem. 1982 Mar. 25; 257(6):3026-31. As to codon usage in plants including algae, reference is made to Codon usage in higher plants, green algae, and cyanobacteria, Campbell and Gown, Plant Physiol. 1990 January; 92(1): 1-11; as well as Codon usage in plant genes, Murray et al, Nucleic Acids Res. 1989 Jan. 25; 17(2):477-98; or Selection on the codon bias of chloroplast and cyanelle genes in different plant and algal lineages, Morton B R, J Mol Evol. 1998 April; 46(4):449-59.

[0164] In some embodiments, the polynucleotide(s) is/are codon optimized for expression in a prokaryote. In some embodiments, the polynucleotide(s) is/are codon optimized for expression in a bacterium. In some embodiments, the polynucleotide(s) is/are codon optimized for expression in bacteria of the genus Escherichia, Pseudomonas, Brevundimonas, Xanthomonas, Deinococcus, or Pedobacter. In some embodiments, the polynucleotide(s) is/are codon optimized for expression in E. coli.

[0165] In some embodiments, the BSTM1 polynucleotide, PCHBA polynucleotide, or ATF polynucleotide (ATF 1 or ATF2 polynucleotide) and/or other component of the expression vector can be codon optimized for expression in a specific bacterium strain or species. In some embodiments, the polynucleotide and/or expression BSTM1 polynucleotide, PCHBA polynucleotide, or ATF polynucleotide (ATF 1 or ATF2 polynucleotide) and/or other component of the expression vector can be codon optimized for expression in E. coli or a species of the genus Escherichia, Brevundimonas, Pseudomonas, Xanthomonas sp., Deinococcus sp., or Pedobacter sp.

### Vectors

[0166] Also described herein are vectors that can contain a polynucleotide described elsewhere herein, including but not limited to a PCHBA gene, (e.g., ATF1 and/or ATF2), a BAT2 gene, aTHI3 gene, and/or a BSMT1 gene. The vectors can be useful for producing the engineered bacteria described elsewhere herein. Other uses for the vectors and vector systems described herein are also within the scope of this disclosure. In some embodiments, the vector is an expression vector. In some embodiments, the vector is a plasmid. In some embodiments, the vector is a bacterial plasmid, derived from a bacterial plasmid, or contain one or more components from a bacterial plasmid. In some embodiments the vector does not contain an antibiotic resistance gene.

[0167] Described in certain aspects is an expression vector capable of expressing a BSTM1 polypeptide, a PCHB polypeptide, a PCHA polypeptide, an ATF1 polypeptide, an ATF2 polypeptide, BAT2 polypeptide, a THI3 polypeptide or any combination thereof, the expression vector containing:
[0168] a. a BSTM1 polynucleotide having a sequence that is about 90-100 percent identical to any one of SEQ ID NO: 2, 8, 11, or 13;
[0169] b. a PCHBA polynucleotide having a sequence that is about 90-100 percent identical to SEQ ID NO: 1 or 10;
[0170] c. an ATF polynucleotide having a sequence that is about 90-100 percent identical to SEQ ID NO: 49 or 51;
[0171] d. a BAT2 polynucleotide having a sequence that is about 90-100 percent identical to SEQ ID NO: 53;
[0172] e. a THI3 polynucleotide having a sequence that is about 90-100 percent identical to SEQ ID NO: 55;
[0173] f. or any combination thereof.

[0174] In certain example embodiments, (a), (b), (c), (d), (e), or (f) of the expression vector is/are operatively coupled one or more regulatory elements.

[0175] In certain example embodiments, the expression vector contains a sequence that is 90-100 percent identical to SEQ ID NO: 13.

[0176] In some embodiments, the vector is capable of autonomous self-replication in a host cell into which it is introduced. In some embodiments, the vector is not capable of self-replication in a host cell into which it is introduced.

[0177] Vectors include, but are not limited to, nucleic acid molecules that are single-stranded, double-stranded, or partially double-stranded; nucleic acid molecules that comprise one or more free ends, no free ends (e.g., circular); nucleic acid molecules that contain DNA, RNA, or both; and other varieties of polynucleotides known in the art.

[0178] In some embodiments, the vector facilitates integration, such as stable integration, of one or more of its polynucleotides into a host's genome. Such polynucleotides are replicated along with the host's cell genome. In some embodiment, the vector is configured for transient expression of one or more polynucleotides contained therein.

[0179] In some embodiments, the vector is capable of directing the expression of one or more polynucleotides to which they are operatively linked. Such vectors are also known as the term of art “expression vectors”. Expression vectors can be composed of a nucleic acid (e.g., a polynucleotide) of the invention in a form suitable for expression of the nucleic acid in a host cell, which means that the expression vectors include one or more regulatory elements, which can be selected on the basis of the host cells to be used for expression, that is operatively-linked to the nucleic acid sequence to be expressed. Within an expression vector, “operably linked” and “operatively-linked” are used interchangeably herein and further defined elsewhere herein.

[0180] In the context of a vector, the term “operably linked” is intended to mean that the nucleotide sequence of interest is linked to the regulatory element(s) in a manner that allows for expression of the nucleotide sequence (e.g., in an in vitro transcription/translation system or in a host cell when the vector is introduced into the host cell).

[0181] In some embodiments the vector can be a bicistronic vector. In some embodiments, the bicistronic vector contains and/or is capable of expressing one or more of the polynucleotides described herein, including, but not limited to, a PCHBA gene, (e.g., ATF1 and/or ATF2), a BAT2 gene, aTHI3 gene, and/or a BSMT1 gene.

[0182] The vectors can be viral-based or non-viral based.

[0183] In some embodiments, the vector is a bacterial expression vector. Bacterial expression vectors are generally known in the art. Any suitable bacterial expression vector or component thereof can be used in the context of the present disclosure, Exemplary, non-limiting bacterial expression vectors are the pGEM series of vectors (available from Promega), pGEX series of vectors, the pET series of vectors (see e.g., Bolivar, F., et al. (1977). Gene 2, 95-113. doi: 10.1016/0378-1119(77) 90000-2, Novagen), the pUC series of vectors (see e.g., Minton, N. P. (1984). Gene 31, 269-273. doi: 10.1016/0378-1119(84)90220-8) (e.g., pUC18, pUC19, etc., the pQE series of vectors (available from Qiagen), the Gateway Cloning series of vectors, a dual plasmid expression vector system (e.g., the pACYC series of vectors, the pBAD series of vectors, see e.g., Chang, A. C., and Cohen, S. N. (1978). J. Bacteriol. 134, 1141-1156 and Guzman et al. (1995). J. Bacteriol. 177, 4121-4130), a triple plasmid expression vector system (e.g., the pSC101 plasmid or variant thereof, see e.g., Nordstrom, K. (2006). Plasmid 55, 1-26.doi: 10.1016/j.plasmid.2005.07.002), the pBR series of vectors (e.g., pBR322, pBR322, pBR327, etc.), the pME series of vectors (see e.g., pME6010), the pBBR series of vectors (e.g., pBBR1, see also e.g., Ouahrani-Bettache et al. BioTechniques 26:620-622 (April 1999).

[0184] In some embodiments, the vector can be a yeast expression vector or can contain an element or construct thereof. Examples of yeast expression vectors include, but are not limited to, pYepSec1 (Baldari, et al., 1987. EMBO J. 6: 229-234), pMFa (Kuijan and Herskowitz, 1982. Cell 30: 933-943), pJRY88 (Schultz et al., 1987. Gene 54: 113-123), pYES2 (Invitrogen Corporation, San Diego, Calif), and picZ (InVitrogen Corp, San Diego, Calif), and those set forth in Yeast Protocols, 2nd edition, Xiao, W., ed. (Humana Press, New York, 2007) and Buckholz, R. G. and Gleeson, M. A. (1991) Biotechnology (NY) 9(11): 1067-72. Yeast vectors can contain, without limitation, a centromeric (CEN) sequence, an autonomous replication sequence (ARS), a promoter, such as an RNA Polymerase III promoter, operably linked to a sequence or gene of interest, a terminator such as an RNA polymerase III terminator, an origin of replication, and a marker gene (e.g., auxotrophic, antibiotic, or other selectable markers). Examples of yeast expression vectors include plasmids, yeast artificial chromosomes, 2p, plasmids, yeast integrative plasmids, yeast replicative plasmids, shuttle vectors, and episomal plasmids. In some embodiments, the yeast expression vector is capable of expression of one or more polynucleotides in a bacterium.

[0185] In some embodiments, the vector is a baculovirus vector or expression vector can contain an element or construct thereof. Baculovirus expression vectors are generally known in the art and include, without limitation, the pAc series (Smith, et al., 1983. Mol. Cell. Biol. 3: 2156-2165) and the pVL series (Lucklow and Summers, 1989. Virology 170: 31-39). In some embodiments, the baculovirus expression vector is capable of expression of one or more polynucleotides in a bacterium.

[0186] In some embodiments, the vector is a mammalian expression vector or can contain an element or construct thereof. Mammalian expression vectors are generally known in the art Examples of mammalian expression vectors include, but are not limited to, a pSV vector, a pCMV vector, pCDM8 (Seed, 1987. Nature 329: 840) and pMT2PC (Kaufman, et al., 1987. EMBO J. 6: 187-195). In some embodiments, the mammalian expression vector is capable of expression of one or more polynucleotides in a bacterium.

[0187] In some embodiments, the vector is a plant expression vector or can contain an element or construct thereof. Plant expression vectors are generally known in the art. In some embodiments, the plant expression vector is capable of expression of one or more polynucleotides in a bacterium.

[0188] In some embodiments, the BSTM1 polynucleotide, PCHBA polynucleotide, and/or ATF polynucleotide (ATF 1 or ATF2 polynucleotide) is included in a vector, such as a suitable expression vector or cloning vector. In some embodiments, the BSTM1 polynucleotide, PCHBA polynucleotide, or ATF polynucleotide (ATF 1 or ATF2 polynucleotide) is included in a plasmid or artificial chromosome.

[0189] In some embodiments the vector is a Gateway cloning vector (e.g., pDONR207). In some embodiments, the vector is a destination vector (e.g., MTN41 (for E. coli, plus a few other bacteria species) and pBAV226 (different origin of replication then MTN41), which both have antibiotic resistance markers). Other suitable vectors include, but are not limited to, plasmid derivatives of pBBR1 and pME6010 plasmids as well as a Tn7 transposon. In certain example embodiments, the expression vector capable of expressing a BSTM1 enzyme can have a polynucleotide having a sequence that is about 90-100% identical to SEQ ID NO: 13. It will be appreciated that the engineered bacteria can be engineered to contain expression vector capable of expressing a BSTM1 enzyme can have a polynucleotide having a sequence that is about 90-100% identical to SEQ ID NO: 13.

[0190] Any of the cDNA, DNA, or other polynucleotide sequences described herein can be incorporated into a suitable expression vector. The expression vector can contain one or more regulatory sequences, or one or more other sequences used to facilitate the expression of an odor polynucleotide previously described. The expression vector can contain one or more regulatory sequences and/or one or more other sequences used to facilitate the replication of the odor producing expression vector. The expression vector can be suitable for expressing a methyl transferase that is involved in the biosynthesis of methyl salicylate from salicylic acid and is encoded by a BSMT1 polynucleotide in a bacterial cell. The expression vector can be suitable for expressing express an alcohol acetyl transferase that can condense isoamyl alcohol and acetyl CoA into isoamyl acetate and is encoded by an ATF polynucleotide.

[0191] In some embodiments, the vector can be a fusion vector or fusion expression vector. In some embodiments, fusion vectors add a number of amino acids to a protein encoded therein, such as to the amino terminus, carboxy terminus, or both of a recombinant protein. Such fusion vectors can serve one or more purposes, such as: (i) to increase expression of recombinant protein; (ii) to increase the solubility of the recombinant protein; and (iii) to aid in the purification of the recombinant protein by acting as a ligand in affinity purification. In some embodiments, expression of polynucleotides (such as non-coding polynucleotides) and proteins in prokaryotes can be carried out in Escherichia coli with vectors containing constitutive or inducible promoters directing the expression of either fusion or non-fusion polynucleotides and/or proteins. In some embodiments, the fusion expression vector can include a proteolytic cleavage site, which can be introduced at the junction of the fusion vector backbone or other fusion moiety and the recombinant polynucleotide or protein to enable separation of the recombinant polynucleotide or protein from the fusion vector backbone or other fusion moiety subsequent to purification of the fusion polynucleotide or protein. Such enzymes, and their cognate recognition sequences, include Factor Xa, thrombin and enterokinase. Example fusion expression vectors include pGEX (Pharmacia Biotech Inc; Smith and Johnson, 1988. Gene 67: 31-40), pMAL (New England Biolabs, Beverly, Mass.) and pRIT5 (Pharmacia, Piscataway, N.J.) that fuse glutathione S-transferase (GST), maltose E binding protein, or protein A, respectively, to the target recombinant protein. Examples of suitable inducible non-fusion E. coli expression vectors include pTrc (Amrann et al., (1988) Gene 69:301-315) and pET 11d (Studier et al., GENE EXPRESSION TECHNOLOGY: METHODS IN ENZYMOLOGY 185, Academic Press, San Diego, Calif. (1990) 60-89).

[0192] Additional suitable cloning, expression and other vectors will be appreciated by those of ordinary skill in the art.

### Vector Features

[0193] The vector can contain one or more additional features, elements, and/or constructs in addition to the one or more polynucleotides that encode a gene relevant to producing a volatile compound in an engineered bacteria as is described elsewhere herein. The additional features that can confer one or more functionalities to the vector, the polynucleotide to be delivered, a virus particle produced there from, or polypeptide expressed thereof. Such features include, but are not limited to, promoters and/or regulatory elements, selectable markers, molecular identifiers (e.g., molecular barcodes), stabilizing elements, replicons, multiple cloning sites, and the like. It will be appreciated by those skilled in the art that the design of the expression vector and additional features included can depend on such factors as the choice of the host cell to be transformed, the level of expression desired, copy number desired, integration type (stable or transient), etc.

### Replicons

[0194] Replicons are elements that facilitate replication of genetic elements to which they are associated with as autonomous units. Replicons are generally known in the art and can contain one origin of replication together with its associated cis-acting control elements. Replicons control the copy number. See e.g., del Solar, G., and Espinosa, M. (2000). Plasmid copy number control: an ever-growing story. Mol. Microbiol. 37, 492-500. doi: 10.1046/j.1365-2958.2000.02005.x. In some embodiments, the replicon is a low (less than 20 copies per cell) or medium copy (20-100 copies per cell) number replicon. Without being bound by theory, can facilitate management of the metabolic stress producing an exogenous protein can put on the host cell. In some embodiments, the replicon is a high copy number replicon (more than 100 copies per cell). In some embodiments, the vector is a low copy number vector. In some embodiments, the vector is a medium copy number vector. In some embodiments, the vector is a high copy number vector.

[0195] In some embodiments, a replicon included in the vector facilitates production of less than 20 copies per cell. some embodiments, a replicon included in the vector facilitates production of 20 to 100 copies per cell. some embodiments, a replicon included in the vector facilitates production of more than 100 copies per cell. some embodiments, a replicon included in the vector facilitates production of about 500 to 700 copies per cell. In some embodiments, the replicon facilitates production of about 10 to 1,000, 10-20, 10-30, 10-40, 10-50, 10-75, 10-100, 10-200, 10-300, 10-400, 10-500, 500-100, 200-500, 300-500, 400-500, 500-600, 500-700, 500-800, or 500-900 copies of the vector or more per cell. In some embodiments the replicon In some embodiments, the replicon produces 10, to/or 11, 12, 13, 14, 15, 16, 17, 18, 19, 20, 21, 22, 23, 24, 25, 26, 27, 28, 29, 30, 31, 32, 33, 34, 35, 36, 37, 38, 39, 40, 41, 42, 43, 44, 45, 46, 47, 48, 49, 50, 51, 52, 53, 54, 55, 56, 57, 58, 59, 60, 61, 62, 63, 64, 65, 66, 67, 68, 69, 70, 71, 72, 73, 74, 75, 76, 77, 78, 79, 80, 81, 82, 83, 84, 85, 86, 87, 88, 89, 90, 91, 92, 93, 94, 95, 96, 97, 98, 99, 100, 101, 102, 103, 104, 105, 106, 107, 108, 109, 110, 111, 112, 113, 114, 115, 116, 117, 118, 119, 120, 121, 122, 123, 124, 125, 126, 127, 128, 129, 130, 131, 132, 133, 134, 135, 136, 137, 138, 139, 140, 141, 142, 143, 144, 145, 146, 147, 148, 149, 150, 151, 152, 153, 154, 155, 156, 157, 158, 159, 160, 161, 162, 163, 164, 165, 166, 167, 168, 169, 170, 171, 172, 173, 174, 175, 176, 177, 178, 179, 180, 181, 182, 183, 184, 185, 186, 187, 188, 189, 190, 191, 192, 193, 194, 195, 196, 197, 198, 199, 200, 201, 202, 203, 204, 205, 206, 207, 208, 209, 210, 211, 212, 213, 214, 215, 216, 217, 218, 219, 220, 221, 222, 223, 224, 225, 226, 227, 228, 229, 230, 231, 232, 233, 234, 235, 236, 237, 238, 239, 240, 241, 242, 243, 244, 245, 246, 247, 248, 249, 250, 251, 252, 253, 254, 255, 256, 257, 258, 259, 260, 261, 262, 263, 264, 265, 266, 267, 268, 269, 270, 271, 272, 273, 274, 275, 276, 277, 278, 279, 280, 281, 282, 283, 284, 285, 286, 287, 288, 289, 290, 291, 292, 293, 294, 295, 296, 297, 298, 299, 300, 301, 302, 303, 304, 305, 306, 307, 308, 309, 310, 311, 312, 313, 314, 315, 316, 317, 318, 319, 320, 321, 322, 323, 324, 325, 326, 327, 328, 329, 330, 331, 332, 333, 334, 335, 336, 337, 338, 339, 340, 341, 342, 343, 344, 345, 346, 347, 348, 349, 350, 351, 352, 353, 354, 355, 356, 357, 358, 359, 360, 361, 362, 363, 364, 365, 366, 367, 368, 369, 370, 371, 372, 373, 374, 375, 376, 377, 378, 379, 380, 381, 382, 383, 384, 385, 386, 387, 388, 389, 390, 391, 392, 393, 394, 395, 396, 397, 398, 399, 400, 401, 402, 403, 404, 405, 406, 407, 408, 409, 410, 411, 412, 413, 414, 415, 416, 417, 418, 419, 420, 421, 422, 423, 424, 425, 426, 427, 428, 429, 430, 431, 432, 433, 434, 435, 436, 437, 438, 439, 440, 441, 442, 443, 444, 445, 446, 447, 448, 449, 450, 451, 452, 453, 454, 455, 456, 457, 458, 459, 460, 461, 462, 463, 464, 465, 466, 467, 468, 469, 470, 471, 472, 473, 474, 475, 476, 477, 478, 479, 480, 481, 482, 483, 484, 485, 486, 487, 488, 489, 490, 491, 492, 493, 494, 495, 496, 497, 498, 499, 500, 501, 502, 503, 504, 505, 506, 507, 508, 509, 510, 511, 512, 513, 514, 515, 516, 517, 518, 519, 520, 521, 522, 523, 524, 525, 526, 527, 528, 529, 530, 531, 532, 533, 534, 535, 536, 537, 538, 539, 540, 541, 542, 543, 544, 545, 546, 547, 548, 549, 550, 551, 552, 553, 554, 555, 556, 557, 558, 559, 560, 561, 562, 563, 564, 565, 566, 567, 568, 569, 570, 571, 572, 573, 574, 575, 576, 577, 578, 579, 580, 581, 582, 583, 584, 585, 586, 587, 588, 589, 590, 591, 592, 593, 594, 595, 596, 597, 598, 599, 600, 601, 602, 603, 604, 605, 606, 607, 608, 609, 610, 611, 612, 613, 614, 615, 616, 617, 618, 619, 620, 621, 622, 623, 624, 625, 626, 627, 628, 629, 630, 631, 632, 633, 634, 635, 636, 637, 638, 639, 640, 641, 642, 643, 644, 645, 646, 647, 648, 649, 650, 651, 652, 653, 654, 655, 656, 657, 658, 659, 660, 661, 662, 663, 664, 665, 666, 667, 668, 669, 670, 671, 672, 673, 674, 675, 676, 677, 678, 679, 680, 681, 682, 683, 684, 685, 686, 687, 688, 689, 690, 691, 692, 693, 694, 695, 696, 697, 698, 699, 700, 701, 702, 703, 704, 705, 706, 707, 708, 709, 710, 711, 712, 713, 714, 715, 716, 717, 718, 719, 720, 721, 722, 723, 724, 725, 726, 727, 728, 729, 730, 731, 732, 733, 734, 735, 736, 737, 738, 739, 740, 741, 742, 743, 744, 745, 746, 747, 748, 749, 750, 751, 752, 753, 754, 755, 756, 757, 758, 759, 760, 761, 762, 763, 764, 765, 766, 767, 768, 769, 770, 771, 772, 773, 774, 775, 776, 777, 778, 779, 780, 781, 782, 783, 784, 785, 786, 787, 788, 789, 790, 791, 792, 793, 794, 795, 796, 797, 798, 799, 800, 801, 802, 803, 804, 805, 806, 807, 808, 809, 810, 811, 812, 813, 814, 815, 816, 817, 818, 819, 820, 821, 822, 823, 824, 825, 826, 827, 828, 829, 830, 831, 832, 833, 834, 835, 836, 837, 838, 839, 840, 841, 842, 843, 844, 845, 846, 847, 848, 849, 850, 851, 852, 853, 854, 855, 856, 857, 858, 859, 860, 861, 862, 863, 864, 865, 866, 867, 868, 869, 870, 871, 872, 873, 874, 875, 876, 877, 878, 879, 880, 881, 882, 883, 884, 885, 886, 887, 888, 889, 890, 891, 892, 893, 894, 895, 896, 897, 898, 899, 900, 901, 902, 903, 904, 905, 906, 907, 908, 909, 910, 911, 912, 913, 914, 915, 916, 917, 918, 919, 920, 921, 922, 923, 924, 925, 926, 927, 928, 929, 930, 931, 932, 933, 934, 935, 936, 937, 938, 939, 940, 941, 942, 943, 944, 945, 946, 947, 948, 949, 950, 951, 952, 953, 954, 955, 956, 957, 958, 959, 960, 961, 962, 963, 964, 965, 966, 967, 968, 969, 970, 971, 972, 973, 974, 975, 976, 977, 978, 979, 980, 981, 982, 983, 984, 985, 986, 987, 988, 989, 990, 991, 992, 993, 994, 995, 996, 997, 998, 999, or 1000 or more or any range of values therein.

### Regulatory Elements

[0196] The vector can include one or more regulatory elements, which can optionally be coupled to a polynucleotide that encode a gene relevant to producing a volatile compound in an engineered bacteria as is described elsewhere herein.

[0197] Regulatory elements include those that direct constitutive expression of a nucleotide sequence in many types of host cell and those that direct expression of the nucleotide sequence only in certain host cells (e.g., species specific, tissue-specific regulatory sequences). A tissue-specific promoter can direct expression primarily in a desired tissue of interest, such as muscle, neuron, bone, skin, blood, specific organs (e.g., liver, pancreas), or particular cell types (e.g., lymphocytes). Regulatory elements may also direct expression in a temporal-dependent manner, such as in a cell-cycle dependent or developmental stage-dependent manner, which may or may not also be tissue or cell-type or species specific.

[0198] To express a polynucleotide, the vector can include one or more transcriptional and/or translational initiation regulatory sequences, e.g., promoters, that direct the transcription of the gene and/or translation of the encoded protein in a cell. In some embodiments, the promoter is a constitutive promoter. Suitable constitutive promoters for mammalian cells are generally known in the art and include, but are not limited to SV40, CAG, CMV, EF-1α, β-actin, RSV, and PGK. Suitable constitutive promoters for bacterial cells, yeast cells, and fungal cells are generally known in the art, such as a T-7 promoter or lac operon for bacterial expression and an alcohol dehydrogenase promoter for expression in yeast.

[0199] In some embodiments, a vector includes one or more pol III promoter (e.g., 1, 2, 3, 4, 5, or more pol III promoters), one or more pol II promoters (e.g., 1, 2, 3, 4, 5, or more pol II promoters), one or more pol I promoters (e.g., 1, 2, 3, 4, 5, or more pol I promoters), or combinations thereof. Examples of pol III promoters include, but are not limited to, U6 and H1 promoters. Examples of pol II promoters include, but are not limited to, the retroviral Rous sarcoma virus (RSV) LTR promoter (optionally with the RSV enhancer), the cytomegalovirus (CMV) promoter (optionally with the CMV enhancer) (see, e.g., Boshart et al, Cell, 41:521-530 (1985)), the SV40 promoter, the dihydrofolate reductase promoter, the β-actin promoter, the phosphoglycerol kinase (PGK) promoter, and the EF1α promoter. In some embodiments, the vector includes one or more enhancer elements, such as WPRE; CMV enhancers; the R-U5′ segment in LTR of HTLV-I (Mol. Cell. Biol., Vol. 8(1), p. 466-472, 1988); SV40 enhancer; and the intron sequence between exons 2 and 3 of rabbit β-globin (Proc. Natl. Acad. Sci. USA., Vol. 78(3), p. 1527-31, 1981).

[0200] In some embodiments, the regulatory element can be a regulated promoter. “Regulated promoter” refers to promoters that direct gene expression not constitutively, but in a temporally- and/or spatially regulated manner, and includes tissue-specific, tissue-preferred and inducible promoters. Regulated promoters include conditional promoters and inducible promoters. In some embodiments, conditional promoters can be employed to direct expression of a polynucleotide in a specific cell type, under certain environmental conditions, and/or during a specific state of development.

[0201] In some embodiments, the regulated promoter is an inducible/conditional promoter. Inducible/conditional promoters can be positively inducible/conditional promoters (e.g. a promoter that activates transcription of the polynucleotide upon appropriate interaction with an activated activator, or an inducer (compound, environmental condition, or other stimulus) or a negative/conditional inducible promoter (e.g. a promoter that is repressed (e.g. bound by a repressor) until the repressor condition of the promotor is removed (e.g. inducer binds a repressor bound to the promoter stimulating release of the promoter by the repressor or removal of a chemical repressor from the promoter environment). The inducer can be a compound, environmental condition, or other stimulus. Thus, inducible/conditional promoters can be responsive to any suitable stimuli such as chemical, biological, or other molecular agents, temperature, light, and/or pH. Suitable inducible/conditional promoters include, but are not limited to, Tet-On, Tet-Off, Lac promoter, pBad, AlcA, LexA, Hsp70 promoter, Hsp90 promoter, pDawn, XVE/OlexA, GVG, and pOp/LhGR.

[0202] In some embodiments, transient or inducible expression can be achieved by including, for example, chemical-regulated promotors, i.e., whereby the application of an exogenous chemical induces gene expression. Modulation of gene expression can also be obtained by including a chemical-repressible promoter, where application of the chemical represses gene expression. Chemical-inducible promoters include, but are not limited to, the maize ln2-2 promoter, activated by benzene sulfonamide herbicide safeners (De Veylder et al., (1997) Plant Cell Physiol 38:568-77), the maize GST promoter (GST-11-27, WO93/01294), activated by hydrophobic electrophilic compounds used as pre-emergent herbicides, and the tobacco PR-1 a promoter (Ono et al., (2004) Biosci Biotechnol Biochem 68:803-7) activated by salicylic acid. Promoters which, are regulated by antibiotics, such as tetracycline-inducible and tetracycline-repressible promoters (Gatz et al., (1991) Mol Gen Genet 227:229-37; U.S. Pat. Nos. 5,814,618 and 5,789,156) can also be used herein.

[0203] In some embodiments, the vector can contain a minimal promoter.

[0204] In some exemplary embodiments, a BSTM1 polynucleotide, PCHBA polynucleotide, and/or ATF polynucleotide (ATF 1 or ATF2 polynucleotide) are each operatively coupled to a regulatory polynucleotide including, but not limited to, a promoter. In some embodiments, the promoter causes expression of a polynucleotide in a bacterial cell. In some embodiments, the promoter can be a MPT2 promoter.

### Translocation Elements

[0205] In some embodiments, the vector and/or polynucleotide includes one or more elements capable of translocating and/or expressing a polynucleotide to/in a specific cell component or organelle. Such organelles can include, but are not limited to, nucleus, ribosome, endoplasmic reticulum, Golgi apparatus, chloroplast, mitochondria, vacuole, lysosome, cytoskeleton, plasma membrane, cell wall, peroxisome, centrioles, etc.

### Selectable Markers and Tags

[0206] The vector can include one or more selectable markers or tags. In some embodiments, one or more of the polynucleotides relevant to producing a volatile compound is/are operably linked, fused to, or otherwise modified to include a polynucleotide that encodes or is a selectable marker or tag, which can be a polynucleotide or polypeptide. In some embodiments, the polypeptide encoding a polypeptide selectable marker or tag can be incorporated in a polynucleotide relevant to producing a volatile compound such that the selectable marker or tag polypeptide, when translated, is inserted between two amino acids between the N- and C-terminus of the polypeptide relevant to producing a volatile compound or at the N- and/or C-terminus of the polypeptide relevant to producing a volatile compound. In some embodiments, the selectable marker or tag is a polynucleotide barcode or unique molecular identifier (UMI).

[0207] It will be appreciated that the polynucleotide encoding such selectable markers or tags can be incorporated into a polynucleotide encoding a polypeptide relevant to production of a volatile compound described herein in an appropriate manner to allow expression of the selectable marker or tag. Such techniques and methods are described elsewhere herein and will be instantly appreciated by one of ordinary skill in the art in view of this disclosure. Many such selectable markers and tags are generally known in the art and are intended to be within the scope of this disclosure.

[0208] Suitable selectable markers and tags include, but are not limited to, affinity tags, such as chitin binding protein (CBP), maltose binding protein (MBP), glutathione-S-transferase (GST), poly(His) tag; solubilization tags such as thioredoxin (TRX) and poly(NANP), MBP, and GST; chromatography tags such as those consisting of polyanionic amino acids, such as FLAG-tag; epitope tags such as V5-tag, Myc-tag, HA-tag and NE-tag; protein tags that can allow specific enzymatic modification (such as biotinylation by biotin ligase) or chemical modification (such as reaction with FlAsH-EDT2 for fluorescence imaging), DNA and/or RNA segments that contain restriction enzyme or other enzyme cleavage sites; DNA segments that encode products that provide resistance against otherwise toxic compounds including antibiotics, such as, spectinomycin, ampicillin, kanamycin, tetracycline, Basta, neomycin phosphotransferase II (NEO), hygromycin phosphotransferase (HPT)) and the like; DNA and/or RNA segments that encode products that are otherwise lacking in the recipient cell (e.g., tRNA genes, auxotrophic markers); DNA and/or RNA segments that encode products which can be readily identified (e.g., phenotypic markers such as β-galactosidase, GUS; fluorescent proteins such as green fluorescent protein (GFP), cyan (CFP), yellow (YFP), red (RFP), luciferase, and cell surface proteins); polynucleotides that can generate one or more new primer sites for PCR (e.g., the juxtaposition of two DNA sequences not previously juxtaposed), DNA sequences not acted upon or acted upon by a restriction endonuclease or other DNA modifying enzyme, chemical, etc.; epitope tags (e.g. GFP, FLAG- and His-tags), and, DNA sequences that make a molecular barcode or unique molecular identifier (UMI), DNA sequences required for a specific modification (e.g., methylation) that allows its identification. Other suitable markers will be appreciated by those of skill in the art.

[0209] Selectable markers and tags can be operably linked to one or more polypeptides relevant to producing a volatile compound described herein via suitable linker. Suitable linkers are generally known in the art and include, but are not limited to, glycine or glycine serine linkers as short as GS or GG up to (GGGGG)3 (SEQ ID NO: 57) or (GGGGS)3(SEQ ID NO: 58). Such linkers can be encoded by the polynucleotides relevant to producing a volatile compound described herein.

### Codon Optimization of Vector Polynucleotides

[0210] As described elsewhere herein, the polynucleotide(s) relevant to producing a volatile compound in an engineered bacterium described herein can be codon optimized. In some embodiments, one or more polynucleotides contained in a vector (“vector polynucleotides”) described herein that are in addition to an optionally codon optimized polynucleotide encoding aspects of the relevant to producing a volatile compound in an engineered bacterium described herein can be codon optimized. The general principles of codon optimization are discussed elsewhere herein. In some embodiments, the vector polynucleotide is codon optimized for expression in a prokaryote. In some embodiments, the vector polynucleotide is codon optimized for expression in a bacteria or yeast. In some embodiments, the vector polynucleotide(s) is/are codon optimized for expression in bacteria of the genus Escherichia, Pseudomonas, Brevundimonas, Xanthomonas, Deinococcus, or Pedobacter. In some embodiments, the vector polynucleotide(s) is/are codon optimized for expression in E. coli.

### Engineered Bacteria Species

[0211] The engineered bacteria containing and/or expressing a polynucleotide and/or polypeptide relevant to producing a volatile compound described herein can be any suitable species, strain, or variant. In other words, a host bacterium that is engineered with one or more genes such that they produce a volatile compound as described herein can be any suitable species, strain, or variant. In some embodiments, the engineered bacteria species is an isolate strain described elsewhere herein. In some embodiments, the engineered bacteria species is a canine or feline commensal bacteria. In some embodiments, the engineered bacteria species is native to a feline or canine oral commensal microflora. In some embodiments, the engineered bacteria species is non-pathogenic. In some embodiments, the engineered bacteria species is not resistant to antibiotics.

[0212] In some embodiments, the engineered bacteria are of the genus Escherichia. In some embodiments, the engineered bacteria are E. coli. In some embodiments, the engineered bacteria are of the genus Pseudomonas. In embodiments, the engineered bacteria are non-pathogenic. In some embodiments, the engineered bacteria are of the genus Brevundimonas. In some embodiments, the engineered bacteria are of the genus Xanthomonas. In some embodiments, the engineered bacteria are of the genus Deinococcus. In some embodiments, the engineered bacteria are of the genus Pedobacter.

[0213] In some embodiments, the engineered bacteria are part of the canine oral microbiome. In some embodiments, the engineered bacteria are any one as set forth in Dewhirst et al. PloS One. 2012. 7(4): e36067, particularly at FIGS. 1-4 and Tables S1, S2, S3 and S4, such as one having any one of Genbank Accession number JN713151-JN713566. In some embodiments, the engineered bacteria are any one as set forth in Bell et al., 2020. Front. Vet Sci. https://doi.org/10.3389/fvets0.2020.00616, particularly at Table 3 and Supplementary Table 1. In some embodiments, the engineered bacteria are any one as set forth in Ruparell et al., 2020. BMC Microbiology. 20:42, particularly at FIG. 2, FIG. 3, and Table 1. In some embodiments, the engineered bacteria are any one as set forth in Sturgeon et al., 2013. 162:891-898. In some embodiments, the engineered bacteria are any one as set forth in Oh et al. 2015. PloS One. 10(7):e0131468, particularly at FIG. 2, FIG. 3, Table 3, and Table 4.

[0214] In some embodiments, the engineered bacteria are part of the feline oral microbiome. In some embodiments, the engineered bacteria are any one as set forth in Krumbeck et al., 2021. Pathogens. 10(904): https://doi.org/10.3390/pathogens10070904, particularly at FIG. 3, FIG. 4, FIG. 5, FIG. 6, FIG. S1, Table S1. In some embodiments, the engineered bacteria are any one as set forth in Older et al. 2019, particularly at FIG. 1, FIG. 3, FIG. 4, FIG. 5, FIG. S1, FIG. S2, FIG. S3, FIG. S4, FIG. S5, Table 2, Table S3, and Table S5.

### Isolated Strains

[0215] Also described in certain example embodiments herein are isolated strains of commensal oral bacteria. In some embodiments, the isolated strain of commensal oral bacteria are suitable for engineering to produce one or more volatile compounds as described elsewhere herein. In some embodiments, the isolate strain of commensal canine oral bacterium can be of the “Dog 53”, “Dog 91” or “Dog95” isolate or a variant thereof as demonstrated at least in the Working Examples herein.

[0216] In certain example embodiments, an isolated strain of commensal canine oral bacterium or population thereof suitable for engineering as described elsewhere herein can have a genome containing a sequence as in any one or more of SEQ ID NOs: 12 or 14-48. In certain example embodiments, the isolated commensal canine oral bacterium or population thereof is of the genus Pseudomonas. Further details of such strains are in the Working Examples below.

[0217] In some embodiments, the bacteria to be engineered to express a polynucleotide and/or polypeptide relevant to producing a volatile compound can be identified by the following procedure and selection criteria. Commensal oral bacteria of dogs or cats that are suitable for expression of an exogenous gene as described herein can be isolated and typed to determine strains isolated. Strains that meet the following selection criteria can be engineered to transiently or stably express an odor producing gene as described above. Isolated strains can be, for example, streaked on agar plates and grown in a suitable media (e.g., R2A) media. Suitable bacteria can be fast growing when grown on standard medium plates. As used in this context “fast growing” refers to colonies that appear within 2-7 days on an R2A agar plate Fer streaking on the R2A (or other standard media) plate. Fast growing and non-pathogenic strains can be characterized and identified using rRNA genotyping. Strains with natural antibiotic resistance can be differentiated from strains that do not have a natural antibiotic resistance. In some embodiments, strains suitable for engineering as described herein will not have a natural antibiotic resistance as identification of the engineered strains can be identified by testing for an antibiotic resistance selectable marker via exposing the engineered cells to an antibiotic. If the bacteria are naturally antibiotic resistant, the antibiotic resistance selectable marker will not be able to function as intended. In some of these embodiments, the antibiotic marker can be tailored so as to be different than the natural resistance. Further, it is desirable for the bacteria strain to have a codon bias (genomic/coding GC content) that is similar to E. coli. This can be used to objectively identify target commensal oral bacterial strains that will be amenable to expressing the odor producing constructs that are validated in E. coli.

### Methods of Engineering Bacteria

[0218] Methods of transforming or transducing, both stably and transiently, bacterial cells are generally known in the art. Methods of cloning bacterial cells are generally known in the art. Methods of screening for transformed/transduced bacterial cells are dependent on the selectable marker used and will be appreciated by one of ordinary skill in the art.

### Engineered Volatile-Producing Bacteria Formulations

[0219] Also described herein are formulations that can contain an amount, effective amount, and/or least effective amount, and/or therapeutically effective amount of one or more compounds, molecules, compositions, vectors, vector systems, cells (e.g., engineered bacterial cells described herein), or a combination thereof (which are also referred to as the primary active agent or ingredient elsewhere herein) described in greater detail elsewhere herein a pharmaceutically acceptable carrier. In some embodiments, the formulation can be a liquid adapted for oral administration. In some embodiments, the formulation can be a solid, semi-solid, paste, gel, and the like that can be filled into a void on an object (described elsewhere herein). In some embodiments, the formulation can be suitable as a coating that can be applied to an object for delivery of the engineered bacterial cells. The engineered bacterial cells can be incorporated into a food item or treat that can be masticated and ingested. Generally, the formulation can be administered orally to the animal. The engineered bacterial cells can be incorporated into a solution, semi-solid, or other solid that can be otherwise administered to the oral cavity of a subject. In some embodiments, the solution, semi-solid, or other solid can be biodegradable. In some embodiments, the subject is a mammal. In some embodiments, the subject is a dog. In some embodiments, the dog is a cat.

[0220] Described in certain aspects is a formulation having an engineered bacterium as described herein, an expression vector of as described herein, or both, optionally wherein the engineered bacterium includes the expression vector and a liquid, semi-solid, or solid carrier.

[0221] In certain example embodiments, the formulation is a foodstuff suitable for a mammal. In certain example embodiments, the mammal is a non-human animal. In certain example embodiments, the mammal is a canine or a feline.

[0222] In certain example embodiments, the formulation is a liquid solution or semi-solid suitable for administration to the oral cavity of a mammal. In certain example embodiments, the mammal is a non-human animal. In certain example embodiments, the mammal is a canine or a feline.

[0223] In certain example embodiments, the formulation is a formed object that is configured to be chewed on by a mammal. In certain example embodiments, the mammal is a non-human animal. In certain example embodiments, the mammal is a canine or a feline.

### Pharmaceutically Acceptable Carriers and Auxiliary Ingredients and Agents

[0224] The formulation can include a pharmaceutically acceptable carrier. Suitable pharmaceutically acceptable carriers include, but are not limited to water, salt solutions, alcohols, gum arabic, vegetable oils, benzyl alcohols, polyethylene glycols, gelatin, carbohydrates such as lactose, amylose or starch, magnesium stearate, talc, silicic acid, viscous paraffin, perfume oil, fatty acid esters, hydroxy methylcellulose, and polyvinyl pyrrolidone, which do not deleteriously react with the active composition.

[0225] The pharmaceutical formulations can be sterilized, and if desired, mixed with auxiliary agents, such as lubricants, preservatives, stabilizers, wetting agents, emulsifiers, salts for influencing osmotic pressure, buffers, coloring, flavoring and/or aromatic substances, and the like which do not deleteriously react with the active compound.

[0226] In some embodiments, the pharmaceutical formulation can also include an effective amount of auxiliary active agents, including anti-infectives, such as antimicrobials. In some embodiments, the anti-infective is an anti-infective compound in which the engineered bacteria is resistant to such that the inclusion of the anti-infective compound does not affect the engineered bacteria's ability to produce volatile compounds.

[0227] As used herein, “anti-infective” refers to compounds or molecules that can either kill an infectious agent and/or modulate or inhibit its activity, infectivity, replication, and/or spreading such that its infectivity is reduced or eliminated and/or the disease or symptom thereof that it is associated is less severe or eliminated. Anti-infectives include, but are not limited to, antibiotics, antibacterials, antifungals, antivirals, and antiprotozoals.

[0228] Suitable anti-infectives include, but are not limited to, amebicides (e.g. nitazoxanide, paromomycin, metronidazole, tinidazole, chloroquine, miltefosine, amphotericin b, and iodoquinol), aminoglycosides (e.g. paromomycin, tobramycin, gentamicin, amikacin, kanamycin, and neomycin), anthelmintics (e.g. pyrantel, mebendazole, ivermectin, praziquantel, abendazole, thiabendazole, oxamniquine), antifungals (e.g. azole antifungals (e.g. itraconazole, fluconazole, posaconazole, ketoconazole, clotrimazole, miconazole, and voriconazole), echinocandins (e.g. caspofungin, anidulafungin, and micafungin), griseofulvin, terbinafine, flucytosine, and polyenes (e.g. nystatin, and amphotericin b), antimalarial agents (e.g. pyrimethamine/sulfadoxine, artemether/lumefantrine, atovaquone/proquanil, quinine, hydroxychloroquine, mefloquine, chloroquine, doxycycline, pyrimethamine, and halofantrine), antituberculosis agents (e.g. aminosalicylates (e.g. aminosalicylic acid), isoniazid/rifampin, isoniazid/pyrazinamide/rifampin, bedaquiline, isoniazid, ethambutol, rifampin, rifabutin, rifapentine, capreomycin, and cycloserine), antivirals (e.g. amantadine, rimantadine, abacavir/lamivudine, emtricitabine/tenofovir, cobicistat/elvitegravir/emtricitabine/tenofovir, efavirenz/emtricitabine/tenofovir, avacavir/lamivudine/zidovudine, lamivudine/zidovudine, emtricitabine/tenofovir, emtricitabine/opinavir/ritonavir/tenofovir, interferon alfa-2v/ribavirin, peginterferon alfa-2b, maraviroc, raltegravir, dolutegravir, enfuvirtide, foscarnet, fomivirsen, oseltamivir, zanamivir, nevirapine, efavirenz, etravirine, rilpivirine, delaviridine, nevirapine, entecavir, lamivudine, adefovir, sofosbuvir, didanosine, tenofovir, avacivr, zidovudine, stavudine, emtricitabine, xalcitabine, telbivudine, simeprevir, boceprevir, telaprevir, lopinavir/ritonavir, fosamprenvir, dranuavir, ritonavir, tipranavir, atazanavir, nelfinavir, amprenavir, indinavir, sawuinavir, ribavirin, valcyclovir, acyclovir, famciclovir, ganciclovir, and valganciclovir), carbapenems (e.g. doripenem, meropenem, ertapenem, and cilastatin/imipenem), cephalosporins (e.g. cefadroxil, cephradine, cefazolin, cephalexin, cefepime, ceflaroline, loracarbef, cefotetan, cefuroxime, cefprozil, loracarbef, cefoxitin, cefaclor, ceftibuten, ceftriaxone, cefotaxime, cefpodoxime, cefdinir, cefixime, cefditoren, cefizoxime, and ceftazidime), glycopeptide antibiotics (e.g. vancomycin, dalbavancin, oritavancin, and telvancin), glycylcyclines (e.g. tigecycline), leprostatics (e.g. clofazimine and thalidomide), lincomycin and derivatives thereof (e.g. clindamycin and lincomycin), macrolides and derivatives thereof (e.g. telithromycin, fidaxomicin, erythromycin, azithromycin, clarithromycin, dirithromycin, and troleandomycin), linezolid, sulfamethoxazole/trimethoprim, rifaximin, chloramphenicol, fosfomycin, metronidazole, aztreonam, bacitracin, penicillins (amoxicillin, ampicillin, bacampicillin, carbenicillin, piperacillin, ticarcillin, amoxicillin/clavulanate, ampicillin/sulbactam, piperacillin/tazobactam, clavulanate/ticarcillin, penicillin, procaine penicillin, oxaxillin, dicloxacillin, and nafcillin), quinolones (e.g. lomefloxacin, norfloxacin, ofloxacin, qatifloxacin, moxifloxacin, ciprofloxacin, levofloxacin, gemifloxacin, moxifloxacin, cinoxacin, nalidixic acid, enoxacin, grepafloxacin, gatifloxacin, trovafloxacin, and sparfloxacin), sulfonamides (e.g. sulfamethoxazole/trimethoprim, sulfasalazine, and sulfasoxazole), tetracyclines (e.g. doxycycline, demeclocycline, minocycline, doxycycline/salicyclic acid, doxycycline/omega-3 polyunsaturated fatty acids, and tetracycline), and urinary anti-infectives (e.g. nitrofurantoin, methenamine, fosfomycin, cinoxacin, nalidixic acid, trimethoprim, and methylene blue).

### Effective Amounts

[0229] In some embodiments, the amount of the primary active agent (e.g., engineered bacteria) and/or optional auxiliary active agent can be an effective amount, least effective amount, and/or therapeutically effective amount. The effective amount, least effective amount, and/or therapeutically effective amount of the primary and/or optional auxiliary active agent described elsewhere herein when present in the formulation can range from any non-zero amount about 0 to 1, 10, 20, 30, 40, 50, 60, 70, 80, 90, 100, 110, 120, 130, 140, 150, 160, 170, 180, 190, 200, 210, 220, 230, 240, 250, 260, 270, 280, 290, 300, 310, 320, 330, 340, 350, 360, 370, 380, 390, 400, 410, 420, 430, 440, 450, 460, 470, 480, 490, 500, 510, 520, 530, 540, 550, 560, 570, 580, 590, 600, 610, 620, 630, 640, 650, 660, 670, 680, 690, 700, 710, 720, 730, 740, 750, 760, 770, 780, 790, 800, 810, 820, 830, 840, 850, 860, 870, 880, 890, 900, 910, 920, 930, 940, 950, 960, 970, 980, 990, 1000 pg, ng, μg, mg, or g or be any numerical value with any of these ranges. In some embodiments, the effective amount, least effective amount, and/or therapeutically effective amount of the primary and/or optional auxiliary active agent described elsewhere herein can be an effective concentration, least effective concentration, and/or therapeutically effective concentration, which each can be, when present in the formulation, any non-zero value ranging from about 0 to 1, 10, 20, 30, 40, 50, 60, 70, 80, 90, 100, 110, 120, 130, 140, 150, 160, 170, 180, 190, 200, 210, 220, 230, 240, 250, 260, 270, 280, 290, 300, 310, 320, 330, 340, 350, 360, 370, 380, 390, 400, 410, 420, 430, 440, 450, 460, 470, 480, 490, 500, 510, 520, 530, 540, 550, 560, 570, 580, 590, 600, 610, 620, 630, 640, 650, 660, 670, 680, 690, 700, 710, 720, 730, 740, 750, 760, 770, 780, 790, 800, 810, 820, 830, 840, 850, 860, 870, 880, 890, 900, 910, 920, 930, 940, 950, 960, 970, 980, 990, 1000 pM, nM, mM, or M or be any numerical value with any of these ranges.

[0230] In other embodiments, the effective amount, least effective amount, and/or therapeutically effective amount of the auxiliary active agent, when present in the formulation, can be any non-zero value ranging from about 0.001, to 1, 10, 20, 30, 40, 50, 60, 70, 80, 90, 100, 110, 120, 130, 140, 150, 160, 170, 180, 190, 200, 210, 220, 230, 240, 250, 260, 270, 280, 290, 300, 310, 320, 330, 340, 350, 360, 370, 380, 390, 400, 410, 420, 430, 440, 450, 460, 470, 480, 490, 500, 510, 520, 530, 540, 550, 560, 570, 580, 590, 600, 610, 620, 630, 640, 650, 660, 670, 680, 690, 700, 710, 720, 730, 740, 750, 760, 770, 780, 790, 800, 810, 820, 830, 840, 850, 860, 870, 880, 890, 900, 910, 920, 930, 940, 950, 960, 970, 980, 990, 1000 IU or be any numerical value with any of these ranges.

[0231] In some embodiments, a primary active agent can be present in the pharmaceutical formulation at any non-zero value ranging from about 0 to 0.001, 0.002, 0.003, 0.004, 0.005, 0.006, 0.007, 0.008, 0.009, 0.01, 0.02, 0.03, 0.04, 0.05, 0.06, 0.07, 0.08, 0.09, 0.1, 0.11, 0.12, 0.13, 0.14, 0.15, 0.16, 0.17, 0.18, 0.19, 0.2, 0.21, 0.22, 0.23, 0.24, 0.25, 0.26, 0.27, 0.28, 0.29, 0.3, 0.31, 0.32, 0.33, 0.34, 0.35, 0.36, 0.37, 0.38, 0.39, 0.4, 0.41, 0.42, 0.43, 0.44, 0.45, 0.46, 0.47, 0.48, 0.49, 0.5, 0.51, 0.52, 0.53, 0.54, 0.55, 0.56, 0.57, 0.58, 0.59, 0.6, 0.61, 0.62, 0.63, 0.64, 0.65, 0.66, 0.67, 0.68, 0.69, 0.7, 0.71, 0.72, 0.73, 0.74, 0.75, 0.76, 0.77, 0.78, 0.79, 0.8, 0.81, 0.82, 0.83, 0.84, 0.85, 0.86, 0.87, 0.88, 0.89, 0.9, 0.91, 0.92, 0.93, 0.94, 0.95, 0.96, 0.97, 0.98, 0.9, to 1, 2, 3, 4, 5, 6, 7, 8, 9, 10, 11, 12, 13, 14, 15, 16, 17, 18, 19, 20, 21, 22, 23, 24, 25, 26, 27, 28, 29, 30, 31, 32, 33, 34, 35, 36, 37, 38, 39, 40, 41, 42, 43, 44, 45, 46, 47, 48, 49, 50, 51, 52, 53, 54, 55, 56, 57, 58, 59, 60, 61, 62, 63, 64, 65, 66, 67, 68, 69, 70, 71, 72, 73, 74, 75, 76, 77, 78, 79, 80, 81, 82, 83, 84, 85, 86, 87, 88, 89, 90, 91, 92, 93, 94, 95, 96, 97, 98, 99, 99.1, 99.2, 99.3, 99.4, 99.5, 99.6, 99.7, 99.8, 99.9% w/w, v/v, or w/v of the formulation.

[0232] In some embodiments, the auxiliary active agent, when optionally present, can be included at any non-zero value ranging from about 0 to 0.001, 0.002, 0.003, 0.004, 0.005, 0.006, 0.007, 0.008, 0.009, 0.01, 0.02, 0.03, 0.04, 0.05, 0.06, 0.07, 0.08, 0.09, 0.1, 0.11, 0.12, 0.13, 0.14, 0.15, 0.16, 0.17, 0.18, 0.19, 0.2, 0.21, 0.22, 0.23, 0.24, 0.25, 0.26, 0.27, 0.28, 0.29, 0.3, 0.31, 0.32, 0.33, 0.34, 0.35, 0.36, 0.37, 0.38, 0.39, 0.4, 0.41, 0.42, 0.43, 0.44, 0.45, 0.46, 0.47, 0.48, 0.49, 0.5, 0.51, 0.52, 0.53, 0.54, 0.55, 0.56, 0.57, 0.58, 0.59, 0.6, 0.61, 0.62, 0.63, 0.64, 0.65, 0.66, 0.67, 0.68, 0.69, 0.7, 0.71, 0.72, 0.73, 0.74, 0.75, 0.76, 0.77, 0.78, 0.79, 0.8, 0.81, 0.82, 0.83, 0.84, 0.85, 0.86, 0.87, 0.88, 0.89, 0.9, 0.91, 0.92, 0.93, 0.94, 0.95, 0.96, 0.97, 0.98, 0.9, to 1, 2, 3, 4, 5, 6, 7, 8, 9, 10, 11, 12, 13, 14, 15, 16, 17, 18, 19, 20, 21, 22, 23, 24, 25, 26, 27, 28, 29, 30, 31, 32, 33, 34, 35, 36, 37, 38, 39, 40, 41, 42, 43, 44, 45, 46, 47, 48, 49, 50, 51, 52, 53, 54, 55, 56, 57, 58, 59, 60, 61, 62, 63, 64, 65, 66, 67, 68, 69, 70, 71, 72, 73, 74, 75, 76, 77, 78, 79, 80, 81, 82, 83, 84, 85, 86, 87, 88, 89, 90, 91, 92, 93, 94, 95, 96, 97, 98, 99, 99.1, 99.2, 99.3, 99.4, 99.5, 99.6, 99.7, 99.8, 99.9% w/w, v/v, or w/v of the formulation.

[0233] In some embodiments, where a cell population is delivered, the effective amount of cells can range from about 1×101/mL or μL to 1×1020/mL or μL or more, such as about 1×101/mL or μL, 1×102/mL or μL, 1×103/mL or μL, 1×104/mL or μL, 1×105/mL or μL, 1×106/mL or μL, 1×107/mL or μL, 1×108/mL or μL, 1×109/mL or μL, 1×1010/mL or μL, 1×1011/mL or μL, 1×1012/mL or μL, 1×1013/mL or μL, 1×1014/mL or μL, 1×1015/mL or μL, 1×1016/mL or μL, 1×1017/mL or μL, 1×1018/mL or μL, 1×1019/mL or μL, to/or about 1×1020/mL or μL or more.

[0234] In some embodiments, the cell population included in the formulation contains about 1; 10; 100; 1000; 10,000; 100,000; 1-100 million, 0.5 billion, 1 billion, 2 billion, 3 billion, 4 billion, 5 billion, 6 billion, 7 billion, 8 billion, 9 billion, 10 billion, 11 billion, 12 billion, 13 billion, 14 billion, 15 billion, 16 billion, 17 billion, 18 billion, 19 billion, 20 billion, 25 billion, 30 billion, 35 billion, 40 billion, 45 billion, 50 billion, or more colony forming units (CFUs) per dose, per mL, per μL, per μg, per mg, or per gram.

[0235] In embodiments where an auxiliary active agent is present in the formulation, the effective amount of the auxiliary active agent will vary depending on the auxiliary active agent.

[0236] When optionally present in the formulation, the auxiliary active agent can be included in the formulation or can exist as a stand-alone compound or formulation that can be administered contemporaneously or sequentially with the compound, derivative thereof, or formulation thereof. In yet other embodiments, the effective amount of the auxiliary active agent, when present, can be any non-zero amount ranging from about 0 to 1, 2, 3, 4, 5, 6, 7, 8, 9, 10, 11, 12, 13, 14, 15, 16, 17, 18, 19, 20, 21, 22, 23, 24, 25, 26, 27, 28, 29, 30, 31, 32, 33, 34, 35, 36, 37, 38, 39, 40, 41, 42, 43, 44, 45, 46, 47, 48, 49, 50, 51, 52, 53, 54, 55, 56, 57, 58, 59, 60, 61, 62, 63, 64, 65, 66, 67, 68, 69, 70, 71, 72, 73, 74, 75, 76, 77, 78, 79, 80, 81, 82, 83, 84, 85, 86, 87, 88, 89, 90, 91, 92, 93, 94, 95, 96, 97, 98, 99, 99.1, 99.2, 99.3, 99.4, 99.5, 99.6, 99.7, 99.8, 99.9% w/w, v/v, or w/v of the total auxiliary active agent in the formulation. In additional embodiments, the effective amount of the auxiliary active agent, when present, can be any non-zero amount ranging from about 0 to 1, 2, 3, 4, 5, 6, 7, 8, 9, 10, 11, 12, 13, 14, 15, 16, 17, 18, 19, 20, 21, 22, 23, 24, 25, 26, 27, 28, 29, 30, 31, 32, 33, 34, 35, 36, 37, 38, 39, 40, 41, 42, 43, 44, 45, 46, 47, 48, 49, 50, 51, 52, 53, 54, 55, 56, 57, 58, 59, 60, 61, 62, 63, 64, 65, 66, 67, 68, 69, 70, 71, 72, 73, 74, 75, 76, 77, 78, 79, 80, 81, 82, 83, 84, 85, 86, 87, 88, 89, 90, 91, 92, 93, 94, 95, 96, 97, 98, 99, 99.1, 99.2, 99.3, 99.4, 99.5, 99.6, 99.7, 99.8, 99.9% w/w, v/v, or w/v of the total formulation.

### Dosage Forms

[0237] In some embodiments, the formulations described herein can be in a dosage form. The dosage form can be administered to a subject in need thereof. The dosage form can be effective generate specific concentration or amount, such as an effective concentration or amount, at a given site in the subject in need thereof. In some cases, the dosage form contains a greater amount of the active ingredient than the final intended amount needed to reach a specific region or location within the subject, such as the mouth.

[0238] The dosage forms can be adapted for oral administration. Dosage forms adapted for oral administration can discrete dosage units such as capsules, pellets or tablets, powders or granules, solutions, or suspensions in aqueous or non-aqueous liquids; edible foams or whips, gels, pastes, powders, or in oil-in-water liquid emulsions or water-in-oil liquid emulsions. In some embodiments, the pharmaceutical formulations adapted for oral administration also include one or more agents which flavor, preserve, color, or help disperse the pharmaceutical formulation. Dosage forms prepared for oral administration can also be in the form of a liquid solution that can be delivered as a foam, spray, or liquid solution. The oral dosage form can be administered to a subject in need thereof. Where appropriate, the dosage forms described herein can be encapsulated or microencapsulated. The ingredients, such as inactive ingredients and optional auxiliary active agents, when included, can be generally recognized as safe (GRAS) ingredients and auxiliary active agents.

[0239] In some embodiments, the formulation is provided as a concentrate that is formulated to be diluted in a suitable diluent to a dosage form for use. The concentrate can be a liquid, semisolid, or solid. In some embodiments, the diluent is a liquid or semisolid. In some embodiments, the concentrate is diluted 1, 2, 3, 4, 5, 6, 7, 8, 9, 10, 11, 12, 13, 14, 15, 16, 17, 18, 19, 20, 21, 22, 23, 24, 25, 26, 27, 28, 29, 30, 31, 32, 33, 34, 35, 36, 37, 38, 39, 40, 41, 42, 43, 44, 45, 46, 47, 48, 49, 50, 51, 52, 53, 54, 55, 56, 57, 58, 59, 60, 61, 62, 63, 64, 65, 66, 67, 68, 69, 70, 71, 72, 73, 74, 75, 76, 77, 78, 79, 80, 81, 82, 83, 84, 85, 86, 87, 88, 89, 90, 91, 92, 93, 94, 95, 96, 97, 98, 99, 100, 110, 120, 130, 140, 150, 160, 170, 180, 190, 200, 210, 220, 230, 240, 250, 260, 270, 280, 290, 300, 310, 320, 330, 340, 350, 360, 370, 380, 390, 400, 410, 420, 430, 440, 450, 460, 470, 480, 490, 500, 510, 520, 530, 540, 550, 560, 570, 580, 590, 600, 610, 620, 630, 640, 650, 660, 670, 680, 690, 700, 710, 720, 730, 740, 750, 760, 770, 780, 790, 800, 810, 820, 830, 840, 850, 860, 870, 880, 890, 900, 910, 920, 930, 940, 950, 960, 970, 980, 990, to/or 1000 fold or more to produce the dosage for use.

[0240] In some embodiments, the formulation is a solid form formulated to be incorporated into an animal food, such as incorporated within or applied to the surface of an animal food or treat such as a kibble, dehydrated, wet food (e.g., loaf, chunks in gravy etc.), dry animal treats (such as baked biscuits), soft animal treats, etc. Incorporation can occur at the site of manufacture or at the point of use.

[0241] In some embodiments, the dosage form is formulated for incorporation into a water source. In some embodiments, the dosage form is a solid form that can be dissolved in a suitable amount of water. In some embodiments, the dosage form is a liquid or semisolid form that can be dissolved in a suitable amount of water. In some embodiments, the liquid form is provided in a dissolvable capsule.

[0242] In some embodiments, the dosage form is a solid, such as a tablet or powder, formulated to be reconstituted in a liquid or semisolid to a dosage form for use.

[0243] In some embodiments, the dosage form is a gel or paste formulated to be applied to the oral cavity of an animal, such as a canine or feline. In some embodiments, the gel or paste can be applied by hand or with a device such as a toothbrush, such as an animal toothbrush.

[0244] In some embodiments, the dosage form is formulated to be applied to or in a toy such as at the point of manufacture or use, such that the dosage form is delivered to the oral cavity of the animal when the animal chews on, licks, or otherwise interacts with the toy with its mouth.

[0245] For some embodiments, the dosage form contains a predetermined amount of a primary active agent, auxiliary active ingredient, or both where appropriate per unit dose. In other embodiments, the predetermined amount of a primary active agent, auxiliary active agent, or both where appropriate, can be an appropriate fraction of the effective amount of the active ingredient. Such unit doses may therefore be administered once or more than once a day, month, or year (e.g., 1, 2, 3, 4, 5, 6, or more times per day, month, or year). Such formulations may be prepared by any of the methods well known in the art.

### Objects Containing the Engineered Volatile-Producing Bacteria

[0246] The engineered bacterial cells can be incorporated into an article that would be chewed on or licked by a dog or a cat (such as a toy or chew) but not necessarily ingested. Suitable toys can be bones, balls, and other formed objects. The formed objects can be any suitable three-dimensional shape and sized. The objects can be shaped and sized for accommodating different sized animals. The objects can be made from any suitable material, which are generally known in the art. The suitable material can be synthetic, natural, or a combination thereof. The objects can be coated with the engineered bacteria or a formulation thereof. The objects can include one or more voids, pockets, grooves, or other region shaped to hold a liquid, gel, paste, or solid composition. In some embodiments, the objects can include a formulation containing the engineered bacteria in one of those voids pockets, grooves, or other region shaped to hold a liquid, gel, paste, or solid composition. In some embodiments, a dosage form described elsewhere herein is formulated to be incorporated in a formed object. Incorporation can occur at the point of manufacture of the formed object or prior to final distribution to an end user. In some embodiments, incorporate occurs at the point of use. In some embodiments, the dosage form is provided separately from the formed object and can be incorporated with the formed object at the point of use.

### Methods of Reducing Halitosis in a Companion Animal

[0247] The engineered bacteria, formulations thereof, and/or articles containing the engineered bacteria or formulations thereof can be used to reduce halitosis in a companion animal such as a dog or cat. In some embodiments, a liquid formulation can be administered directly to the oral cavity or can be provided to a water source, such as drinking water, where the animal will self-administer the engineered bacteria by drinking the water. In some embodiments, the engineered bacteria can be administered to the animal by giving the animal an object that contains the engineered bacteria. The object can be a toy as described above. When the animal chews on the object, the animal can cause the transfer of the engineered bacteria from the object to the animal's mouth. In some embodiments, the engineered bacteria can be administered to the animal by giving the animal an edible treat containing the engineered bacteria. As the animal chews the treat the engineered bacteria are transferred to the animal's mouth.

[0248] After drinking, chewing, ingestion, or other administration of the engineered bacterial cells, the engineered bacterial cells can produce volatile compounds as previously described. When the volatile compounds are produced in the mouth of the animal, they can result in altering the breath odor to that produced by the volatile compounds. The engineered bacteria described herein can produce volatile compounds in the oral cavity for 1-60 (e.g. 1, 2, 3, 4, 5, 6, 7, 8, 9, 10, 11, 12, 13, 14, 15, 16, 17, 18, 19, 20, 21, 22, 23, 24, 25, 26, 27, 28, 29, 30, 31, 32, 33, 34, 35, 36, 37, 38, 39, 40, 41, 42, 43, 44, 45, 46, 47, 48, 49, 50, 51, 52, 53, 54, 55, 56, 57, 58, 59, 60) minutes, 1-12 hours (e.g. 1, 2, 3, 4, 5, 6, 7, 8, 9, 10, 11, 12), or more than 12 hours. The engineered bacteria can reproduce one or more times in the oral cavity. The engineered bacteria described herein can become part of the commensal oral microbiome. In this way the engineered bacteria can allow for longer breath odor control than conventional chews and treats aimed at freshening a dog or cat's breath.

[0249] Described in certain aspects herein is a method of improving the breath of a mammal, the method including administering an engineered bacterium or population thereof as described herein, an expression vector as described herein, or both, or a formulation thereof to the mammal.

[0250] In certain example embodiments, the method further includes allowing the engineered bacterium or population thereof to produce a volatile compound.

[0251] In certain example embodiments, the mammal is a non-human animal. In certain example embodiments, the mammal is canine or a feline.

[0252] Further embodiments are illustrated in the following Examples which are given for illustrative purposes only and are not intended to limit the scope of the invention.

### EXAMPLES

[0253] Now having described the embodiments of the present disclosure, in general, the following Examples describe some additional embodiments of the present disclosure. While embodiments of the present disclosure are described in connection with the following examples and the corresponding text and figures, there is no intent to limit embodiments of the present disclosure to this description. On the contrary, the intent is to cover all alternatives, modifications, and equivalents included within the spirit and scope of embodiments of the present disclosure. The following examples are put forth so as to provide those of ordinary skill in the art with a complete disclosure and description of how to perform the methods and use the probes disclosed and claimed herein. Efforts have been made to ensure accuracy with respect to numbers (e.g., amounts, temperature, etc.), but some errors and deviations should be accounted for. Unless indicated otherwise, parts are parts by weight, temperature is in ° C., and pressure is at or near atmospheric. Standard temperature and pressure are defined as 20° C. and 1 atmosphere.

### Example 1

[0254] Bacteria were sampled from the oral cavity of about 20 healthy dogs have been streaked out on conventional laboratory media plates (R2A). The plates are incubated for 4-7 days. Bacterial colonies are then picked, sampled, and DNA isolated for genotyping species by rDNA sequence. Bacteria species from the genus Brevundimonas, Pseudomonas, Xanthomonas, Deinococcus, and Pedobacter were identified. Selected bacteria colonies were tested for natural resistance to standard antibiotics (e.g., terramycin, gentamicin, and tetracycline. Bacteria without natural resistance were then transformed with vectors (pBBR1 and pME6010) containing the odor transgenes. These bacteria are then assayed for stable maintenance of the plasmid (though additional variations may include chromosomal integration of the transgenes). Expression of the transgenes is assayed by real time-PCR (RT-PCR) and presence of the volatile compounds of mass spectrometry, liquid chromatography, and/or gas chromatography. These assays may be performed from bacteria grown in the lab on conventional media or after administration to pets.

[0255] Constructs for nptII:pchBA and nptII: BSMT1 were created. Both have been cloned into a pBBR1 and a pME6010 plasmid.

### Example 2—Isolation and Modification of DOG53 Bacteria

[0256] About 400 bacteria from the oral cavity of 12 dogs containing desirable traits (fast growing, non-pathogenic, antibiotic susceptibility, amenable to genetic transformation) were isolated. Of the 20 that met the criterial, the most promising bacteria (was termed “DOG53”) was previously uncharacterized from the genera Pseudomonas. Sequencing of at least 2 isolates (“DOG53” and “DOG95”) was completed using an Illumina platform. Sequences from the isolate from DOG53 are provided in SEQ ID NOs: 12 and 14-48 in the Sequence Listing, which is filed herewith and incorporated by reference as if expressed in its entirety herein. Genome assembly of the two isolate strains was performed using Unicycler version: v0.4.8-beta. (about 80% nucleotide sequence identity to the closest known sequenced genome at NCBI). DOG53 was almost identical to another isolate “DOG91”. FIGS. 1-7 demonstrate genomic characterization and comparison of DOG53 and DOG91 isolates. As shown in FIG. 2, the scaffolds were 100 percent identical and are circular as noted by the Unicycler program. They are reverse complements in terms of their sequences with a different break point when making linear. As shown in FIG. 5, Blast 16s rRNA shows greatest similarity along nearly the entire length (99.1%) to Pseudomonas stutzeri. Syntenic dotplots to various strains:
[0257] Pseudomonas stutzeri strain RCH2: https://genomevolution.org/r/lcgla
[0258] Pseudomonas stutzeri=strain ATCC 17588; LMG 11199: https://genomevolution.org/r/lcglb
[0259] Pseudomonas stutzeri strain DSM 4166: https://genomevolution.org/r/lcglc
[0260] Pseudomonas stutzeri strain A1501: https://genomevolution.org/r/lcgld
[0261] Comparison to RCH2 and DSM4166: https://genomevolution.org/r/lcgm2

[0262] FIG. 6 shows characteristic x-alignments for related bacterial the same genera, but Dog53/Dog91 have DNA sequence and genome structure divergence. Average sequence similarly of syntenic gene pairs between Dog53 is about 80%. This evidences that this is a new species of Pseudomonas. This can be compared to FIG. 7, which shows an example of Example of what two strains from the same species of Pseudomonas looks like.

[0263] DOG91 and DOG53 isolated bacteria was transformed with a BSTM1 containing plasmid (see e.g., FIG. 3 and SEQ ID NO: 13) to engineer the bacteria to produce methyl salicylate to yield “DOG91-BSTM1 and “DOG53-BSTM1” engineered bacteria. Presence of plasmid was confirmed by analyzing the engineered strains for BSTM1.

### Example 3—Modified DOG53 Bacteria Produces Mint Volatile Compounds in the Oral Cavity of Dogs

[0264] Dog53 containing the BSTM1 plasmid (Dog53-BSTM1) was chosen to be introduced into animals to determine if the engineered bacterium could produce volatile compounds in the oral cavity of animals. Briefly, engineered Dog53-BSTM1 were grown in small batches and reintroduced into the oral cavity of dogs to determine the period these bacteria were present in dog's mouths and if methyl salicylate was produced. This was done in accordance and oversight of the University of Arizona's Institutional Animal Care and Use Committee Program.

[0265] Eight dogs were fed about 107 Dog53-BSTM1 bacteria. All subjects had recent vet checkups to ensure that no pre-existing health (oral or systemic) were present. Saliva was collected from the dogs prior to being fed bacteria, immediately after, and then post-feeding at 30 min, 60 min, 90 min, 2 hours, 4 hours, 8 hours, 12 hours, and 24 hours.

[0266] The presence and relative quantity of bacteria was determined by culturing on bacteria growth plates, PCR, and qPCR; presence of methyl salicylate by gas chromatography/mass spectrometry using solid-phase microextraction (using pure methyl salicylate as a positive control).

[0267] Dog53-BSTM1 bacteria were recovered and detected for up to two hours following feeding, with the relative number of bacteria decreasing over time. Similarly, methyl salicylate was detected as late as two hours after feeding.

### Example 4—Testing of Engineered DOG53 Bacteria

[0268] Dog53 bacteria engineered to contain a BSTM1 expression plasmid containing the methyl salicylate production pathway (Dog53-BSTM1 bacteria) were grown in small batches and reintroduced into the oral cavity of dogs to determine the period these bacteria were present in dog's mouths and if methyl salicylate was produced. This was done in accordance with and oversight by the University of Arizona's Institutional Animal Care and Use Committee Program.

[0269] Eight dogs were fed about 107 Dog53-BSTM1 bacteria administered on pet treats (dry biscuits). All subjects had recent vet checkups to ensure that no pre-existing health conditions (oral or systemic) were present. Saliva was collected using sterile cotton swabs from the dogs prior to being fed bacteria, immediately after, and then post-feeding at 30 min, 60 min, 90 min, 2 hours, 4 hours, 8 hours, 12 hours, and 24 hours. Presence and relative quantity of bacteria were determined by culturing on bacteria growth plates, PCR, and qPCR; presence of methyl salicylate was determined by gas chromatography/mass spectrometry using solid-phase microextraction (using pure methyl salicylate as a positive control). Dog53-BSTM1 bacteria were recovered and detected for up to two hours following feeding (FIG. 8), with the relative number of bacteria decreasing over time. Similarly, methyl salicylate was detected as late as 90 min after feeding (FIGS. 9A-9C).

[0270] The initial outcome demonstrated in dogs shows the viability of this technology.

### Example 5—Sequences Relevant to the Description and Working Examples

SEQ ID NO: 1-Pseudomonas aeruginosa
pchD, pchC, pchB and pchA genes-
GenBank: X82644.1
(SEQ ID NO: 1)
ATCGGCCTGTGGCGGAGCAATGATGGTGATGGTCATCAGG
TTTTCCTGTAGCCCGGGCGCTGCCGACGCGGCGACGCCTT
CCTGGATACGTGGGGGCAGGGGACTTTTTAGCGGAGATGG
ACAAAGCGCCCTGCACTCCGCCCCTGCAGCGAATGAAAAA
GCCCCGCAATCGAAAGGCGCGGGCTTGCGCGGTCCCTGCC
GCCCGCCAATGATAATAAATCTCATTTCCCAACAATGGCA
ATCGACCGCATCCACGGAGATCGCATGACTTCCTCGCCCG
TCACCCCATCGGCCGTCGACGACGCCCCCGACTGGCCCGC
CGCCTTCGTCCGCCGCTATCTCGACGCCGGCCACTGGCAG
GACCAGAGCTTCGCCGAAGCCCTGGCCACCAGCGCCGCGC
ATCCGCGGCGGATCGCGCTCTGCGACGACGACCAGCGGCT
CAGCTATGCCGACCTGCTCCAGCGCTGCCGCCGCCTGGCA
GCCGGACTGCGCCAGGCCGGCCTCGCACATGGCGACACGG
TAGTGCTGCACCTGCCCAACGGCATCGCCTTCGTCGAGAC
CTGCTTCGCCCTGTTCCAGCTCGGCGTACGCCCGGTGCTC
GCCCTCCCCGCCCATCGCCAGCATGAGATCAGCGGTTTCT
GTCGCTTCGCCGAGGCCAAGGCCTACATCGGCGCCGAACG
GATCGACGGCTTCGACCCACGGCCGATGGCCCGTGAGCTG
CTCGCCAGCGGCGCCTGCCGGATGGCGCTGATCCACGGCG
AAGCCGAGGCGCCGCTGCAAGCGCTGGCACCGCTGTACCA
GGCCGACGCGCTGGAAGACTGCGCCGCCCGCGCCGAGGAT
ATCGCCTGCTTCCAGTTGTCCGGCGGCACCACCGGCACGC
CGAAGCTGATTCCCCGGCGTCATCGCGAGTATCTCTACAA
CGTCCGCGCCAGCGCCGAGGTCTGCGGCTTCGACGAGCAC
ACGGTGTACCTCACCGGCTTGCCGATGGCGCACAACTTCA
CTCTCTGCTGCCCCGGAGTGATCGGCACGCTGCTGGCCAG
CGGCGCGGTGGTGGTCAGCCAGCGCGCCGATCCCGAGCAT
TGCTTCGCCCTGATCGCCCGTGAACGGGTCACCCACACCG
CCCTGGTACCGCCGCTGGCGATGCTCTGGCTGGATGCCCA
GGAAAGCCGCCGCGCCGATCTATCCAGCCTGCGTCTGCTC
CAGGTCGGCGGCTCCAGGCTCGGCAGCAGTGCCGCGCAAC
GCGTCGAACCGGTGCTCGGCTGCCAGTTGCAACAGGTGCT
GGGAATGGCCGAGGGGCTGATCTGCTACACCCGCCTGGAC
GATCCGCCCGAACGCGTGCTGCATACCCAGGGCCGGCCGC
TGTCGCCGGACGACGAAGTGCGGGTGGTCGACGCCGAGGG
CCGCGAGGTCGGCCCCGGCGAGGTGGGCGAACTGACCGTG
CGCGGTCCCTACACCATCCGCGGCTACTACCGCCTGCCTG
AACACAACGCCAAGGCCTTCAGCGCGGACGGCTTCTACCG
CACCGGCGACCGGGTCAGCCGCGACAAGGACGGCTACCTG
GTGGTGGAGGGCCGCGACAAGGACCAGATCAACCGCGGCG
GCGAGAAGATCGCCGCGGAAGAGGTGGAGAACCTGCTGAT
AGCCCATCCGCAGGTGCACGACGCCACCGTCGTGGCGATG
CCCGACAGCCTGCTCGGCGAGCGCACCTGCGCCTTCGTCA
TCCCGCGCCAGCCGGCCGCCTCGGCGCTGAAGCTGAAGCA
ATACCTGCACGCCTGCGGGCTGGCCGCGTTCAAGGTGCCG
GACCGCATCGAGCTGGTCCCGGCCTTCCCCCAAACCGGCA
TCGGCAAGATCAGCAAGAAGGACCTGCGCGAGCGCCTGCG
CCGCGAGCTGGAGGCCCGCGCATGAGCGCCGCCTGGGTCC
GGCCGTTCCGCCTGACGCCGATGCCGCGCCTGCGCCTGGC
CTGCTTCCCCCATGCAGGCGGCAGCGCCAGCTTCTTCCGT
AGCTGGAGCGAACGCCTGCCGCCAGACATCGACCTGCTTG
CCCTGCAGTACCCGGGTCGCGAGGACCGCTTCAACGAGGC
GCCGGCCACCCGCCTGGAGGACCTCGCCGACGGCGCCGCC
CTCGCCCTGCGCGATTTCGCCGACGCGCCCCTGGCGCTGT
TCGGCCACAGTCTCGGCGCGGCGCTGGCCTACGAAACCGC
CCTGCGCCTGGAAACGCCGGCCGCCCTGCGCCACCTGTTC
GTCTCCGCCCATCCGGCACCGCACCGGCAACGCGGCGGCG
CGTTGCACCGCGGCGACGAGGCGGCGCTGCTGGAGGACGT
CCGCCGCCAGGGTGGCGCCAGCGAGCTACTCGAGGACGCC
GACCTGCGCGCGCTGTTCCTGCCGATCCTGCGCGCCGACT
ACCAGGCGATCGAGACCTACCGACGGGCGCAGCCCATCGC
CCTGGCCTGCGCCCTCGACGTCCTCCTCGGCGAGCACGAC
GAGGAAGTCAGCGCCGCCGAGGCGCAGGCCTGGAGCGACG
CCAGCCGGACTCCCGCCAGGCTGCGGCGCTTTCCTGGCGG
CCACTTCTACCTGAGCGAGGGGCGCGACGCGGTGATCGAG
CACCTGCTGCGCCGCCTCGCACATCCCGACGCCCTTTCCC
GAGAGGTTGCATGATGAAAACTCCCGAAGACTGCACCGGC
CTGGCGGACATCCGCGAGGCCATCGACCGGATCGACCTGG
ATATCGTCCAGGCCCTCGGCCGCCGCATGGACTACGTCAA
GGCGGCGTCGCGCTTCAAGGCCAGCGAGGCGGCGATTCCG
GCGCCCGAGCGGGTCGCCGCGATGCTCCCCGAGCGCGCCC
GCTGGGCCGAGGAAAACGGACTCGACGCGCCCTTCGTCGA
GGGACTGTTCGCGCAGATCATCCACTGGTACATCGCCGAG
CAGATCAAGTACTGGCGCCAGACACGGGGTGCCGCATGAG
CCGGCTGGCGCCCCTGAGCCAGTGCCTGCACGCCTTGCGC
GGCACCTTCGAGCGCGCCATCGGCCAGGCGCAGGCGCTCG
ATCGTCCGGTGCTGGTGGCGGCATCGTTCGAGATCGACCC
ATTGGACCCGCTGCAGGTATTCGGTGCCTGGGACGACCGG
CAAACGCCCTGCCTGTACTGGGAACAGCCCGAGCTGGCGT
TCTTCGCCTGGGGCTGCGCCCTGGAGCTGCAAGGCCACGG
CGAACAGCGCTTCGCCCGGATCGAGGAAAACTGGCAATTG
CTCTGCGCCGACGCCGTGGTCGAGGGCCCGCTGGCGCCGC
GCCTGTGCGGCGGATTCCGCTTCGATCCGCGCGGCCCGCG
CGAGGAACACTGGCAAGCCTTCGCCGATGCCAGCCTGATG
CTCGCCGGCATCACCGTGCTGCGCGAGGGCGAACGCTACC
GGGTACTCTGCCAACACCTGGCCAAGCCCGGCGAAGATGC
CCTGGCCCTGGCCGCCTACCACTGCTCGGCGCTACTGCGC
CTGAGGCAGCCGGCCAGACGCCGGCCCTCGGGGCCGACCG
CTGGCGCGCAGGGCGACGCTTCGGCGCAGGAGCGCAGGCA
ATGGGAAGCCAAGGTGAGCGACGCGGTAAGCAGTGTCCGC
CAGGGACGCTTCGGCAAGGTCGTGCTGGCCCGCACCCAGG
CCCGGCCTCTCGGCGACATCGAGCCGTGGCAGGTCATCGA
ACACCTGCGTCTGCAACATGCCGACGCCCAGCTGTTCGCC
TGTCGCCGCGGCAACGCCTGCTTCCTCGGCGCCTCCCCGG
AACGCCTGGTCCGCATTCGCGCCGGCGAGGCACTCACCCA
TGCCCTGGCCGGGACCATCGCCCGCGGCGGCGATGCCCAG
GAAGATGCGCGGCTCGGACAGGCCCTGCTGGACAGCGCCA
AGGACAGGCACGAACACCAGTTGGTGGTGGAGGCGATCCG
TACGGCCCTGGAACCCTTCAGCGAGGTGCTGGAAATCCCC
GATGCGCCCGGCCTGAAACGACTGGCGCGAGTCCAGCACC
TGAACACGCCGATCCGCGCCCGCCTCGCTGACGCAGGCGG
CATCCTGCGGCTGCTACAAGCGCTGCATCCGACCCCCGCG
GTGGGCGGCTACCCACGCAGCGCGGCGCTGGACTACATCC
GCCAGCACGAAGGGATGGACCGCGGCTGGTACGCCGCGCC
GCTGGGCTGGCTCGACGGCGAAGGCAACGGCGATTTCCTG
GTGGCGCTGCGCTCGGCCCTGCTCACGCCGGGCCGGGGCT
ACCTGTTCGCCGGCTGCGGTCTGGTAGGCGATTCGGAACC
GGCCCACGAGTATCGCGAAACCTGCCTTAAGCTCAGTGCC
ATGCGGGAAGCTCTATCCGCCATAGGCGGCCTGGACGAAG
TGCCCTTGCAGCGCGGCGTCGCCTGAAAACGAAGACCCCC
TGCGGCCCGAGGGCGGCAGGGGGTCTTCGAAGGTCTGCCC
GTGGCGCGGACGGGCCGCCGCAAGGGCGTCGCTTAGAACG
GAATGTCGTCGTCGAAGCTGTCGTAGTCCTGGGCCGGTTG
CGGCGCCGGTTGCTGCTGCGGGGCCGGACGCGACTGCTGC
TGCGGGGCCTGCTGCGGGCGCTGCATGGGCTCGCGGGGCG
CGCTGCGAATCGTCGCCGGAGGGGCGGCCGCCGAGCAACT
GCATGTTGCCGTTGATGTCGAC
SEQ ID NO: 2-AY233465.1 Petunia x hybrida
S-adenosyl-L-methionine: benzoic acid/
salicylic acid carboxyl methyltransferase
(BSMT1) mRNA, complete cds
(SEQ ID NO: 2)
AAAGATCAAGAAAGAGATACTCATAGCAAGAAGAAATGGA
AGTTGTTGAAGTTCTTCACATGAATGGAGGAAATGGAGAC
AGTAGCTATGCAAACAATTCTTTGGTTCAGCAAAAGGTGA
TTCTCATGACAAAGCCAATAACTGAGCAAGCCATGATTGA
TCTCTACAGCAGCCTCTTTCCAGAAACCTTATGCATTGCA
GATTTGGGTTGTTCTTTGGGAGCTAACACTTTCTTGGTGG
TCTCACAGCTTGTTAAAATAGTAGAAAAAGAACGAAAAAA
GCATGGTTTTAAGTCTCCAGAGTTTTATTTTCACTTCAAT
GATCTTCCTGGCAATGATTTTAATACACTTTTTCAGTCAC
TGGGGGCATTTCAAGAAGATTTGAGAAAGCATATAGGGGA
AAGCTTTGGTCCATGTTTTTTCAGTGGAGTGCCTGGTTCA
TTTTATACTAGACTTTTCCCTTCCAAAAGTTTACATTTTG
TTTACTCCTCCTACAGTCTCATGTGGCTATCTCAGGTGCC
TAATGGGATTGAAAATAACAAGGGAAACATTTACATGGCA
AGAACAAGCCCTCTAAGTGTTATTAAAGCATACTACAAGC
AATATGAAATAGATTTTTCAAATTTTCTCAAGTACCGTTC
AGAGGAATTGATGAAAGGTGGAAAGATGGTGTTAACACTC
CTAGGTAGAGAAAGTGAGGATCCTACTAGCAAAGAATGCT
GTTACATTTGGGAGCTTCTAGCCATGGCCCTCAATAAGTT
GGTTGAAGAGGGATTGATAAAAGAAGAGAAAGTAGATGCA
TTCAATATTCCTCAATACACACCATCACCAGCAGAAGTAA
AGTACATAGTTGAGAAGGAAGGATCATTCACCATTAATCG
CTTGGAAACATCAAGAGTTCATTGGAATGCTTCTAATAAT
GAGAAGAATGGTGGTTACAATGTGTCAAGGTGCATGAGAG
CTGTGGCTGAGCCTTTGCTTGTCAGCCACTTTGACAAGGA
ATTGATGGATTTAGTGTTCCACAAGTACGAAGAGATTGTT
TCTGATTGCATGTCCAAAGAGAATACTGAGTTTATAAATG
TCATCATCTCCTTGACCAAAATAAATTAAGGCACTCAATG
TCTATTTTCGGTCGAAATCCGGTGGTCGAAAAACCCGAAT
ATTTTAGTAGTGATCCGATATAAACTACATATAAATATTA
CAATAGATTAAAATACATATATGTTTAATAAGTTCACGCA
CATATTGAATTATCTTATTCAAATGTTTAATACGACTATG
CTGAATGTACCAATTCTCTATTGTTGTTTTGCACTTCATA
GGTGGTCGTGGTCGAGGTGCTAATTATTTATCTAGTCATT
GTCTTGTACACTAAAGGTTCTGTACCACAGGGAATTATCT
CATGCATGTCTTTATTATATATTTAAATGGATAAGTTACT
GCCTTGATTTTAAAAAAAAAAAAAAAAAAAAAA
SEQ ID NO: 3-Pseudomonas aeruginosa pchA
(GenBank Accession No.: X82644.1,
UniProtKB ID: Q51508)
(SEQ ID NO: 3)
MSRLAPLSQCLHALRGTFERAIGQAQALDRPVLVAASFEI
DPLDPLQVFGAWDDRQTPCLYWEQPELAFFAWGCALELQG
HGEQRFARIEENWQLLCADAVVEGPLAPRLCGGFRFDPRG
PREEHWQAFADASLMLAGITVLREGERYRVLCQHLAKPGE
DALALAAYHCSALLRLRQPARRRPSGPTAGAQGDASAQER
RQWEAKVSDAVSSVRQGRFGKVVLARTQARPLGDIEPWQV
IEHLRLQHADAQLFACRRGNACFLGASPERLVRIRAGEAL
THALAGTIARGGDAQEDARLGQALLDSAKDRHEHQLVVEA
IRTALEPFSEVLEIPDAPGLKRLARVQHLNTPIRARLADA
GGILRLLQALHPTPAVGGYPRSAALDYIRQHEGMDRGWYA
APLGWLDGEGNGDFLVALRSALLTPGRGYLFAGCGLVGDS
EPAHEYRETCLKLSAMREALSAIGGLDEVPLQRGVA
SEQ ID NO: 4-Pseudomonas aeruginosa
pchB-UniProtKB ID: Q51507
(SEQ ID NO: 4)
MMKTPEDCTGLADIREAIDRIDLDIVQALGRRMDYVKAAS
RFKASEAAIPAPERVAAMLPERARWAEENGLDAPFVEGLF
AQIIHWYIAEQIKYWRQTRGAA
SEQ ID NO: 5-NCBI Reference Sequence:
WP_003114686.1 (ACCESSION WP_003114686)
WP_003114686.1 MULTISPECIES: salicylate
biosynthesis isochorismate
synthase [Pseudomonas]
(PchA)
(SEQ ID NO: 5)
MSRLAPLSQCLHALRGTFERAIGQAQALDRPVLVAASFEI
DPLDPLQVFGAWDDRQTPCLYWEQPELAFFAWGCALELQG
HGEQRFARIEENWQLLCADAVVEGPLAPRLCGGFRFDPRG
PREEHWQAFADASLMLAGITVLREGERYRVLCQHLAKPGE
DALALAAYHCSALLRLRQPARRRPSGPTAGAQGDASAQER
RQWEAKVSDAVSSVRQGRFGKVVLARTQARPLGDIEPWQV
IEHLRLQHADAQLFACRRGNACFLGASPERLVRIRAGEAL
THALAGTIARGGDAQEDARLGQALLDSAKDRHEHQLVVEA
IRTALEPFSEVLEIPDAPGLKRLARVQHLNTPIRARLADA
GGILRLLQALHPTPAVGGYPRSAALDYIRQHEGMDRGWYA
APLGWLDGEGNGDFLVALRSALLTPGRGYLFAGCGLVGDS
EPAHEYRETCLKLSAMREALSAIGGLDEVPLQRGVA
SEQ ID NO: 6-pchB [Pseudomonas aeruginosa] PAO1
GenBank: CAA57968.1
(SEQ ID NO: 6)
MMKTPEDCTGLADIREAIDRIDLDIVQALGRRMDYVKAAS
RFKASEAAIPAPERVAAMLPERARWAEENGLDAPFVEGLF
AQIIHWYIAEQIKYWRQTRGAA
SEQ ID NO: 7-S-adenosyl-L-methionine:
benzoic acid/salicylic acid carboxyl
methyltransferase [Petunia x hybrida]
GenBank: AAO45012.1
(BSMT1)
(SEQ ID NO: 7)
MEVVEVLHMNGGNGDSSYANNSLVQQKVILMTKPITEQAM
IDLYSSLFPETLCIADLGCSLGANTFLVVSQLVKIVEKER
KKHGFKSPEFYFHFNDLPGNDFNTLFQSLGAFQEDLRKHI
GESFGPCFFSGVPGSFYTRLFPSKSLHFVYSSYSLMWLSQ
VPNGIENNKGNIYMARTSPLSVIKAYYKQYEIDFSNFLKY
RSEELMKGGKMVLTLLGRESEDPTSKECCYIWELLAMALN
KLVEEGLIKEEKVDAFNIPQYTPSPAEVKYIVEKEGSFTI
NRLETSRVHWNASNNEKNGGYNVSRCMRAVAEPLLVSHFD
KELMDLVFHKYEEIVSDCMSKENTEFINVIISLTKIN
SEQ ID NO: 8: Arabidopsis thaliana
S-adenosyl-L-methionine-dependent
methyltransferases superfamily protein
(BSMT1), mRNA, NCBI Reference Sequence:
NM_111981.5
(SEQ ID NO: 8)
CTTGATGAAGTTCCCTCTCTCTATAAATTGAAGTGTGTGA
GATGCATCATCCATACACAACATCTTCCATCTTCCGATAA
TTCTCCTTTAGTCTTATAATCACTAATAAGTACGATAATT
GAAATGGATCCAAGATTCATCAACACCATTCCTTCCTTGA
GGTATGATGATGATAAGTGTGATGATGAATATGCGTTTGT
GAAAGCTCTATGTATGAGTGGTGGAGATGGTGCCAACAGT
TACTCCGCCAATTCTCGCCTTCAGAAAAAAGTTTTATCAA
TGGCCAAACCAGTCTTGGTAAGAAACACAGAAGAAATGAT
GATGAACTTAGACTTTCCTACGTACATCAAAGTTGCTGAA
TTGGGTTGTTCTTCGGGACAAAACTCTTTTTTGGCTATCT
TTGAGATCATCAACACCATTAATGTGTTGTGCCAACATGT
GAACAAAAACTCACCAGAGATCGATTGTTGTCTAAACGAT
CTCCCGGAAAATGATTTCAACACGACCTTTAAGTTCGTAC
CTTTCTTCAACAAGGAGCTCATGATCACAAACAAATCATC
ATGTTTCGTCTATGGAGCTCCAGGTTCCTTCTATTCCAGG
CTCTTCTCTCGCAATAGCCTCCATTTAATACATTCCTCTT
ATGCACTCCATTGGCTCTCTAAGGTTCCCGAGAAACTTGA
GAATAATAAGGGGAATCTGTACATAACAAGTTCAAGTCCT
CAAAGTGCATACAAGGCCTACTTGAATCAATTCCAAAAAG
ACTTCACCATGTTTCTAAGGTTACGTTCTGAAGAAATTGT
CTCTAATGGACGTATGGTTCTCACCTTCATCGGAAGAAAC
ACTCTTAACGATCCATTGTATAGAGATTGTTGTCACTTTT
GGACATTGCTATCAAACTCTCTCCGTGACCTAGTCTTTGA
GGGTCTTGTGAGTGAGTCAAAGCTGGACGCATTCAACATG
CCGTTTTATGATCCGAACGTACAAGAACTCAAAGAAGTGA
TACAAAAAGAGGGCTCTTTTGAAATCAATGAATTGGAGTC
ACATGGATTTGATCTTGGTCACTACTACGAAGAAGATGAC
TTTGAAGCAGGACGCAATGAAGCTAATGGCATAAGAGCTG
TTAGTGAACCAATGCTCATTGCTCATTTTGGAGAAGAAAT
TATCGATACCTTGTTCGATAAGTATGCATACCATGTGACT
CAACATGCCAACTGCAGGAACAAAACGACTGTCAGTCTTG
TCGTTTCCTTGACTAAGAAGTAAGAAGTAATCAACTTCTG
TCATGTTGCTCTATTTGTATTTATTTACTACTGTTATTTT
GTTTCCTTGAATAAATTTCAACACCTGCCATTCAATGTGA
TGATGTGGAGCTAGTATTGGAAAAAAGTGTGACTGTAATA
TATTATGGTAAATTTGGTAAATGATTTATTTCCTGCAAAA
GTTGCAGATACTGCTTTCAAGTATGAAG
SEQ ID NO: 9: Arabidopsis thaliana
S-adenosyl-L-methionine-dependent
methyltransferases superfamily protein
(BSMT1), polypeptide translated
from SEQ ID NO: 8
(SEQ ID NO: 9)
MDPRFINTIPSLRYDDDKCDDEYAFVKALCMSGGDGANSY
SANSRLQKKVLSMAKPVLVRNTEEMMMNLDFPTYIKVAEL
GCSSGQNSFLAIFEIINTINVLCQHVNKNSPEIDCCLNDL
PENDFNTTFKFVPFFNKELMITNKSSCFVYGAPGSFYSRL
FSRNSLHLIHSSYALHWLSKVPEKLENNKGNLYITSSSPQ
SAYKAYLNQFQKDFTMFLRLRSEEIVSNGRMVLTFIGRNT
LNDPLYRDCCHFWTLLSNSLRDLVFEGLVSESKLDAFNMP
FYDPNVQELKEVIQKEGSFEINELESHGFDLGHYYEEDDF
EAGRNEANGIRAVSEPMLIAHFGEEIIDTLFDKYAYHVTQ
HANCRNKTTVSLVVSLTKK
SEQ ID NO: 10-phcBA polynucleotide
sequence with Gateway cloning vector
recombinase sites on the 5′ and 3′
ends (about 30 bp each)
(SEQ ID NO: 10)
GGGGACAAGTTTGTACAAAAAAGCAGGCTCCCCGGAATTG
CCAGCTGGGGCGCCCTCTGGTAAGGTTGGGAAGCCCTGCA
AATGAAAACTCCTGAAGATTGCACCGGACTGGCAGATATC
CGTGAGGCAATCGATCGGATCGATCTGGATATCGTACAGG
CACTCGGACGTCGTATGGATTACGTAAAGGCAGCATCGCG
TTTCAAGGCAAGCGAGGCAGCAATACCAGCACCTGAGCGG
GTAGCAGCAATGCTCCCTGAGCGTGCACGTTGGGCAGAGG
AAAACGGACTCGATGCACCTTTCGTAGAGGGACTGTTCGC
ACAGATCATCCACTGGTACATCGCAGAGCAGATCAAGTAC
TGGCGTCAGACACGGGGTGCAGCATGAGCCGGCTGGCACC
TCTGAGCCAGTGCCTGCACGCATTGCGTGGAACCTTCGAA
CGTGCAATCGGACAGGCACAGGCACTAGATCGTCCGGTGC
TGGTGGCAGCATCGTTCGAAATCGATCCATTGGATCCGCT
ACAGGTATTCGGTGCATGGGATGATCGGCAAACGCCTTGC
CTGTACTGGGAACAGCCTGAACTGGCATTCTTCGCATGGG
GATGCGCACTGGAACTGCAAGGACACGGAGAACAGCGTTT
CGCACGGATCGAAGAAAACTGGCAATTGCTATGCGCAGAT
GCAGTGGTAGAAGGACCGCTGGCACCGCGTCTGTGCGGAG
GATTCCGTTTCGATCCGCGTGGACCGCGTGAAGAACACTG
GCAAGCATTCGCAGATGCAAGCCTGATGCTAGCAGGAATC
ACCGTGCTGCGTGAAGGAGAACGTTACCGGGTACTATGCC
AACACCTGGCAAAGCCTGGAGAAGATGCACTGGCACTGGC
AGCATACCATTGCTCGGCACTACTGCGTCTGAGGCAGCCG
GCAAGACGTCGGCCATCGGGTCCGACCGCTGGAGCACAGG
GAGATGCTTCGGCACAGGAACGTAGGCAATGGGAAGCAAA
GGTGAGCGATGCAGTAAGCAGTGTACGTCAGGGACGTTTC
GGAAAGGTAGTACTGGCACGAACCCAGGCACGGCCTCTAG
GAGATATCGAACCGTGGCAGGTAATCGAACACCTGCGTCT
GCAACATGCAGATGCACAGCTGTTCGCATGTCGTCGTGGA
AACGCATGCTTCCTAGGAGCCTCCCCGGAACGTCTGGTAC
GTATTCGTGCAGGAGAAGCACTAACCCATGCACTGGCAGG
TACCATCGCACGTGGAGGAGATGCACAGGAAGATGCACGG
CTAGGACAGGCACTGCTGGATAGCGCAAAGGATAGGCACG
AACACCAGTTGGTGGTGGAAGCAATCCGTACGGCACTGGA
ACCTTTCAGCGAAGTGCTGGAAATCCCTGATGCACCTGGA
CTGAAACGACTGGCACGAGTACAGCACCTGAACACGCCGA
TCCGTGCACGTCTAGCTGATGCAGGAGGCATCCTGCGGCT
GCTACAAGCACTGCATCCGACCCCTGCAGTGGGAGGCTAC
CCACGTAGCGCAGCACTGGATTACATCCGTCAGCACGAAG
GTATGGATCGTGGATGGTACGCAGCACCGCTGGGATGGCT
AGATGGAGAAGGAAACGGAGATTTCCTGGTGGCACTGCGT
TCGGCACTGCTAACGCCGGGACGGGGATACCTGTTCGCAG
GCTGCGGTCTGGTAGGAGATTCGGAACCGGCACACGAATA
TCGTGAAACCTGCCTTAAGCTAAGTGCAATGCGGGAAGCT
CTATCCGCAATAGGAGGCCTGGATGAAGTGCCTTTGCAGC
GTGGAGTAGCATAATAACACCCAGCTTTCTTGTACAAAGT
GGTCCCC
SEQ ID NO: 11-BSMT1 polynucleotide sequence
with Gateway cloning vector recombinase sites
on the 5′ and 3′ ends about 30 bp each)
(SEQ ID NO: 11)
GGGGACAAGTTTGTACAAAAAAGCAGGCTCCCCGGAATTG
CCAGCTGGGGCGCCCTCTGGTAAGGTTGGGAAGCCCTGCA
AATGGAAGTTGTTGAAGTTCTTCACATGAATGGAGGAAAT
GGAGACAGTAGCTATGCAAACAATTCTTTGGTTCAGCAAA
AGGTGATTCTCATGACAAAGCCAATAACTGAGCAAGCCAT
GATTGATCTCTACAGCAGCCTCTTTCCAGAAACCTTATGC
ATTGCAGATTTGGGTTGTTCTTTGGGAGCTAACACTTTCT
TGGTGGTCTCACAGCTTGTTAAAATAGTAGAAAAAGAACG
AAAAAAGCATGGTTTTAAGTCTCCAGAGTTTTATTTTCAC
TTCAATGATCTTCCTGGCAATGATTTTAATACACTTTTTC
AGTCACTGGGGGCATTTCAAGAAGATTTGAGAAAGCATAT
AGGGGAAAGCTTTGGTCCATGTTTTTTCAGTGGAGTGCCT
GGTTCATTTTATACTAGACTTTTCCCTTCCAAAAGTTTAC
ATTTTGTTTACTCCTCCTACAGTCTCATGTGGCTATCTCA
GGTGCCTAATGGGATTGAAAATAACAAGGGAAACATTTAC
ATGGCAAGAACAAGCCCTCTAAGTGTTATTAAAGCATACT
ACAAGCAATATGAAATAGATTTTTCAAATTTTCTCAAGTA
CCGTTCAGAGGAATTGATGAAAGGTGGAAAGATGGTGTTA
ACACTCCTAGGTAGAGAAAGTGAGGATCCTACTAGCAAAG
AATGCTGTTACATTTGGGAGCTTCTAGCCATGGCCCTCAA
TAAGTTGGTTGAAGAGGGATTGATAAAAGAAGAGAAAGTA
GATGCATTCAATATTCCTCAATACACACCATCACCAGCAG
AAGTAAAGTACATAGTTGAGAAGGAAGGATCATTCACCAT
TAATCGCTTGGAAACATCAAGAGTTCATTGGAATGCTTCT
AATAATGAGAAGAATGGTGGTTACAATGTGTCAAGGTGCA
TGAGAGCTGTGGCTGAGCCTTTGCTTGTCAGCCACTTTGA
CAAGGAATTGATGGATTTAGTGTTCCACAAGTACGAAGAG
ATTGTTTCTGATTGCATGTCCAAAGAGAATACTGAGTTTA
TAAATGTCATCATCTCCTTGACCAAAATAAATTAACACCC
AGCTTTCTTGTACAAAGTGGTCCCC
SEQ ID NO: 12-16s rRNA sequence from
Dog53: >Pseudomonas sp.
(Dog53-PROKKA_03272020.gff, Annotated
by prokka 1.12 available through CyVerse
Discovery Environment, v1),
Location: 216-1634 (length: 1419),
Chromosome: 18, Strand: 1
(SEQ ID NO: 12)
ATGGCTCAGATTGA
ACGCTGGCGGCAGGCCTAACACATGCAAGTCGAGCGGATG
AGTGGAGCTTGCTCCATGATTCAGCGGCGGACGGGTGAGT
AATGCCTAGGAATCTGCCTGGTAGTGGGGGACAACGTTTC
GAAAGGAACGCTAATACCGCATACGTCCTACGGGAGAAAG
CAGGGGACCTTCGGGCCTTGCGCTATCAGATGAGCCTAGG
TCGGATTAGCTAGTTGGTGAGGTAATGGCTCACCAAGGCG
ACGATCCGTAACTGGTCTGAGAGGATGATCAGTCACACTG
GAACTGAGACACGGTCCAGACTCCTACGGGAGGCAGCAGT
GGGGAATATTGGACAATGGGCGAAAGCCTGATCCAGCCAT
GCCGCGTGTGTGAAGAAGGTCTTCGGATTGTAAAGCACTT
TAAGTTGGGAGGAAGGGCAGTAAGTTAATACCTTGCTGTT
TTGACGTTACCGACAGAATAAGCACCGGCTAACTTCGTGC
CAGCAGCCGCGGTAATACGAAGGGTGCAAGCGTTAATCGG
AATTACTGGGCGTAAAGCGCGCGTAGGTGGTTTGTTAAGT
TGGATGTGAAAGCCCCGGGCTCAACCTGGGAACTGCATCC
AAAACTGGCAAGCTAGAGTATGGCAGAGGGTGGTGGAATT
TCCTGTGTAGCGGTGAAATGCGTAGATATAGGAAGGAACA
CCAGTGGCGAAGGCGACCACCTGGGCTAATACTGACACTG
AGGTGCGAAAGCGTGGGGAGCAAACAGGATTAGATACCCT
GGTAGTCCACGCCGTAAACGATGTCGACTAGCCGTTGGGA
TCCTTGAGATCTTAGTGGCGCAGCTAACGCATTAAGTCGA
CCGCCTGGGGAGTACGGCCGCAAGGTTAAAACTCAAATGA
ATTGACGGGGGCCCGCACAAGCGGTGGAGCATGTGGTTTA
ATTCGAAGCAACGCGAAGAACCTTACCAGGCCTTGACATG
CAGAGAACTTTCCAGAGATGGATTGGTGCCTTCGGGAACT
CTGACACAGGTGCTGCATGGCTGTCGTCAGCTCGTGTCGT
GAGATGTTGGGTTAAGTCCCGTAACGAGCGCAACCCTTGT
CCTTAGTTACCAGCACGTGATGGTGGGCACTCTAAGGAGA
CTGCCGGTGACAAACCGGAGGAAGGTGGGGATGACGTCAA
GTCATCATGGCCCTTACGGCCTGGGCTACACACGTGCTAC
AATGGTCGGTACAAAGGGTTGCCAAGCCGCGAGGTGGAGC
TAATCCCATAAAACCGATCGTAGTCCGGATCGCAGTCTGC
AACTCGACTGCGTGAAGTCGGAATCGCTAGTAATCGTGAA
TCAGAATGTCACGGTGAATACGTTCCCGGGCCTTGTACAC
ACCGCCCGTCACACCATGGGAGTGGGTTGCTCCAGAAGTA
GCTAG
SEQ ID NO: 13-Mint Plasmid
(SEQ ID NO: 13)
GGGCAACGTGGCGGCCAGTCTCAAGCACGCCTACCGCGAG
CGCGAGACGCCCAACGCTGACGCCAGCAGGACGCCAGAGA
ACGAGCACTGGGCGGCCAGCAGCACCGATGAAGCGATGGG
CCGACTGCGCGAGTTGCTGCCAGAGAAGCGGCGCAAGGAC
GCTGTGTTGGCGGTCGAGTACGTCATGACGGCCAGCCCGG
AATGGTGGAAGTCGGCCAGCCAAGAACAGCAGGCGGCGTT
CTTCGAGAAGGCGCACAAGTGGCTGGCGGACAAGTACGGG
GCGGATCGCATCGTGACGGCCAGCATCCACCGTGACGAAA
CCAGCCCGCACATGACCGCGTTCGTGGTGCCGCTGACGCA
GGACGGCAGGCTGTCGGCCAAGGAGTTCATCGGCAACAAA
GCGCAGATGACCCGCGACCAGACCACGTTTGCGGCCGCTG
TGGCCGATCTAGGGCTGCAACGGGGCATCGAGGGCAGCAA
GGCACGTCACACGCGCATTCAGGCGTTCTACGAGGCCCTG
GAGCGGCCACCAGTGGGCCACGTCACCATCAGCCCGCAAG
CGGTCGAGCCACGCGCCTATGCACCGCAGGGATTGGCCGA
AAAGCTGGGAATCTCAAAGCGCGTTGAGACGCCGGAAGCC
GTGGCCGACCGGCTGACAAAAGCGGTTCGGCAGGGGTATG
AGCCTGCCCTACAGGCCGCCGCAGGAGCGCGTGAGATGCG
CAAGAAGGCCGATCAAGCCCAAGAGACGGCCCGAGACCTT
CGGGAGCGCCTGAAGCCCGTTCTGGACGCCCTGGGGCCGT
TGAATCGGGATATGCAGGCCAAGGCCGCCGCGATCATCAA
GGCCGTGGGCGAAAAGCTGCTGACGGAACAGCGGGAAGTC
CAGCGCCAGAAACAGGCCCAGCGCCAGCAGGAACGCGGGC
GCGCACATTTCCCCGAAAAGTGCCACCTGGGATGAATGTC
AGCTACTGGGCTATCTGGACAAGGGAAAACGCAAGCGCAA
AGAGAAAGCAGGTAGCTTGCAGTGGGCTTACATGGCGATA
GCTAGACTGGGCGGTTTTATGGACAGCAAGCGAACCGGAA
TTGCCAGCTGGGGCGCCCTCTGGTAAGGTTGGGAAGCCCT
GCAAAGTAAACTGGATGGCTTTCTTGCCGCCAAGGATCTG
ATGGCGCAGGGGATCAAGATCTGATCAAGAGACAGGATGA
GGATCGTTTCGCATGATTGAACAAGATGGATTGCACGCAG
GTTCTCCGGCCGCTTGGGTGGAGAGGCTATTCGGCTATGA
CTGGGCACAACAGACAATCGGCTGCTCTGATGCCGCCGTG
TTCCGGCTGTCAGCGCAGGGGCGCCCGGTTCTTTTTGTCA
AGACCGACCTGTCCGGTGCCCTGAATGAACTGCAGGACGA
GGCAGCGCGGCTATCGTGGCTGGCCACGACGGGCGTTCCT
TGCGCAGCTGTGCTCGACGTTGTCACTGAAGCGGGAAGGG
ACTGGCTGCTATTGGGCGAAGTGCCGGGGCAGGATCTCCT
GTCATCTCACCTTGCTCCTGCCGAGAAAGTATCCATCATG
GCTGATGCAATGCGGCGGCTGCATACGCTTGATCCGGCTA
CCTGCCCATTCGACCACCAAGCGAAACATCGCATCGAGCG
AGCACGTACTCGGATGGAAGCCGGTCTTGTCGATCAGGAT
GATCTGGACGAAGAGCATCAGGGGCTCGCGCCAGCCGAAC
TGTTCGCCAGGCTCAAGGCGCGCATGCCCGACGGCGAGGA
TCTCGTCGTGACCCATGGCGATGCCTGCTTGCCGAATATC
ATGGTGGAAAATGGCCGCTTTTCTGGATTCATCGACTGTG
GCCGGCTGGGTGTGGCGGACCGCTATCAGGACATAGCGTT
GGCTACCCGTGATATTGCTGAAGAGCTTGGCGGCGAATGG
GCTGACCGCTTCCTCGTGCTTTACGGTATCGCCGCTCCCG
ATTCGCAGCGCATCGCCTTCTATCGCCTTCTTGACGAGTT
CTTCTGAGCGGGACTCTGGGGTTCGAAATGACCGACCAAG
CGACGCCCAACCTGCCATCACGAGATTTCGATTCCACCGC
CGCCTTCTATGAAAGGTTGGGCTTCGGAATCGTTTTCCGG
GACGCCGGCTGGATGATCCTCCAGCGCGGGGATCTCATGC
TGGAGTTCTTCGCCCACCCCCATGGGCAAATATTATACGC
AAGGCGACAAGGTGCTGATGCCGCTGGCGATTCAGGTTCA
TCATGCCGTTTGTGATGGCTTCCATGTCGGCAGAATGCTT
AATGAATTACAACAGTTTTTATGCATGCGCCCAATACGCA
AACCGCCTCTCCCCGCGCGTTGGCCGATTCATTAATGCAG
CTGGCACGACAGGTTTCCCGACTGGAAAGCGGGCAGTGAG
CGCAACGCAATTAATGTGAGTTAGCTCACTCATTAGGCAC
CCCAGGCTTTACACTTTATGCTTCCGGCTCGTATGTTGTG
TGGAATTGTGAGCGGATAACAATTTCACACAGGAAACAGC
TATGACCATGATTACGCCAAGCGCGCAATTAACCCTCACT
AAAGGGAACAAAAGCTGGGTACCGAGCCCGCCTAATGAGC
GGGCTTTTTTTTCGTCGACGCTCTCCCTTATGCGACTCCT
GCATTAGGAAGCAGCCCAGTAGTAGGTTGAGGCCGTTGAG
CACCGCCGCCGCAAGGAATGGTGCATGCAAGGAGATGGCG
CCCAACAGTCCCCCGGCCACGGGGCCTGCCACCATACCCA
CGCCGAAACAAGCGCTCATGAGCCCGAAGTGGCGAGCCCG
ATCTTCCCCATCGGTGATGTCGGCGATATAGGCGCCAGCA
ACCGCACCTGTGGCGCCGGTGATGCCGGCCACGATGCGTC
CGGCGTAGAGGATCATCCTGTTTTGGCGGATGAGATAAGA
TTTTCAGCCTGATACAGATTAAATCAGAACGCAGAAGCGG
TCTGATAAAACAGAATTTGCCTGGCGGCAGTAGCGCGGTG
GTCCCACCTGACCCCATGCCGAACTCAGAAGTGAAACGCC
GTAGCGCCGATGGTAGTGTGGGGTCTCCCCATGCGAGAGT
AGGGAACTGCCAGGCATCAAATAAAACGAAAGGCTCAGTC
GAAAGACTGGGCCTTTCGTTTTATCTGTTGTTTGTCGGTG
AACGCTCTCCTGAGTAGGACAAATCCGCCGGGAGCGGATT
TGAACGTTGCGAAGCAACGGCCCGGAGGGTGGCGGGCAGG
ACGCCCGCCATAAACTGCCAGGCATCAAATTAAGCAGAAG
GCCATCCTGACGGATGGCCTTTTTGCGTTTCTACAAACTC
TCCATGGAAGGGCGAATTGATCCAGATGACGGTATCGATA
AGCTTGATATCAACAAGTTTGTACAAAAAAGCAGGCTCCC
CGGAATTGCCAGCTGGGGCGCCCTCTGGTAAGGTTGGGAA
GCCCTGCAAATGAAAACTCCCGAAGACTGCACCGGCCTGG
CGGACATCCGCGAGGCCATCGACCGGATCGACCTGGATAT
CGTCCAGGCCCTCGGCCGCCGCATGGACTACGTCAAGGCG
GCGTCGCGCTTCAAGGCCAGCGAGGCGGCGATTCCGGCGC
CCGAGCGGGTCGCCGCGATGCTCCCCGAGCGCGCCCGCTG
GGCCGAGGAAAACGGACTCGACGCGCCCTTCGTCGAGGGA
CTGTTCGCGCAGATCATCCACTGGTACATCGCCGAGCAGA
TCAAGTACTGGCGCCAGACACGGGGTGCCGCATGAGCCGG
CTGGCGCCCCTGAGCCAGTGCCTGCACGCCTTGCGCGGCA
CCTTCGAGCGCGCCATCGGCCAGGCGCAGGCGCTCGATCG
TCCGGTGCTGGTGGCGGCATCGTTCGAGATCGACCCATTG
GACCCGCTACAGGTATTCGGTGCCTGGGACGACCGGCAAA
CGCCCTGCCTGTACTGGGAACAGCCCGAGCTGGCGTTCTT
CGCCTGGGGCTGCGCCCTGGAGCTGCAAGGCCACGGCGAA
CAGCGCTTCGCCCGGATCGAGGAAAACTGGCAATTGCTCT
GCGCCGACGCCGTGGTCGAGGGCCCGCTGGCGCCGCGCCT
GTGCGGCGGATTCCGCTTCGATCCGCGCGGCCCGCGCGAG
GAACACTGGCAAGCCTTCGCCGATGCCAGCCTGATGCTCG
CCGGCATCACCGTGCTGCGCGAGGGCGAACGCTACCGGGT
ACTCTGCCAACACCTGGCCAAGCCCGGCGAAGATGCCCTG
GCCCTGGCCGCCTACCACTGCTCGGCGCTACTGCGCCTGA
GGCAGCCGGCCAGACGCCGGCCCTCGGGGCCGACCGCTGG
CGCGCAGGGCGACGCTTCGGCGCAGGAGCGCAGGCAATGG
GAAGCCAAGGTGAGCGACGCGGTAAGCAGTGTCCGCCAGG
GACGCTTCGGCAAGGTCGTGCTGGCCCGCACCCAGGCCCG
GCCTCTCGGCGACATCGAGCCGTGGCAGGTCATCGAACAC
CTGCGTCTGCAACATGCCGACGCCCAGCTGTTCGCCTGTC
GCCGCGGCAACGCCTGCTTCCTCGGCGCCTCCCCGGAACG
CCTGGTCCGCATTCGCGCCGGCGAGGCACTCACCCATGCC
CTGGCCGGGACCATCGCCCGCGGCGGCGATGCCCAGGAAG
ATGCGCGGCTCGGACAGGCCCTGCTGGACAGCGCCAAGGA
CAGGCACGAACACCAGTTGGTGGTGGAGGCGATCCGTACG
GCCCTGGAACCCTTCAGCGAGGTGCTGGAAATCCCCGATG
CGCCCGGCCTGAAACGACTGGCGCGAGTCCAGCACCTGAA
CACGCCGATCCGCGCCCGCCTCGCTGACGCAGGCGGCATC
CTGCGGCTGCTACAAGCGCTGCATCCGACCCCCGCGGTGG
GCGGCTACCCACGCAGCGCGGCGCTGGACTACATCCGCCA
GCACGAAGGGATGGACCGCGGCTGGTACGCCGCGCCGCTG
GGCTGGCTCGACGGCGAAGGCAACGGCGATTTCCTGGTGG
CGCTGCGCTCGGCCCTGCTCACGCCGGGCCGGGGCTACCT
GTTCGCCGGCTGCGGTCTGGTAGGCGATTCGGAACCGGCC
CACGAGTATCGCGAAACCTGCCTTAAGCTCAGTGCCATGC
GGGAAGCTCTATCCGCCATAGGCGGCCTGGACGAAGTGCC
CTTGCAGCGCGGCGTCGCCTAATAAGGTTGGGAAGCCCTG
CAAATGGAAGTTGTGGAAGTTCTGCACATGAATGGTGGTA
ACGGTGATAGCAGCTATGCGAATAATAGCCTGGTTCAACA
AAAAGTTATCCTGATGACCAAGCCGATCACCGAGCAGGCG
ATGATTGACCTGTACAGCAGCCTGTTTCCGGAAACCCTGT
GCATCGCGGATCTGGGTTGCAGCCTGGGCGCGAACACCTT
CCTGGTGGTTAGCCAACTGGTGAAGATTGTTGAGAAAGAG
CGTAAGAAACACGGTTTTAAGAGCCCGGAGTTCTATTTTC
ACTTCAACGACCTGCCGGGTAACGATTTTAACACCCTGTT
CCAGAGCCTGGGCGCGTTTCAAGAGGACCTGCGTAAACAC
ATCGGCGAGAGCTTCGGCCCGTGCTTCTTTAGCGGTGTGC
CGGGCAGCTTTTACACCCGTCTGTTCCCGAGCAAGAGCCT
GCACTTCGTGTACAGCAGCTATAGCCTGATGTGGCTGAGC
CAGGTTCCGAACGGTATCGAGAACAACAAAGGCAACATTT
ATATGGCGCGTACCAGCCCGCTGAGCGTGATCAAGGCGTA
CTACAAGCAATACGAAATCGACTTCAGCAACTTCCTGAAG
TATCGTAGCGAGGAACTGATGAAGGGTGGCAAAATGGTTC
TGACCCTGCTGGGTCGTGAGAGCGAAGATCCGACCAGCAA
GGAGTGCTGCTACATCTGGGAACTGCTGGCGATGGCGCTG
AACAAACTGGTGGAGGAAGGCCTGATCAAAGAGGAGAAAG
TTGACGCGTTTAACATTCCGCAATACACCCCGAGCCCGGC
GGAAGTGAAGTATATCGTTGAGAAAGAAGGCAGCTTCACC
ATTAACCGTCTGGAAACCAGCCGTGTGCACTGGAACGCGA
GCAACAACGAGAAGAACGGTGGCTACAACGTTAGCCGTTG
CATGCGTGCGGTGGCGGAGCCGCTGCTGGTTAGCCACTTT
GACAAGGAACTGATGGATCTGGTGTTCCACAAATATGAGG
AAATTGTTAGCGATTGCATGAGCAAGGAGAACACCGAGTT
TATCAATGTTATTATTAGCCTGACCAAAATCAATTAACAC
CCAGCTTTCTTGTACAAAGTGGTTGATATCTACCCTTACG
ATGTTCCTGATTACGCATGAGGATCCGGTGATTGATTGAG
CAAGCTTTATGCTTGTAAACCGTTTTGTGAAAAAATTTTT
AAAATAAAAAAGGGGACCTCTAGGGTCCCCAATTAATTAG
TAATATAATCTATTAAAGGTCATTCAAAAGGTCATCCACC
GGATCAATTCCCCTGCTCGCGCAGGCTGGGTGCCAAGCTC
TCGGGTAACATCAAGGCCCGATCCTTGGAGCCCTTGCCCT
CCCGCACGATGATCGTGCCGTGATCGAAATCCAGATCCTT
GACCCGCAGTTGCAAACCCTCACTGATCCGCTCCAATTCG
CCCTATAGTGAGTCGTATTACGCGCGCTCACTGGCCGTCG
TTTTACAACGTCGTGACTGGGAAAACCCTGGCGTTACCCA
ACTTAATCGCCTTGCAGCACATCCCCCTTTCGCCAGCTGG
CGTAATAGCGAAGAGGCCCGCACCGATCGCCCTTCCCAAC
AGTTGCGCAGCCTGAATGGCGAATGGAAATTGTAAGCGTT
AATATTTTGTTAAAATTCGCGTTAAATTTTTGTTAAATCA
GCTCATTTTTTAACCAATAGGCCGTACTGCGATGAGTGGC
AGGGCGGGGCGTAATTTTTTTAAGGCAGTTATTGGTGCCC
TTAAACGCCTGGTTGCTACGCCTGAATAAGTGATAATAAG
CGGATGAATGGCAGAAATTCGAAAGCAAATTCGACCCGGT
CGTCGGTTCAGGGCAGGGTCGTTAAATAGCCGCTTATGTC
TATTGCTGGTTTACCGGTTTATTGACTACCGGAAGCAGTG
TGACCGTGTGCTTCTCAAATGCCTGAGGCCAGTTTGCTCA
GGCTCTCCCCGTGGAGGTAATAATTGACGATATGATCATT
TATTCTGCCTCCCAGAGCCTGATAAAAACGGTGAATCCGT
TAGCGAGGTGCCGCCGGCTTCCATTCAGGTCGAGGTGGCC
CGGCTCCATGCACCGCGACGCAACGCGGGGAGGCAGACAA
GGTATAGGGCGGCGAGGCGGCTACAGCCGATAGTCTGGAA
CAGCGCACTTACGGGTTGCTGCGCAACCCAAGTGCTACCG
GCGCGGCAGCGTGACCCGTGTCGGCGGCTCCAACGGCTCG
CCATCGTCCAGAAAACACGGCTCATCGGGCATCGGCAGGC
GCTGCTGCCCGCGCCGTTCCCATTCCTCCGTTTCGGTCAA
GGCTGGCAGGTCTGGTTCCATGCCCGGAATGCCGGGCTGG
CTGGGCGGCTCCTCGCCGGGGCCGGTCGGTAGTTGCTGCT
CGCCCGGATACAGGGTCGGGATGCGGCGCAGGTCGCCATG
CCCCAACAGCGATTCGTCCTGGTCGTCGTGATCAACCACC
ACGGCGGCACTGAACACCGACAGGCGCAACTGGTCGCGGG
GCTGGCCCCACGCCACGCGGTCATTGACCACGTAGGCCGA
CACGGTGCCGGGGCCGTTGAGCTTCACGACGGAGATCCAG
CGCTCGGCCACCAAGTCCTTGACTGCGTATTGGACCGTCC
GCAAAGAACGTCCGATGAGCTTGGAAAGTGTCTTCTGGCT
GACCACCACGGCGTTCTGGTGGCCCATCTGCGCCACGAGG
TGATGCAGCAGCATTGCCGCCGTGGGTTTCCTCGCAATAA
GCCCGGCCCACGCCTCATGCGCTTTGCGTTCCGTTTGCAC
CCAGTGACCGGGCTTGTTCTTGGCTTGAATGCCGATTTCT
CTGGACTGCGTGGCCATGCTTATCTCCATGCGGTAGGGGT
GCCGCACGGTTGCGGCACCATGCGCAATCAGCTGCAACTT
TTCGGCAGCGCGACAACAATTATGCGTTGCGTAAAAGTGG
CAGTCAATTACAGATTTTCTTTAACCTACGCAATGAGCTA
TTGCGGGGGGTGCCGCAATGAGCTGTTGCGTACCCCCCTT
TTTTAAGTTGTTGATTTTTAAGTCTTTCGCATTTCGCCCT
ATATCTAGTTCTTTGGTGCCCAAAGAAGGGCACCCCTGCG
GGGTTCCCCCACGCCTTCGGCGCGGCTCCCCCTCCGGCAA
AAAGTGGCCCCTCCGGGGCTTGTTGATCGACTGCGCGGCC
TTCGGCCTTGCCCAAGGTGGCGCTGCCCCCTTGGAACCCC
CGCACTCGCCGCCGTGAGGCTCGGGGGGCAGGCGGGCGGG
CTTCGCCCTTCGACTGCCCCCACTCGCATAGGCTTGGGTC
GTTCCAGGCGCGTCAAGGCCAAGCCGCTGCGCGGTCGCTG
CGCGAGCCTTGACCCGCCTTCCACTTGGTGTCCAACCGGC
AAGCGAAGCGCGCAGGCCGCAGGCCGGAGGCTTTTCCCCA
GAGAAAATTAAAAAAATTGATGGGGCAAGGCCGCAGGCCG
CGCAGTTGGAGCCGGTGGGTATGTGGTCGAAGGCTGGGTA
GCCGGTGGGCAATCCCTGTGGTCAAGCTCGTGGGCAGGCG
CAGCCTGTCCATCAGCTTGTCCAGCAGGGTTGTCCACGGG
CCGAGCGAAGCGAGCCAGCCGGTGGCCGCTCGCGGCCATC
GTCCACATATCCACGGGCTGGCAAGGGAGCGCAGCGACCG
CGCAGGGCGAAGCCCGGAGAGCAAGCCCGTAGGGCGCCGC
AGCCGCCGTAGGCGGTCACGACTTTGCGAAGCAAAGTCTA
GTGAGTATACTCAAGCATTGAGTGGCCCGCCGGAGGCACC
GCCTTGCGCTGCCCCCGTCGAGCCGGTTGGACACCAAAAG
GGAGGGGCAGGCATGGCGGCATACGCGATCATGCGATGCA
AGAAGCTGGCGAAAAT

[0272] SEQ ID NOs: 14-48 are provided in the sequence listing filed herewith, which is incorporated by reference as if expressed in its entirety herein. SEQ ID NOS: 14-48 provide genome sequences of bacteria isolated from Dog53 “Dog53 isolates”.

[0273] Various modifications and variations of the described methods, pharmaceutical compositions, and kits of the invention will be apparent to those skilled in the art without departing from the scope and spirit of the invention. Although the invention has been described in connection with specific embodiments, it will be understood that it is capable of further modifications and that the invention as claimed should not be unduly limited to such specific embodiments. Indeed, various modifications of the described modes for carrying out the invention that are obvious to those skilled in the art are intended to be within the scope of the invention. This application is intended to cover any variations, uses, or adaptations of the invention following, in general, the principles of the invention and including such departures from the present disclosure come within known customary practice within the art to which the invention pertains and may be applied to the essential features herein before set forth.

[0274] Further attributes, features, and embodiments of the present invention can be understood by reference to the following numbered aspects of the disclosed invention. Reference to disclosure in any of the preceding aspects is applicable to any preceding numbered aspect and to any combination of any number of preceding aspects, as recognized by appropriate antecedent disclosure in any combination of preceding aspects that can be made. The following numbered aspects are provided:

[0275] 1. An engineered bacterium or population thereof, wherein the engineered bacterium comprises:
[0276] one or more polynucleotides that each encode one or more enzymes capable of catalyzing one or more reactions to produce a volatile compound, one or more polypeptides produced therefrom, or both
[0277] and wherein the engineered bacterium is of a strain that is a commensal bacterium strain found in the oral cavity of a mammal, optionally a canine or a feline.

[0278] 2. The engineered bacterium or population thereof of aspect 1, wherein the one or more enzymes is/are
[0279] a. a methyltransferase that catalyzes the production of methyl salicylate from salicylic acid;
[0280] b. an isochorismate synthase;
[0281] c. an ischorisomate-pyruvate lyase;
[0282] d. is an alcohol acetyl transferase that is capable of condensing isoamyl alcohol and acetyl CoA into isoamyl acetate; or
[0283] e. any combination thereof.

[0284] 3. The engineered bacterium or population thereof of any one of aspects 1-2, wherein the one or more polynucleotides each encode a methyltransferase that catalyzes the production of methyl salicylate from salicylic acid, an isochorismate synthase, an ischorisomate-pyruvate lyase, or any combination thereof.

[0285] 4. The engineered bacterium or population thereof of any one of aspects 1-3, wherein the volatile compound produced has a mint odor.

[0286] 5. The engineered bacterium or population thereof of any one of aspects 1-4, wherein the one or more polynucleotides each comprise a PCHBA gene or mRNA, a BSMT1 gene or mRNA, or any combination thereof.

[0287] 6. The engineered bacterium or population thereof any one of aspects 1-5, wherein at least one of the one or more polynucleotides encodes an alcohol acetyl transferase that is capable of condensing isoamyl alcohol and acetyl CoA into isoamyl acetate.

[0288] 7. The engineered bacterium or population thereof any one of aspects 1-6, wherein the engineered bacterium or population thereof produces a fruity odor.

[0289] 8. The engineered bacterium or population thereof of aspect 7, wherein the fruity odor is a banana odor or a pear odor.

[0290] 9. The engineered bacterium or population thereof any one of aspects 1-8, wherein at least one of the one or more polynucleotides comprises an ATF gene or mRNA, an BAT2 gene or mRNA, a THI3 gene or mRNA, or any combination thereof.

[0291] 10. The engineered bacterium or population thereof of aspect 9, wherein the ATF gene or mRNA is an ATF1 gene or mRNA or an ATF2 gene or mRNA.

[0292] 11. The engineered bacterium or population thereof any one of aspects 1-10, wherein one or more of the one or more polynucleotides each comprise a gene or mRNA independently selected from a BSTM1 gene, a BSTM1 mRNA, an ATF gene, an ATF mRNA, a PCHBA gene, a PCHBA mRNA, a BAT2 gene, a BAT2 mRNA, a THI3 gene, a THI3 mRNA, or any combination thereof.

[0293] 12. The engineered bacterium or population thereof of aspect 11, wherein the ATF gene or ATF mRNA is an ATF1 gene or mRNA or an ATF2 gene or mRNA.

[0294] 13. The engineered bacterium or population thereof of aspect 11, wherein
[0295] a. the BSTM1 gene or mRNA has a polynucleotide sequence that is about 90-100 percent identical to any one of SEQ ID NO: 2, 8, 11, or 13;
[0296] b. the PCHBA gene or mRNA has a polynucleotide sequence that is about 90-100 percent identical to SEQ ID NO: 1 or 10;
[0297] c. the ATF gene or mRNA has a polynucleotide sequence that is about 90-100 percent identical to SEQ ID NO: 49 or 51;
[0298] d. the BAT2 gene or mRNA has a polynucleotide sequence that is about 90-100 percent identical to SEQ ID NO: 53;
[0299] e. the THI3 gene or mRNA has a polynucleotide sequence that is about 90-100 percent identical to SEQ ID NO: 55

[0300] 14. The engineered bacterium of any one of aspects 1-13, wherein one or more of the one or more polynucleotides has a sequence that is about 40-100% identical to any one of SEQ ID NOs.: 1, 2, 8, 10-11, 13, 49, 51, 53, or 55 or any region therein of at least 20 nucleotides.

[0301] 15. The engineered bacterium of any one of aspects 1-14, wherein one or more of the one or more polynucleotides encodes a polypeptide having a sequence that is about 40 to 100% identical to any one of SEQ ID NOS.: 3-7, 9, 50, 52, 54, or 56.

[0302] 16. The engineered bacterium or population thereof of any one of aspects 1-15, further comprising one or more expression vectors, wherein the one or more expression vectors comprise the one or more polynucleotides.

[0303] 17. The engineered bacterium or population thereof any one of aspects 1-16, wherein the engineered bacterium is from genus selected from Escherichia, Pseudomonas, Brevundimonas, Xanthomonas, Deinococcus, or Pedobacter.

[0304] 18. The engineered bacterium or population thereof any one of aspects 1-17, wherein the engineered bacterium is an isolate of a commensal canine oral bacterium or population thereof.

[0305] 19. The engineered bacterium or population thereof any one of aspects 1-18, wherein the commensal canine oral bacterium or population thereof is of the genus Pseudomonas.

[0306] 20. The engineered bacterium or population thereof any one of aspects 1-19, wherein the engineered bacterium is an isolated commensal canine oral bacterium or population thereof comprising a genome that comprises a sequence that is 90-100 percent identical to any one or more of SEQ ID NOs: 12 or 14-48.

[0307] 21. An expression vector capable of expressing a BSTM1 polypeptide, a PCHB polypeptide, a PCHA polypeptide, an ATF1 polypeptide, an ATF2 polypeptide, BAT2 polypeptide, a THI3 polypeptide or any combination thereof comprising:
[0308] a. a BSTM1 polynucleotide comprising a sequence that is about 90-100 percent identical to any one of SEQ ID NO: 2, 8, 11, or 13;
[0309] b. a PCHBA polynucleotide comprising a sequence that is about 90-100 percent identical to SEQ ID NO: 1 or 10;
[0310] c. an ATF polynucleotide comprising a sequence that is about 90-100 percent identical to SEQ ID NO: 49 or 51;
[0311] d. a BAT2 polynucleotide comprising a sequence that is about 90-100 percent identical to SEQ ID NO: 53;
[0312] e. a THI3 polynucleotide comprising a sequence that is about 90-100 percent identical to SEQ ID NO: 55;
[0313] f. or any combination thereof.

[0314] 22. The expression vector of aspect 21, wherein (a), (b), (c), (d), (e), or (0 is/are operatively coupled one or more regulatory elements.

[0315] 23. The expression vector of any one of aspects 21-22, wherein the expression vector comprises a sequence that is about 90-100 percent identical to SEQ ID NO: 13.

[0316] 24. A formulation comprising: an engineered bacterium of any one of aspects 1-20, an expression vector of any one of aspects 21-23, or both, optionally wherein the engineered bacterium comprises the expression vector and a liquid, semi-solid, or solid carrier.

[0317] 25. The formulation of aspect 24, wherein the formulation is a foodstuff suitable for a mammal.

[0318] 26. The formulation of any one of aspects 24-25, wherein the mammal is a non-human animal.

[0319] 27. The formulation of any one of aspects 24-26, wherein the mammal is a canine or a feline.

[0320] 28. The formulation of any one of aspects 24-27, wherein the formulation is a liquid solution or semi-solid suitable for administration to the oral cavity of a mammal.

[0321] 29. The formulation of any one of aspects 24-28, wherein the mammal is a non-human animal.

[0322] 30. The formulation of any one of aspects 24-29, wherein the mammal is a canine or a feline.

[0323] 31. The formulation of any one of aspects 24-30, wherein the formulation is a formed object that is configured to be chewed on by a mammal.

[0324] 32. The formulation of aspect 31, wherein the mammal is a non-human animal.

[0325] 33. The formulation of any one of aspects 31-32, wherein the mammal is a canine or a feline.

[0326] 34. A method of improving the breath of a mammal, the method comprising:

[0327] administering an engineered bacterium or population thereof of any one of aspects 1-20, an expression vector of any one of aspects 21-23, or both, or a formulation thereof to the mammal.

[0328] 35. The method of aspect 34, further comprising allowing the engineered bacterium or population thereof to produce a volatile compound.

[0329] 36. The method of any one of aspects 34-35, wherein the mammal is a non-human animal.

[0330] 37. The method of any one of aspects 34-36, wherein the mammal is canine or a feline.

[0331] 38. An isolated commensal canine oral bacterium or population thereof comprising: a genome comprising a sequence that is 90-100 percent identical to any one or more of SEQ ID NOs: 12 or 14-48.

What is claimed is:

1. An engineered bacterium or population thereof, wherein the engineered bacterium comprises:
one or more polynucleotides that each encode one or more enzymes capable of catalyzing one or more reactions to produce a volatile compound, one or more polypeptides produced therefrom, or both
and wherein the engineered bacterium is of a strain that is a commensal bacterium strain found in the oral cavity of a mammal, optionally a canine or a feline.

2. The engineered bacterium or population thereof of claim 1, wherein the one or more enzymes is/are
a. a methyltransferase that catalyzes the production of methyl salicylate from salicylic acid;
b. an isochorismate synthase;
c. an ischorisomate-pyruvate lyase;
d. is an alcohol acetyl transferase that is capable of condensing isoamyl alcohol and acetyl CoA into isoamyl acetate; or
e. any combination thereof.

3. The engineered bacterium or population thereof of claim 1, wherein the one or more polynucleotides each encode a methyltransferase that catalyzes the production of methyl salicylate from salicylic acid, an isochorismate synthase, an ischorisomate-pyruvate lyase, or any combination thereof.

4. The engineered bacterium or population thereof of claim 3, wherein the volatile compound produced has a mint odor.

5. The engineered bacterium or population thereof of claim 3, wherein the one or more polynucleotides each comprise a PCHBA gene or mRNA, a BSMT1 gene or mRNA, or any combination thereof.

6. The engineered bacterium or population thereof of claim 1, wherein at least one of the one or more polynucleotides encodes an alcohol acetyl transferase that is capable of condensing isoamyl alcohol and acetyl CoA into isoamyl acetate.

7. The engineered bacterium or population thereof of claim 6, wherein the engineered bacterium or population thereof produces a fruity odor.

8. The engineered bacterium or population thereof of claim 7, wherein the fruity odor is a banana odor or a pear odor.

9. The engineered bacterium or population thereof of claim 6, wherein at least one of the one or more polynucleotides comprises an ATF gene or mRNA, an BAT2 gene or mRNA, a THI3 gene or mRNA, or any combination thereof.

10. The engineered bacterium or population thereof of claim 9, wherein the ATF gene or mRNA is an ATF1 gene or mRNA or an ATF2 gene or mRNA.

11. The engineered bacterium or population thereof of claim 1, wherein one or more of the one or more polynucleotides each comprise a gene or mRNA independently selected from a BSTM1 gene, a BSTM1 mRNA, an ATF gene, an ATF mRNA, a PCHBA gene, a PCHBA mRNA, a BAT2 gene, a BAT2 mRNA, a THI3 gene, a THI3 mRNA, or any combination thereof.

12. The engineered bacterium or population thereof of claim 11, wherein the ATF gene or ATF mRNA is an ATF1 gene or mRNA or an ATF2 gene or mRNA.

13. The engineered bacterium or population thereof of claim 11, wherein
a. the BSTM1 gene or mRNA has a polynucleotide sequence that is about 90-100 percent identical to any one of SEQ ID NO: 2, 8, 11, or 13;
b. the PCHBA gene or mRNA has a polynucleotide sequence that is about 90-100 percent identical to SEQ ID NO: 1 or 10;
c. the ATF gene or mRNA has a polynucleotide sequence that is about 90-100 percent identical to SEQ ID NO: 49 or 51;
d. the BAT2 gene or mRNA has a polynucleotide sequence that is about 90-100 percent identical to SEQ ID NO: 53;
e. the THI3 gene or mRNA has a polynucleotide sequence that is about 90-100 percent identical to SEQ ID NO: 55

14. The engineered bacterium of claim 1, wherein one or more of the one or more polynucleotides has a sequence that is about 40-100% identical to any one of SEQ ID NOs.:
1, 2, 8, 10-11, 13, 49, 51, 53, or 55 or any region therein of at least 20 nucleotides.

15. The engineered bacterium of claim 1, wherein one or more of the one or more polynucleotides encodes a polypeptide having a sequence that is about 40 to 100% identical to any one of SEQ ID NOS.: 3-7, 9, 50, 52, 54, or 56.

16. The engineered bacterium or population thereof of claim 1, further comprising one or more expression vectors, wherein the one or more expression vectors comprise the one or more polynucleotides.

17. The engineered bacterium or population thereof of claim 1, wherein the engineered bacterium is from genus selected from Escherichia, Pseudomonas, Brevundimonas, Xanthomonas, Deinococcus, or Pedobacter.

18. The engineered bacterium or population thereof of claim 1, wherein the engineered bacterium is an isolate of a commensal canine oral bacterium or population thereof.

19. The engineered bacterium or population thereof of claim 18, wherein the commensal canine oral bacterium or population thereof is of the genus Pseudomonas.

20. The engineered bacterium or population thereof of claim 1, wherein the engineered bacterium is an isolated commensal canine oral bacterium or population thereof comprising a genome that comprises a sequence that is 90-100 percent identical to any one or more of SEQ ID NOs: 12 or 14-48.

21. An expression vector capable of expressing a BSTM1 polypeptide, a PCHB polypeptide, a PCHA polypeptide, an ATF1 polypeptide, an ATF2 polypeptide, BAT2 polypeptide, a THI3 polypeptide or any combination thereof comprising:
a. a BSTM1 polynucleotide comprising a sequence that is about 90-100 percent identical to any one of SEQ ID NO: 2, 8, 11, or 13;
b. a PCHBA polynucleotide comprising a sequence that is about 90-100 percent identical to SEQ ID NO: 1 or 10;
c. an ATF polynucleotide comprising a sequence that is about 90-100 percent identical to SEQ ID NO: 49 or 51;
d. a BAT2 polynucleotide comprising a sequence that is about 90-100 percent identical to SEQ ID NO: 53;
e. a THI3 polynucleotide comprising a sequence that is about 90-100 percent identical to SEQ ID NO: 55;
f. or any combination thereof.

22. The expression vector of claim 21, wherein (a), (b), (c), (d), (e), or (0 is/are operatively coupled one or more regulatory elements.

23. The expression vector of claim 22, wherein the expression vector comprises a sequence that is about 90-100 percent identical to SEQ ID NO: 13.

24. A formulation comprising:
an engineered bacterium of any one of claims 1-20, an expression vector of any one of claims 21-23, or both, optionally wherein the engineered bacterium comprises the expression vector and
a liquid, semi-solid, or solid carrier.

25. The formulation of claim 24, wherein the formulation is a foodstuff suitable for a mammal.

26. The formulation of claim 25, wherein the mammal is a non-human animal.

27. The formulation of claim 26, wherein the mammal is a canine or a feline.

28. The formulation of claim 24, wherein the formulation is a liquid solution or semi-solid suitable for administration to the oral cavity of a mammal.

29. The formulation of claim 28, wherein the mammal is a non-human animal.

30. The formulation of claim 29, wherein the mammal is a canine or a feline.

31. The formulation of claim 24, wherein the formulation is a formed object that is configured to be chewed on by a mammal.

32. The formulation of claim 31, wherein the mammal is a non-human animal.

33. The formulation of claim 32, wherein the mammal is a canine or a feline.

34. A method of improving the breath of a mammal, the method comprising:
administering an engineered bacterium or population thereof of any one of claims 1-20, an expression vector of any one of claims 21-23, or both, or a formulation thereof to the mammal.

35. The method of claim 34, further comprising allowing the engineered bacterium or population thereof to produce a volatile compound.

36. The method of claim 35, wherein the mammal is a non-human animal.

37. The method of claim 36, wherein the mammal is canine or a feline.

38. An isolated commensal canine oral bacterium or population thereof comprising:
a genome comprising a sequence that is 90-100 percent identical to any one or more of SEQ ID NOs: 12 or 14-48.

The application's sequence listing, which the Patent Office published only in electronic form, follows.

SEQUENCE LISTING (58 sequences)

SEQ ID NO: 1 - DNA, 4662 bp, Pseudomonas aeruginosa
atcggcctgtggcggagcaatgatggtgatggtcatcaggttttcctgtagcccgggcgctgccgacgcggcgacgccttcctggatacgtgggggcaggggactttttagcggagatggacaaagcgccctgcactccgcccctgcagcgaatgaaaaagccccgcaatcgaaaggcgcgggcttgcgcggtccctgccgcccgccaatgataataaatctcatttcccaacaatggcaatcgaccgcatccacggagatcgcatgacttcctcgcccgtcaccccatcggccgtcgacgacgcccccgactggcccgccgccttcgtccgccgctatctcgacgccggccactggcaggaccagagcttcgccgaagccctggccaccagcgccgcgcatccgcggcggatcgcgctctgcgacgacgaccagcggctcagctatgccgacctgctccagcgctgccgccgcctggcagccggactgcgccaggccggcctcgcacatggcgacacggtagtgctgcacctgcccaacggcatcgccttcgtcgagacctgcttcgccctgttccagctcggcgtacgcccggtgctcgccctccccgcccatcgccagcatgagatcagcggtttctgtcgcttcgccgaggccaaggcctacatcggcgccgaacggatcgacggcttcgacccacggccgatggcccgtgagctgctcgccagcggcgcctgccggatggcgctgatccacggcgaagccgaggcgccgctgcaagcgctggcaccgctgtaccaggccgacgcgctggaagactgcgccgcccgcgccgaggatatcgcctgcttccagttgtccggcggcaccaccggcacgccgaagctgattccccggcgtcatcgcgagtatctctacaacgtccgcgccagcgccgaggtctgcggcttcgacgagcacacggtgtacctcaccggcttgccgatggcgcacaacttcactctctgctgccccggagtgatcggcacgctgctggccagcggcgcggtggtggtcagccagcgcgccgatcccgagcattgcttcgccctgatcgcccgtgaacgggtcacccacaccgccctggtaccgccgctggcgatgctctggctggatgcccaggaaagccgccgcgccgatctatccagcctgcgtctgctccaggtcggcggctccaggctcggcagcagtgccgcgcaacgcgtcgaaccggtgctcggctgccagttgcaacaggtgctgggaatggccgaggggctgatctgctacacccgcctggacgatccgcccgaacgcgtgctgcatacccagggccggccgctgtcgccggacgacgaagtgcgggtggtcgacgccgagggccgcgaggtcggccccggcgaggtgggcgaactgaccgtgcgcggtccctacaccatccgcggctactaccgcctgcctgaacacaacgccaaggccttcagcgcggacggcttctaccgcaccggcgaccgggtcagccgcgacaaggacggctacctggtggtggagggccgcgacaaggaccagatcaaccgcggcggcgagaagatcgccgcggaagaggtggagaacctgctgatagcccatccgcaggtgcacgacgccaccgtcgtggcgatgcccgacagcctgctcggcgagcgcacctgcgccttcgtcatcccgcgccagccggccgcctcggcgctgaagctgaagcaatacctgcacgcctgcgggctggccgcgttcaaggtgccggaccgcatcgagctggtcccggccttcccccaaaccggcatcggcaagatcagcaagaaggacctgcgcgagcgcctgcgccgcgagctggaggcccgcgcatgagcgccgcctgggtccggccgttccgcctgacgccgatgccgcgcctgcgcctggcctgcttcccccatgcaggcggcagcgccagcttcttccgtagctggagcgaacgcctgccgccagacatcgacctgcttgccctgcagtacccgggtcgcgaggaccgcttcaacgaggcgccggccacccgcctggaggacctcgccgacggcgccgccctcgccctgcgcgatttcgccgacgcgcccctggcgctgttcggccacagtctcggcgcggcgctggcctacgaaaccgccctgcgcctggaaacgccggccgccctgcgccacctgttcgtctccgcccatccggcaccgcaccggcaacgcggcggcgcgttgcaccgcggcgacgaggcggcgctgctggaggacgtccgccgccagggtggcgccagcgagctactcgaggacgccgacctgcgcgcgctgttcctgccgatcctgcgcgccgactaccaggcgatcgagacctaccgacgggcgcagcccatcgccctggcctgcgccctcgacgtcctcctcggcgagcacgacgaggaagtcagcgccgccgaggcgcaggcctggagcgacgccagccggactcccgccaggctgcggcgctttcctggcggccacttctacctgagcgaggggcgcgacgcggtgatcgagcacctgctgcgccgcctcgcacatcccgacgccctttcccgagaggttgcatgatgaaaactcccgaagactgcaccggcctggcggacatccgcgaggccatcgaccggatcgacctggatatcgtccaggccctcggccgccgcatggactacgtcaaggcggcgtcgcgcttcaaggccagcgaggcggcgattccggcgcccgagcgggtcgccgcgatgctccccgagcgcgcccgctgggccgaggaaaacggactcgacgcgcccttcgtcgagggactgttcgcgcagatcatccactggtacatcgccgagcagatcaagtactggcgccagacacggggtgccgcatgagccggctggcgcccctgagccagtgcctgcacgccttgcgcggcaccttcgagcgcgccatcggccaggcgcaggcgctcgatcgtccggtgctggtggcggcatcgttcgagatcgacccattggacccgctgcaggtattcggtgcctgggacgaccggcaaacgccctgcctgtactgggaacagcccgagctggcgttcttcgcctggggctgcgccctggagctgcaaggccacggcgaacagcgcttcgcccggatcgaggaaaactggcaattgctctgcgccgacgccgtggtcgagggcccgctggcgccgcgcctgtgcggcggattccgcttcgatccgcgcggcccgcgcgaggaacactggcaagccttcgccgatgccagcctgatgctcgccggcatcaccgtgctgcgcgagggcgaacgctaccgggtactctgccaacacctggccaagcccggcgaagatgccctggccctggccgcctaccactgctcggcgctactgcgcctgaggcagccggccagacgccggccctcggggccgaccgctggcgcgcagggcgacgcttcggcgcaggagcgcaggcaatgggaagccaaggtgagcgacgcggtaagcagtgtccgccagggacgcttcggcaaggtcgtgctggcccgcacccaggcccggcctctcggcgacatcgagccgtggcaggtcatcgaacacctgcgtctgcaacatgccgacgcccagctgttcgcctgtcgccgcggcaacgcctgcttcctcggcgcctccccggaacgcctggtccgcattcgcgccggcgaggcactcacccatgccctggccgggaccatcgcccgcggcggcgatgcccaggaagatgcgcggctcggacaggccctgctggacagcgccaaggacaggcacgaacaccagttggtggtggaggcgatccgtacggccctggaacccttcagcgaggtgctggaaatccccgatgcgcccggcctgaaacgactggcgcgagtccagcacctgaacacgccgatccgcgcccgcctcgctgacgcaggcggcatcctgcggctgctacaagcgctgcatccgacccccgcggtgggcggctacccacgcagcgcggcgctggactacatccgccagcacgaagggatggaccgcggctggtacgccgcgccgctgggctggctcgacggcgaaggcaacggcgatttcctggtggcgctgcgctcggccctgctcacgccgggccggggctacctgttcgccggctgcggtctggtaggcgattcggaaccggcccacgagtatcgcgaaacctgccttaagctcagtgccatgcgggaagctctatccgccataggcggcctggacgaagtgcccttgcagcgcggcgtcgcctgaaaacgaagaccccctgcggcccgagggcggcagggggtcttcgaaggtctgcccgtggcgcggacgggccgccgcaagggcgtcgcttagaacggaatgtcgtcgtcgaagctgtcgtagtcctgggccggttgcggcgccggttgctgctgcggggccggacgcgactgctgctgcggggcctgctgcgggcgctgcatgggctcgcggggcgcgctgcgaatcgtcgccggaggggcggccgccgagcaactgcatgttgccgttgatgtcgac

SEQ ID NO: 2 - DNA, 1473 bp, Petunia x hybrida
aaagatcaagaaagagatactcatagcaagaagaaatggaagttgttgaagttcttcacatgaatggaggaaatggagacagtagctatgcaaacaattctttggttcagcaaaaggtgattctcatgacaaagccaataactgagcaagccatgattgatctctacagcagcctctttccagaaaccttatgcattgcagatttgggttgttctttgggagctaacactttcttggtggtctcacagcttgttaaaatagtagaaaaagaacgaaaaaagcatggttttaagtctccagagttttattttcacttcaatgatcttcctggcaatgattttaatacactttttcagtcactgggggcatttcaagaagatttgagaaagcatataggggaaagctttggtccatgttttttcagtggagtgcctggttcattttatactagacttttcccttccaaaagtttacattttgtttactcctcctacagtctcatgtggctatctcaggtgcctaatgggattgaaaataacaagggaaacatttacatggcaagaacaagccctctaagtgttattaaagcatactacaagcaatatgaaatagatttttcaaattttctcaagtaccgttcagaggaattgatgaaaggtggaaagatggtgttaacactcctaggtagagaaagtgaggatcctactagcaaagaatgctgttacatttgggagcttctagccatggccctcaataagttggttgaagagggattgataaaagaagagaaagtagatgcattcaatattcctcaatacacaccatcaccagcagaagtaaagtacatagttgagaaggaaggatcattcaccattaatcgcttggaaacatcaagagttcattggaatgcttctaataatgagaagaatggtggttacaatgtgtcaaggtgcatgagagctgtggctgagcctttgcttgtcagccactttgacaaggaattgatggatttagtgttccacaagtacgaagagattgtttctgattgcatgtccaaagagaatactgagtttataaatgtcatcatctccttgaccaaaataaattaaggcactcaatgtctattttcggtcgaaatccggtggtcgaaaaacccgaatattttagtagtgatccgatataaactacatataaatattacaatagattaaaatacatatatgtttaataagttcacgcacatattgaattatcttattcaaatgtttaatacgactatgctgaatgtaccaattctctattgttgttttgcacttcataggtggtcgtggtcgaggtgctaattatttatctagtcattgtcttgtacactaaaggttctgtaccacagggaattatctcatgcatgtctttattatatatttaaatggataagttactgccttgattttaaaaaaaaaaaaaaaaaaaaaa

SEQ ID NO: 3 - protein, 476 aa, Pseudomonas aeruginosa
MSRLAPLSQCLHALRGTFERAIGQAQALDRPVLVAASFEIDPLDPLQVFGAWDDRQTPCLYWEQPELAFFAWGCALELQGHGEQRFARIEENWQLLCADAVVEGPLAPRLCGGFRFDPRGPREEHWQAFADASLMLAGITVLREGERYRVLCQHLAKPGEDALALAAYHCSALLRLRQPARRRPSGPTAGAQGDASAQERRQWEAKVSDAVSSVRQGRFGKVVLARTQARPLGDIEPWQVIEHLRLQHADAQLFACRRGNACFLGASPERLVRIRAGEALTHALAGTIARGGDAQEDARLGQALLDSAKDRHEHQLVVEAIRTALEPFSEVLEIPDAPGLKRLARVQHLNTPIRARLADAGGILRLLQALHPTPAVGGYPRSAALDYIRQHEGMDRGWYAAPLGWLDGEGNGDFLVALRSALLTPGRGYLFAGCGLVGDSEPAHEYRETCLKLSAMREALSAIGGLDEVPLQRGVA

SEQ ID NO: 4 - protein, 102 aa, Pseudomonas aeruginosa
MMKTPEDCTGLADIREAIDRIDLDIVQALGRRMDYVKAASRFKASEAAIPAPERVAAMLPERARWAEENGLDAPFVEGLFAQIIHWYIAEQIKYWRQTRGAA

SEQ ID NO: 5 - protein, 476 aa, Pseudomonas aeruginosa; identical to SEQ ID NO: 3

SEQ ID NO: 6 - protein, 102 aa, Pseudomonas aeruginosa; identical to SEQ ID NO: 4

SEQ ID NO: 7 - protein, 357 aa, Petunia x hybrida
MEVVEVLHMNGGNGDSSYANNSLVQQKVILMTKPITEQAMIDLYSSLFPETLCIADLGCSLGANTFLVVSQLVKIVEKERKKHGFKSPEFYFHFNDLPGNDFNTLFQSLGAFQEDLRKHIGESFGPCFFSGVPGSFYTRLFPSKSLHFVYSSYSLMWLSQVPNGIENNKGNIYMARTSPLSVIKAYYKQYEIDFSNFLKYRSEELMKGGKMVLTLLGRESEDPTSKECCYIWELLAMALNKLVEEGLIKEEKVDAFNIPQYTPSPAEVKYIVEKEGSFTINRLETSRVHWNASNNEKNGGYNVSRCMRAVAEPLLVSHFDKELMDLVFHKYEEIVSDCMSKENTEFINVIISLTKIN

SEQ ID NO: 8 - DNA, 1468 bp, Arabidopsis thaliana
cttgatgaagttccctctctctataaattgaagtgtgtgagatgcatcatccatacacaacatcttccatcttccgataattctcctttagtcttataatcactaataagtacgataattgaaatggatccaagattcatcaacaccattccttccttgaggtatgatgatgataagtgtgatgatgaatatgcgtttgtgaaagctctatgtatgagtggtggagatggtgccaacagttactccgccaattctcgccttcagaaaaaagttttatcaatggccaaaccagtcttggtaagaaacacagaagaaatgatgatgaacttagactttcctacgtacatcaaagttgctgaattgggttgttcttcgggacaaaactcttttttggctatctttgagatcatcaacaccattaatgtgttgtgccaacatgtgaacaaaaactcaccagagatcgattgttgtctaaacgatctcccggaaaatgatttcaacacgacctttaagttcgtacctttcttcaacaaggagctcatgatcacaaacaaatcatcatgtttcgtctatggagctccaggttccttctattccaggctcttctctcgcaatagcctccatttaatacattcctcttatgcactccattggctctctaaggttcccgagaaacttgagaataataaggggaatctgtacataacaagttcaagtcctcaaagtgcatacaaggcctacttgaatcaattccaaaaagacttcaccatgtttctaaggttacgttctgaagaaattgtctctaatggacgtatggttctcaccttcatcggaagaaacactcttaacgatccattgtatagagattgttgtcacttttggacattgctatcaaactctctccgtgacctagtctttgagggtcttgtgagtgagtcaaagctggacgcattcaacatgccgttttatgatccgaacgtacaagaactcaaagaagtgatacaaaaagagggctcttttgaaatcaatgaattggagtcacatggatttgatcttggtcactactacgaagaagatgactttgaagcaggacgcaatgaagctaatggcataagagctgttagtgaaccaatgctcattgctcattttggagaagaaattatcgataccttgttcgataagtatgcataccatgtgactcaacatgccaactgcaggaacaaaacgactgtcagtcttgtcgtttccttgactaagaagtaagaagtaatcaacttctgtcatgttgctctatttgtatttatttactactgttattttgtttccttgaataaatttcaacacctgccattcaatgtgatgatgtggagctagtattggaaaaaagtgtgactgtaatatattatggtaaatttggtaaatgatttatttcctgcaaaagttgcagatactgctttcaagtatgaag

SEQ ID NO: 9 - protein, 379 aa, Arabidopsis thaliana
MDPRFINTIPSLRYDDDKCDDEYAFVKALCMSGGDGANSYSANSRLQKKVLSMAKPVLVRNTEEMMMNLDFPTYIKVAELGCSSGQNSFLAIFEIINTINVLCQHVNKNSPEIDCCLNDLPENDFNTTFKFVPFFNKELMITNKSSCFVYGAPGSFYSRLFSRNSLHLIHSSYALHWLSKVPEKLENNKGNLYITSSSPQSAYKAYLNQFQKDFTMFLRLRSEEIVSNGRMVLTFIGRNTLNDPLYRDCCHFWTLLSNSLRDLVFEGLVSESKLDAFNMPFYDPNVQELKEVIQKEGSFEINELESHGFDLGHYYEEDDFEAGRNEANGIRAVSEPMLIAHFGEEIIDTLFDKYAYHVTQHANCRNKTTVSLVVSLTKK

SEQ ID NO: 10 - DNA, 1847 bp, Artificial Sequence
  Synthetic phcBA polypeptide sequence with Gateway cloning vector recombinase sites
ggggacaagtttgtacaaaaaagcaggctccccggaattgccagctggggcgccctctggtaaggttgggaagccctgcaaatgaaaactcctgaagattgcaccggactggcagatatccgtgaggcaatcgatcggatcgatctggatatcgtacaggcactcggacgtcgtatggattacgtaaaggcagcatcgcgtttcaaggcaagcgaggcagcaataccagcacctgagcgggtagcagcaatgctccctgagcgtgcacgttgggcagaggaaaacggactcgatgcacctttcgtagagggactgttcgcacagatcatccactggtacatcgcagagcagatcaagtactggcgtcagacacggggtgcagcatgagccggctggcacctctgagccagtgcctgcacgcattgcgtggaaccttcgaacgtgcaatcggacaggcacaggcactagatcgtccggtgctggtggcagcatcgttcgaaatcgatccattggatccgctacaggtattcggtgcatgggatgatcggcaaacgccttgcctgtactgggaacagcctgaactggcattcttcgcatggggatgcgcactggaactgcaaggacacggagaacagcgtttcgcacggatcgaagaaaactggcaattgctatgcgcagatgcagtggtagaaggaccgctggcaccgcgtctgtgcggaggattccgtttcgatccgcgtggaccgcgtgaagaacactggcaagcattcgcagatgcaagcctgatgctagcaggaatcaccgtgctgcgtgaaggagaacgttaccgggtactatgccaacacctggcaaagcctggagaagatgcactggcactggcagcataccattgctcggcactactgcgtctgaggcagccggcaagacgtcggccatcgggtccgaccgctggagcacagggagatgcttcggcacaggaacgtaggcaatgggaagcaaaggtgagcgatgcagtaagcagtgtacgtcagggacgtttcggaaaggtagtactggcacgaacccaggcacggcctctaggagatatcgaaccgtggcaggtaatcgaacacctgcgtctgcaacatgcagatgcacagctgttcgcatgtcgtcgtggaaacgcatgcttcctaggagcctccccggaacgtctggtacgtattcgtgcaggagaagcactaacccatgcactggcaggtaccatcgcacgtggaggagatgcacaggaagatgcacggctaggacaggcactgctggatagcgcaaaggataggcacgaacaccagttggtggtggaagcaatccgtacggcactggaacctttcagcgaagtgctggaaatccctgatgcacctggactgaaacgactggcacgagtacagcacctgaacacgccgatccgtgcacgtctagctgatgcaggaggcatcctgcggctgctacaagcactgcatccgacccctgcagtgggaggctacccacgtagcgcagcactggattacatccgtcagcacgaaggtatggatcgtggatggtacgcagcaccgctgggatggctagatggagaaggaaacggagatttcctggtggcactgcgttcggcactgctaacgccgggacggggatacctgttcgcaggctgcggtctggtaggagattcggaaccggcacacgaatatcgtgaaacctgccttaagctaagtgcaatgcgggaagctctatccgcaataggaggcctggatgaagtgcctttgcagcgtggagtagcataataacacccagctttcttgtacaaagtggtcccc

SEQ ID NO: 11 - DNA, 1185 bp, Artificial Sequence
  Synthetic BSMT1 polypeptide sequence with Gateway cloning vector recombinase sites
ggggacaagtttgtacaaaaaagcaggctccccggaattgccagctggggcgccctctggtaaggttgggaagccctgcaaatggaagttgttgaagttcttcacatgaatggaggaaatggagacagtagctatgcaaacaattctttggttcagcaaaaggtgattctcatgacaaagccaataactgagcaagccatgattgatctctacagcagcctctttccagaaaccttatgcattgcagatttgggttgttctttgggagctaacactttcttggtggtctcacagcttgttaaaatagtagaaaaagaacgaaaaaagcatggttttaagtctccagagttttattttcacttcaatgatcttcctggcaatgattttaatacactttttcagtcactgggggcatttcaagaagatttgagaaagcatataggggaaagctttggtccatgttttttcagtggagtgcctggttcattttatactagacttttcccttccaaaagtttacattttgtttactcctcctacagtctcatgtggctatctcaggtgcctaatgggattgaaaataacaagggaaacatttacatggcaagaacaagccctctaagtgttattaaagcatactacaagcaatatgaaatagatttttcaaattttctcaagtaccgttcagaggaattgatgaaaggtggaaagatggtgttaacactcctaggtagagaaagtgaggatcctactagcaaagaatgctgttacatttgggagcttctagccatggccctcaataagttggttgaagagggattgataaaagaagagaaagtagatgcattcaatattcctcaatacacaccatcaccagcagaagtaaagtacatagttgagaaggaaggatcattcaccattaatcgcttggaaacatcaagagttcattggaatgcttctaataatgagaagaatggtggttacaatgtgtcaaggtgcatgagagctgtggctgagcctttgcttgtcagccactttgacaaggaattgatggatttagtgttccacaagtacgaagagattgtttctgattgcatgtccaaagagaatactgagtttataaatgtcatcatctccttgaccaaaataaattaacacccagctttcttgtacaaagtggtcccc

SEQ ID NO: 12 - DNA, 1419 bp, Pseudomonas sp.
atggctcagattgaacgctggcggcaggcctaacacatgcaagtcgagcggatgagtggagcttgctccatgattcagcggcggacgggtgagtaatgcctaggaatctgcctggtagtgggggacaacgtttcgaaaggaacgctaataccgcatacgtcctacgggagaaagcaggggaccttcgggccttgcgctatcagatgagcctaggtcggattagctagttggtgaggtaatggctcaccaaggcgacgatccgtaactggtctgagaggatgatcagtcacactggaactgagacacggtccagactcctacgggaggcagcagtggggaatattggacaatgggcgaaagcctgatccagccatgccgcgtgtgtgaagaaggtcttcggattgtaaagcactttaagttgggaggaagggcagtaagttaataccttgctgttttgacgttaccgacagaataagcaccggctaacttcgtgccagcagccgcggtaatacgaagggtgcaagcgttaatcggaattactgggcgtaaagcgcgcgtaggtggtttgttaagttggatgtgaaagccccgggctcaacctgggaactgcatccaaaactggcaagctagagtatggcagagggtggtggaatttcctgtgtagcggtgaaatgcgtagatataggaaggaacaccagtggcgaaggcgaccacctgggctaatactgacactgaggtgcgaaagcgtggggagcaaacaggattagataccctggtagtccacgccgtaaacgatgtcgactagccgttgggatccttgagatcttagtggcgcagctaacgcattaagtcgaccgcctggggagtacggccgcaaggttaaaactcaaatgaattgacgggggcccgcacaagcggtggagcatgtggtttaattcgaagcaacgcgaagaaccttaccaggccttgacatgcagagaactttccagagatggattggtgccttcgggaactctgacacaggtgctgcatggctgtcgtcagctcgtgtcgtgagatgttgggttaagtcccgtaacgagcgcaacccttgtccttagttaccagcacgtgatggtgggcactctaaggagactgccggtgacaaaccggaggaaggtggggatgacgtcaagtcatcatggcccttacggcctgggctacacacgtgctacaatggtcggtacaaagggttgccaagccgcgaggtggagctaatcccataaaaccgatcgtagtccggatcgcagtctgcaactcgactgcgtgaagtcggaatcgctagtaatcgtgaatcagaatgtcacggtgaatacgttcccgggccttgtacacaccgcccgtcacaccatgggagtgggttgctccagaagtagctag

SEQ ID NO: 13 - DNA, 9097 bp, Artificial Sequence
  Synthetic mint plasmid
  misc_feature (1)..(1): n is a, c, g, or t
ngggcaacgtggcggccagtctcaagcacgcctaccgcgagcgcgagacgcccaacgctgacgccagcaggacgccagagaacgagcactgggcggccagcagcaccgatgaagcgatgggccgactgcgcgagttgctgccagagaagcggcgcaaggacgctgtgttggcggtcgagtacgtcatgacggccagcccggaatggtggaagtcggccagccaagaacagcaggcggcgttcttcgagaaggcgcacaagtggctggcggacaagtacggggcggatcgcatcgtgacggccagcatccaccgtgacgaaaccagcccgcacatgaccgcgttcgtggtgccgctgacgcaggacggcaggctgtcggccaaggagttcatcggcaacaaagcgcagatgacccgcgaccagaccacgtttgcggccgctgtggccgatctagggctgcaacggggcatcgagggcagcaaggcacgtcacacgcgcattcaggcgttctacgaggccctggagcggccaccagtgggccacgtcaccatcagcccgcaagcggtcgagccacgcgcctatgcaccgcagggattggccgaaaagctgggaatctcaaagcgcgttgagacgccggaagccgtggccgaccggctgacaaaagcggttcggcaggggtatgagcctgccctacaggccgccgcaggagcgcgtgagatgcgcaagaaggccgatcaagcccaagagacggcccgagaccttcgggagcgcctgaagcccgttctggacgccctggggccgttgaatcgggatatgcaggccaaggccgccgcgatcatcaaggccgtgggcgaaaagctgctgacggaacagcgggaagtccagcgccagaaacaggcccagcgccagcaggaacgcgggcgcgcacatttccccgaaaagtgccacctgggatgaatgtcagctactgggctatctggacaagggaaaacgcaagcgcaaagagaaagcaggtagcttgcagtgggcttacatggcgatagctagactgggcggttttatggacagcaagcgaaccggaattgccagctggggcgccctctggtaaggttgggaagccctgcaaagtaaactggatggctttcttgccgccaaggatctgatggcgcaggggatcaagatctgatcaagagacaggatgaggatcgtttcgcatgattgaacaagatggattgcacgcaggttctccggccgcttgggtggagaggctattcggctatgactgggcacaacagacaatcggctgctctgatgccgccgtgttccggctgtcagcgcaggggcgcccggttctttttgtcaagaccgacctgtccggtgccctgaatgaactgcaggacgaggcagcgcggctatcgtggctggccacgacgggcgttccttgcgcagctgtgctcgacgttgtcactgaagcgggaagggactggctgctattgggcgaagtgccggggcaggatctcctgtcatctcaccttgctcctgccgagaaagtatccatcatggctgatgcaatgcggcggctgcatacgcttgatccggctacctgcccattcgaccaccaagcgaaacatcgcatcgagcgagcacgtactcggatggaagccggtcttgtcgatcaggatgatctggacgaagagcatcaggggctcgcgccagccgaactgttcgccaggctcaaggcgcgcatgcccgacggcgaggatctcgtcgtgacccatggcgatgcctgcttgccgaatatcatggtggaaaatggccgcttttctggattcatcgactgtggccggctgggtgtggcggaccgctatcaggacatagcgttggctacccgtgatattgctgaagagcttggcggcgaatgggctgaccgcttcctcgtgctttacggtatcgccgctcccgattcgcagcgcatcgccttctatcgccttcttgacgagttcttctgagcgggactctggggttcgaaatgaccgaccaagcgacgcccaacctgccatcacgagatttcgattccaccgccgccttctatgaaaggttgggcttcggaatcgttttccgggacgccggctggatgatcctccagcgcggggatctcatgctggagttcttcgcccacccccatgggcaaatattatacgcaaggcgacaaggtgctgatgccgctggcgattcaggttcatcatgccgtttgtgatggcttccatgtcggcagaatgcttaatgaattacaacagtttttatgcatgcgcccaatacgcaaaccgcctctccccgcgcgttggccgattcattaatgcagctggcacgacaggtttcccgactggaaagcgggcagtgagcgcaacgcaattaatgtgagttagctcactcattaggcaccccaggctttacactttatgcttccggctcgtatgttgtgtggaattgtgagcggataacaatttcacacaggaaacagctatgaccatgattacgccaagcgcgcaattaaccctcactaaagggaacaaaagctgggtaccgagcccgcctaatgagcgggcttttttttcgtcgacgctctcccttatgcgactcctgcattaggaagcagcccagtagtaggttgaggccgttgagcaccgccgccgcaaggaatggtgcatgcaaggagatggcgcccaacagtcccccggccacggggcctgccaccatacccacgccgaaacaagcgctcatgagcccgaagtggcgagcccgatcttccccatcggtgatgtcggcgatataggcgccagcaaccgcacctgtggcgccggtgatgccggccacgatgcgtccggcgtagaggatcatcctgttttggcggatgagataagattttcagcctgatacagattaaatcagaacgcagaagcggtctgataaaacagaatttgcctggcggcagtagcgcggtggtcccacctgaccccatgccgaactcagaagtgaaacgccgtagcgccgatggtagtgtggggtctccccatgcgagagtagggaactgccaggcatcaaataaaacgaaaggctcagtcgaaagactgggcctttcgttttatctgttgtttgtcggtgaacgctctcctgagtaggacaaatccgccgggagcggatttgaacgttgcgaagcaacggcccggagggtggcgggcaggacgcccgccataaactgccaggcatcaaattaagcagaaggccatcctgacggatggcctttttgcgtttctacaaactctccatggaagggcgaattgatccagatgacggtatcgataagcttgatatcaacaagtttgtacaaaaaagcaggctccccggaattgccagctggggcgccctctggtaaggttgggaagccctgcaaatgaaaactcccgaagactgcaccggcctggcggacatccgcgaggccatcgaccggatcgacctggatatcgtccaggccctcggccgccgcatggactacgtcaaggcggcgtcgcgcttcaaggccagcgaggcggcgattccggcgcccgagcgggtcgccgcgatgctccccgagcgcgcccgctgggccgaggaaaacggactcgacgcgcccttcgtcgagggactgttcgcgcagatcatccactggtacatcgccgagcagatcaagtactggcgccagacacggggtgccgcatgagccggctggcgcccctgagccagtgcctgcacgccttgcgcggcaccttcgagcgcgccatcggccaggcgcaggcgctcgatcgtccggtgctggtggcggcatcgttcgagatcgacccattggacccgctacaggtattcggtgcctgggacgaccggcaaacgccctgcctgtactgggaacagcccgagctggcgttcttcgcctggggctgcgccctggagctgcaaggccacggcgaacagcgcttcgcccggatcgaggaaaactggcaattgctctgcgccgacgccgtggtcgagggcccgctggcgccgcgcctgtgcggcggattccgcttcgatccgcgcggcccgcgcgaggaacactggcaagccttcgccgatgccagcctgatgctcgccggcatcaccgtgctgcgcgagggcgaacgctaccgggtactctgccaacacctggccaagcccggcgaagatgccctggccctggccgcctaccactgctcggcgctactgcgcctgaggcagccggccagacgccggccctcggggccgaccgctggcgcgcagggcgacgcttcggcgcaggagcgcaggcaatgggaagccaaggtgagcgacgcggtaagcagtgtccgccagggacgcttcggcaaggtcgtgctggcccgcacccaggcccggcctctcggcgacatcgagccgtggcaggtcatcgaacacctgcgtctgcaacatgccgacgcccagctgttcgcctgtcgccgcggcaacgcctgcttcctcggcgcctccccggaacgcctggtccgcattcgcgccggcgaggcactcacccatgccctggccgggaccatcgcccgcggcggcgatgcccaggaagatgcgcggctcggacaggccctgctggacagcgccaaggacaggcacgaacaccagttggtggtggaggcgatccgtacggccctggaacccttcagcgaggtgctggaaatccccgatgcgcccggcctgaaacgactggcgcgagtccagcacctgaacacgccgatccgcgcccgcctcgctgacgcaggcggcatcctgcggctgctacaagcgctgcatccgacccccgcggtgggcggctacccacgcagcgcggcgctggactacatccgccagcacgaagggatggaccgcggctggtacgccgcgccgctgggctggctcgacggcgaaggcaacggcgatttcctggtggcgctgcgctcggccctgctcacgccgggccggggctacctgttcgccggctgcggtctggtaggcgattcggaaccggcccacgagtatcgcgaaacctgccttaagctcagtgccatgcgggaagctctatccgccataggcggcctggacgaagtgcccttgcagcgcggcgtcgcctaataaggttgggaagccctgcaaatggaagttgtggaagttctgcacatgaatggtggtaacggtgatagcagctatgcgaataatagcctggttcaacaaaaagttatcctgatgaccaagccgatcaccgagcaggcgatgattgacctgtacagcagcctgtttccggaaaccctgtgcatcgcggatctgggttgcagcctgggcgcgaacaccttcctggtggttagccaactggtgaagattgttgagaaagagcgtaagaaacacggttttaagagcccggagttctattttcacttcaacgacctgccgggtaacgattttaacaccctgttccagagcctgggcgcgtttcaagaggacctgcgtaaacacatcggcgagagcttcggcccgtgcttctttagcggtgtgccgggcagcttttacacccgtctgttcccgagcaagagcctgcacttcgtgtacagcagctatagcctgatgtggctgagccaggttccgaacggtatcgagaacaacaaaggcaacatttatatggcgcgtaccagcccgctgagcgtgatcaaggcgtactacaagcaatacgaaatcgacttcagcaacttcctgaagtatcgtagcgaggaactgatgaagggtggcaaaatggttctgaccctgctgggtcgtgagagcgaagatccgaccagcaaggagtgctgctacatctgggaactgctggcgatggcgctgaacaaactggtggaggaaggcctgatcaaagaggagaaagttgacgcgtttaacattccgcaatacaccccgagcccggcggaagtgaagtatatcgttgagaaagaaggcagcttcaccattaaccgtctggaaaccagccgtgtgcactggaacgcgagcaacaacgagaagaacggtggctacaacgttagccgttgcatgcgtgcggtggcggagccgctgctggttagccactttgacaaggaactgatggatctggtgttccacaaatatgaggaaattgttagcgattgcatgagcaaggagaacaccgagtttatcaatgttattattagcctgaccaaaatcaattaacacccagctttcttgtacaaagtggttgatatctacccttacgatgttcctgattacgcatgaggatccggtgattgattgagcaagctttatgcttgtaaaccgttttgtgaaaaaatttttaaaataaaaaaggggacctctagggtccccaattaattagtaatataatctattaaaggtcattcaaaaggtcatccaccggatcaattcccctgctcgcgcaggctgggtgccaagctctcgggtaacatcaaggcccgatccttggagcccttgccctcccgcacgatgatcgtgccgtgatcgaaatccagatccttgacccgcagttgcaaaccctcactgatccgctccaattcgccctatagtgagtcgtattacgcgcgctcactggccgtcgttttacaacgtcgtgactgggaaaaccctggcgttacccaacttaatcgccttgcagcacatccccctttcgccagctggcgtaatagcgaagaggcccgcaccgatcgcccttcccaacagttgcgcagcctgaatggcgaatggaaattgtaagcgttaatattttgttaaaattcgcgttaaatttttgttaaatcagctcattttttaaccaataggccgtactgcgatgagtggcagggcggggcgtaatttttttaaggcagttattggtgcccttaaacgcctggttgctacgcctgaataagtgataataagcggatgaatggcagaaattcgaaagcaaattcgacccggtcgtcggttcagggcagggtcgttaaatagccgcttatgtctattgctggtttaccggtttattgactaccggaagcagtgtgaccgtgtgcttctcaaatgcctgaggccagtttgctcaggctctccccgtggaggtaataattgacgatatgatcatttattctgcctcccagagcctgataaaaacggtgaatccgttagcgaggtgccgccggcttccattcaggtcgaggtggcccggctccatgcaccgcgacgcaacgcggggaggcagacaaggtatagggcggcgaggcggctacagccgatagtctggaacagcgcacttacgggttgctgcgcaacccaagtgctaccggcgcggcagcgtgacccgtgtcggcggctccaacggctcgccatcgtccagaaaacacggctcatcgggcatcggcaggcgctgctgcccgcgccgttcccattcctccgtttcggtcaaggctggcaggtctggttccatgcccggaatgccgggctggctgggcggctcctcgccggggccggtcggtagttgctgctcgcccggatacagggtcgggatgcggcgcaggtcgccatgccccaacagcgattcgtcctggtcgtcgtgatcaaccaccacggcggcactgaacaccgacaggcgcaactggtcgcggggctggccccacgccacgcggtcattgaccacgtaggccgacacggtgccggggccgttgagcttcacgacggagatccagcgctcggccaccaagtccttgactgcgtattggaccgtccgcaaagaacgtccgatgagcttggaaagtgtcttctggctgaccaccacggcgttctggtggcccatctgcgccacgaggtgatgcagcagcattgccgccgtgggtttcctcgcaataagcccggcccacgcctcatgcgctttgcgttccgtttgcacccagtgaccgggcttgttcttggcttgaatgccgatttctctggactgcgtggccatgcttatctccatgcggtaggggtgccgcacggttgcggcaccatgcgcaatcagctgcaacttttcggcagcgcgacaacaattatgcgttgcgtaaaagtggcagtcaattacagattttctttaacctacgcaatgagctattgcggggggtgccgcaatgagctgttgcgtaccccccttttttaagttgttgatttttaagtctttcgcatttcgccctatatctagttctttggtgcccaaagaagggcacccctgcggggttcccccacgccttcggcgcggctccccctccggcaaaaagtggcccctccggggcttgttgatcgactgcgcggccttcggccttgcccaaggtggcgctgcccccttggaacccccgcactcgccgccgtgaggctcggggggcaggcgggcgggcttcgcccttcgactgcccccactcgcataggcttgggtcgttccaggcgcgtcaaggccaagccgctgcgcggtcgctgcgcgagccttgacccgccttccacttggtgtccaaccggcaagcgaagcgcgcaggccgcaggccggaggcttttccccagagaaaattaaaaaaattgatggggcaaggccgcaggccgcgcagttggagccggtgggtatgtggtcgaaggctgggtagccggtgggcaatccctgtggtcaagctcgtgggcaggcgcagcctgtccatcagcttgtccagcagggttgtccacgggccgagcgaagcgagccagccggtggccgctcgcggccatcgtccacatatccacgggctggcaagggagcgcagcgaccgcgcagggcgaagcccggagagcaagcccgtagggcgccgcagccgccgtaggcggtcacgactttgcgaagcaaagtctagtgagtatactcaagcattgagtggcccgccggaggcaccgccttgcgctgcccccgtcgagccggttggacaccaaaagggaggggcaggcatggcggcatacgcgatcatgcgatgcaagaagctggcgaaaat

SEQ ID NO: 14 - DNA, 935300 bp, Pseudomonas sp.
gtttcgcctaaggcctgcgccggagaaggtgcgcattataggggctatgattatcacgtcaacggttgtttgccattattttggattaaaacggtggcagcatttatccgctgttaaggagacgactaatttggcatacgcgctcgggcgagtacggggttccttctaaggaggtgcgacaggctttacactgggtccctcctttgcctgcgatgacctacatgctcaccaacgccgatccgctcgacctactattgcttcctacctggctcgttccagtcgagccggctggtgtcgttctgaaaaatcacgggctcggaatccgtaatggccgcattgcactcatagccccgcgcgaggatgcgatccaacacgccgcccgggaaacccggaatctcagcggaatgctgctcgctccgggattggtcaacgcccacggccacgctgccatgacactgttccgtggcttggctgacgatctgccattgatgacctggcttcgcgaacacatttggcctgcggagagccggtgggttgatgaggctttcgtacgggccggaagcgagttggcaatcgctgagcaattacaaagcgggattacctgcttttccgacatgtactttttccccgatgtaatgagcgagctggttcataagcatggagtccgggctcagattacgatcccggtactcgacttccctatccccggcgcgcgcaatgccgacgaagcacttcgcaaaggcgtcgccctgttcgacgacctgaagcatcatccgcgcgtgagtatcgccttcggccctcacgcgccctactccgtggcggacgacaagctggaaagcattcgtactctcgtcgcggagatggatatcggcatccatatgcatgtccatgaaaccgagcacgaggtagaggaagcgctggataagcatggtgaacggccgctggcgcgcctagcccgcttgcagctgctaggcccgcgcttccaggcggtccatatgacacaggtgaacgacgatgacatcgcactgctcgtcgaacacaactgcagcgtgattcattgccctgagtccaacctcaaactggccagcggcttctgcccggtcgaacgcctgtgggaggccggcgtcaacgttgcactgggcaccgatggagccgctagcaataacgacctggatttactaggcgaaacccgcacagccgctctgcttgctaaagctgtcgcgagatcggccacagcgctcgatgctcatcgggcgctacgcatggccacgctcaatggtgcacgcgcgctcggactcgatgaccacaccgggtcgctggagattggcaaattcgccgacctggtggcgttcgatctgtcgcgccttgcgcaacagcccgtttacgatccggtttcccagcttatttattccagcggtcgtgactgtgtccgtcatgtctgggtaggcggcaagcagctactcgatgaaggacgattggtccgcatggatgaggagcaaatcattgccgtcgccagggaatggggagagaagatcggctctaagcactagggatgtcccagcggccaaccatgcacttgggtgctccgcggcaaactgacctatgcaaagcactttaccgaaagccctttgcctgacagaagctggcaccatgaacactttgcggctcaagcttctccttcaagctttcaaacggaacagatcatgagcaacgtcgaccacgccgaaatcgccaaattcgaagcgctcgcccaccgctggtgggaccgcgaaagcgaattcaaaccgctgcacgaaatcaacccgctccgggtcaactggattgacgaccacgtgtcgctggccggcaagaaggttctggatgtcgggtgcggcggcggcatcctcagtgaggccatggcccagcgcggcgctaccgtaaccggcattgacatgggcgaagccccactgtccgtcgccaggctgcacttgttggagtcaggcctggagatcgattatcgacaaatcaccgccgaggcgctgaccgaggaatcgcaggcgcaattcgatgtcgtgacatgtctggagatgcttgaacacgtacccgatccggcatcggtaatacgtgcatgccatgctctggtaaagcctgggggacaggtgttcttctcgacgatcaaccgcaatccaaaagcctatgcgcttgcaatcattggtgcggagtacatgttgcagctgctaccacgcggcacccacgactaccgtaagttcatccggccctcagagctgggtgcttggagccgtcaggccggacttgcagtcaacgacatcatcgggctgacctataacccgctgacaaagcactacaagctgtctccggacgtcgacgtgaactacatgattcaaacgcgtcgggaggcctaatgcgtctgcaggccgtgtttttcgacatggacggtacattgctcgataccgctcctgacttcatcgcagtcgctcaggccatgcgcgtggcacgaggccttgatcgcgtggcagaccagcagattcgcgatgtcgtgtctggcggggcccgggcaatggtactcagtgcgttcgacgtcgacccgctatccgacgagttcgaagtacttcggctcgagtttctggagcgctatcaagcccattgcgccgtggaaagcaggctatacgatggcatgcctgaattactggacgagatcgaaagagccagtttgatctggggagtagtcaccaacaaacctgttcgcttcgccgagccaatcatgcagcagctgggcctggcgtcgcgctctgccgtgctggtctgcccggatcatgtaagcaagagcaaacccgatccggagccaatgctgctcgcgtgcagccagttggacctcgatccatcgaccgtactcttcgttggtgatgatctgcgcgatatcgaatcggggcgcgccgccggtagccgcacggcggcggtacgctatggatatattcatcccgatgacgatccggacacctggggtgcggacatcgtcgtcgatcatccgctcgagttgcgtggcctgttgaacggcgccacctgaacgcgccgataaccctttcctcagcttttatccgctgacaatcatggtgggtggttacccacgctttgcatatgaggcttcagatgttcgaatactcagcccgtcccgacctgcttaagggtcgaatcatcatggtcactggcgcaggccgtgggatcggcgaagccgcggccaaagcctacgcttcacacggtgcaaccgtactgctgttgggcaagaacgaggaaaacctcaacagggtatacgacgacatcgaagccgccggcgggccgcaaccagcggtcatcccgcttaatctcgagacagccctgccgcaccagtacgacgagcttgcagccacagtcgagcgtgagttcgggcggctggatgggcttctgcacaacgcaggcatcgtaggcccgcgtacaccgatcgagcagctgtccggcgacaacttcatgcgcgtcatgcaggtgaacgtcaatgccacctttatgctcaccagcacactgctccccttgctcaaattgtcggacgacgcctcggtggtcttcacttcgagcagcgtcggccggaagggacgtgcctattggggcggctacgccgtatcgaagttcgcggtcgaggggctgatgcaggttttggccgatgagcttgacgggaccagttcggtacgcagcaacagtatcaacccgggtgcgacccgcaccgatatgcgtgcaaaggcatatcccggagagaacccggcggtgaacccgctgccagccgacatcatgccggtctacctctatctcatgggcccggacagcgccagagtgaatggacaggcactgaacgcccagtgagtgcgcaacggtcaaagcgcctgtttactggcgctttgacgcgacgaacatatcagtttgatatcaaaacgccgtttcgctggcgactgctctcgatagcgagtctcaaaattcgctatctcactgattagcaaagaaattctgatttggcacaaaaatagctactaagcctctatcagcgcaaattgcgtattgaggtttcgtcctatgctgccagataaacagaacagcgccaccgtcgatatcggagccgcccgtgcgcggcgccttgacatcagtcccggtggcaccgcgccgacacgaccgctaagtcttttcgagcgggcgcgcaatctgtcgttacgcctgcagaccagcttggaaatcgaccgcctgctgctgttctttctcgaagaggctagcgacctgcttccactgcacgcgctttcgtatcggcacgcgggcaccgatttcgatgtccgcatcggagaagccgaggggcacgacatgcagtttgcgctcgctcagcaagcagagagcctcggcgaactccgcttgttcagccatgggcgcttatccgacctggcgcttgaacagctcgaagacctgctgagttgtctgctgttcccgttacgcaacgcgcttctctaccggcgagctgttcaggcatcgctgaaggactcgctcaccggggctggaaatcgtattgcgctggagcaaagcctgagccgcgagactgagcttgcctggcgtcacgggcagctcctgtcggtcatcatgctggatatggatcacttcaagcgtctcaatgacacctatggacatcaagcgggggacgccgcgctgaaagcgaccgccctgttgctcaaagaacagttgcgcaacattgacatggtgttcaggttcggcggcgaggagtttgcgctggtgctatccaacaccgggcacgaagcggcagccgtcgtagccgagcgcatcagagcggccatcgagaacctgtgctttctcgttggagaacggaccgtgcatctgtcggccagcctcggctacgccacctatcagccaggggaatcaccggaagaactgctgcaacgggccgaccaggcgctttaccaagccaagcgtgacggccgaaacaggctgtgcgccgcgccaatgtgagccgcacggcactgaccggcacaaaaaagggcgagccatgatggtctcgccctttctcactctacacggcaaccttttacctagaccgatcaccaggaccgggacgcggcccttcggaggtccgcggaccgctacgcttggccggagacggcttgccacgattgcggccaacggcgctgggccgctccgcaacaggcgtaccgcgtcccggcttgccgcgctgctcgtcagcttcgcgtggcttgcgtgtcggctggttctcgcgagagcggcggcccttgtcaccatcgtttggtgcgtccgcctcatgagccgaacgcaatacccggggacgacgctcgccgcgcccaacaggcttggcgaccttgcgctgcatacggtcgagcttttccttggttttcgacttcatccccggcagagcaaccggcttgaggccgacctcctcgctgagaatatcgacctcgctctgggacatctcgcgccagcgccccatcggcaaatcggacgtcatgaacaccggcccgaaccggacacgcttcagacggctgacgacgagcccctgcgattcccacaaccgacgtacttcacggttgcgaccttccatcaccacgcagtgataccagtgattgaagccttcgccgccgggcgcctgctggatgtcggtaaaccgtgccggtccatcttcaagcatgacgcctgtcttcaagcgctcgatcatctcgtcgtcgacctcgccccttacccgaaccgcgtattcacggtccatctcgtaagagggatgcatcaggcgattggccagctcaccatcggtggtgaacagcagcaaaccagtagtgttgatatcgagtcgaccgatattgatccagcggccctctttcggacggggcaagcggtcgaataccgtcggacggccctctgggtcgtcacgggtgcagatttcgccatccggcttgttgtagatcagaacgcggcggaccacctcagtggcttcttcacgcttgagcaaacgcccatcgacggcaatcgcatcgtgcgagtcgacgcgctgaccaagtgtggccacggcgccgttgaccttgactcgtccggcggagatccagttctccacgtcacgccgcgaggccaggccaaggcgggccaggactttctgcagcttctcgccgtgggcaatatgaggagtcgtttcttcgtgttcggtcatctaggcacctcccggtgtggcagttccgatagaaaggccgcgcactatacgcgtcgcggttgctctacgcactagggcctgcacgcaattcgcaactggcggcgaaccacggcaggccccatgacgttagcagcccatcggccgataagctttaccgcttgtccagcgcggcaagcgcctcggccgtggcctgctgaatgctgctccaatcgccgttcttgagcgcggtcccatcgatcatccaggtgccaccgacgcacataacgttggggagcgccagatactgggacgcgttgcccgcgttaacgccaccggtcgggcaaaaccgcacatcgccaaaggggcctccgagcgccttgatcgcggcgacgccaccacacacctcagcggggaacagcttgaatcggcgatagcccagcgcatagccacgcatgatgtcggacgcattgctgataccggccaacaacggcacagcgctgttgacgccggcctgcagcagctcatccgtgcagcctggcgagacgatgaactgcgcacctgcagcttcgacttcgtccatcatgcgcttatcgagcaccgtcccggcgccgatacaaagctcgggccgctcctgacgcaagcggcggatcgcggtgagaccgtgcgccgagcgcaaggtgatctccagcgctgtcagcccgcctgcggcaagcgcatcggccaacggcaggatttgctcctcactgccgatggtgatgacgggaaggatgcgggcttcggtacagatcttttcgatcagtgcgttcttctggtccatggtcatgggtaaattcctcgggcctcacgggcaccaataaatctctagtggggaatgcaggaatgcacggataggcatctgcaaggcttcgagctgcatggcttgacgcagggtctccagcttggcctgcccctggatggcaaggcactgcaccctggccgaggccagcaatggataggtcatactgatgcgttgtgtcggagctgtcggcgccaccatcggcaggcagagcgccgcctcttggctgtcgagccctcgcgccagcaacgggctatcagggaacaatgaagcggtatgaccatcgttgcccatgcccagtaccagcacatcgatgggccgactgaggccttccatccgccggcttgcaccttgcgccgcctgctccagggtatcggcgggctggtaaatgccaagcagctcggccttggccgctgcgttctgcagcaaatggcggcgcaccagcccttcgttactgtcagcatcttcgacggcgacccaacgctcgtcagcgaggctgacctgcacctttgcccaatccagctcgcgcgtcgacagcgcctcgaaaaaggcgattgggctgcgccctccagacaccaccaggctcgcacggccctgagcgctcacggcctggctgagtgcttcggcaacccgatcagccaaggaccgagccaactgatcggaatcagcgagctcatgcgtgaccacccccaagggcagttcgatttcagagatcgccataccaggacctcccatcacgtgtgatcagcgcaatggacgccaccggcccccaggatcccgctggatagggtttcggcgcgtcgccaaggcgcgaccaaccatcgatgagctggtcgcaccatttccaggcgtactcgatctcatccttgcgcacgaacagattctgattgccctgcatcacttccaacagcagacgctcgtaggcgtcgggaatccgcgagcttttataggtttctgaaaaattcagctgcagcgggccactgcgaaggtgcattcccttgtcgaggccctgctccttggtcatcacctgcaacgaaatgccctcgtccggctgcaagcgaatgatcagccggttgctgatcagcgagcgctgctccggggcaaagatgtagaacggcggttctttgaagtggataacgatctgcgaaaccttttcggccatgcgcttgccggtacgcaggtagaacggcacacccgaccagcgccagttgcagatgtcggcgcgcagcgcgacgaatgtctcggtgctgctctcggcgttggagttctcttcctcgagatagccgggtacggccttgccccccaccgaaccgcccacgtactggccgcgtaccacctgtttgccgagacgctccggtgtgatcggcgccagcgccttgagaaccttgaccttctcatcccgaatactgtcggcggttaggtcgctgggcgggtccatcgcgatcaggcacaacagctgcagcaaatggttctggatcatgtcgcgcaactgaccggcttgatcgaaatacccccagcggccctcgatgcccacggtttcggcgactgtgatctcgacgtgcgagatgtgatgctgattccattgcgtctcgaacaggctattggcgaagcgcagtgcgatcagattctgcactgtctccttgcccaggtagtggtcgatacggtagatccggctttccgggaaatactgcgcgacggcgtcgttgaccactcgcgaagactcgaggtcatgcccgataggcttctcgagcaccacgcgggtttgctcggccagcccggccgcggcgagatgctcgcagatcgagccgtaaaccgacgcaggcgtggcaaaatacgcaatcagcggcgtgtcggaggaaacctgctccgccagggctacgtagtcctgggcgttgcggaagtccatagtgaggtatttcagcctcgcctcgaaccgtgccagcaccgtctcgtccagctgggcggccggtatgtagcggcgcaatgcctgatctatccgttccagatgagccgagggctctcctttatcccgcgatagggccaggatgcaggtgtcgctgtgaaggagccccgcccgatccagctggtaaagtgcgggaaacaatttgcgcagcgccagatcgcccagggcgccgaacaaagcaaaggtggtcgcgtcaacggtaatagcaggcatgttttttatactaaccaaattaggctgtacgacagataggtttgcgcagtttaagctcttaatgttgttattaaaacaacataagcctattttttcgcgctactgactcgtttcacagccgtcctgggcttgagcctcctgaaagaagagacatggatcgcatgaaaaatctcttggaacagataaaaaatcggctcgatgagctgaacaaagcggaaagaaaggtcgccgaagtgatcttgagtgatcctcaacaggccacccgctacagcattgccgccctcgctcaagccgcgaaggtcagcgagccgaccgtaaatcggttctgccgctcattcggcgcggccggctatccggtgctgaagattcaactagcgcaaagcctggccagcggcgcggcttacgtcagccgagccgtcgaagcagacgacagccccgaggcctacacccggaagatcttcggcagcgccatcgcttcgctcgatagcgcctgccaagccatcgatccgcaggtgatcagccatgccgttgacctgatgatccaagctcgccaaatccacttcttcggccttggcgcctctgcgtcggttgcattggatgcccagcacaaatttttccgcttcaatctgccggtgaccgctcatagcgacgtgctcatgcagcggatgctggcatcggtggcccatacgggtgatctgttcgtgatcatttcctatacgggacgcacgcgtgagctggtcgaagcagctgtgatggcacgcgacaacggagcttcggtactgggcctgaccgccgctgactcgccactggccaaggtctgtacgctgagcctggacataccgctaccggaagacaccgacatctatatgccgatgacatcacggatcatccagctcaccgtgctcgacgcgctggcggccggtgtaacgctgcggcgcggcatcgacttccagccgcatctgcgcaagatcaaggagagcctgatggccacccgttatccagcggaagagagttgatcacttctttttctttctggctttgcgcaaggcgtgcagtcgctcggcggccagtgcgttgaccgccttacgctccttgttcttcatgcccttccaggccttcatctcctcccggctgcgtccgcagccgatgcagatgtcgtcttggagcttgcagatgctgacgcacgggttcttcgccttttcgcccaaaaccacctccgattccgcttgaggaccctaccgccttggctaagtagaggccctcttcgcctggaggttctaacggaatcggactatcgcttcgatcaatcccaccagtactcgacctgcacgccgaaattcgagccgtgctggtcgccgccaaaggctccggtgtcggaaagcgcactaccggccgccatcaggttggccgcctcctgcgctgcttcgttccattgcgcgtaggtgtaatacagacgaatctccgggcgagcccagaactctgggccagcaggcgaccaggtgggcgccacggtgaacttcgtcagcttgcgggtaccttccggcgcatcgatctggtcatgcccaagctctgcgaccaacttgaattgatcggtcaaggcgtagaccggccgcacaccaaccgagatccagtcctgatcgccgccgttttgacgcttgtccttctggtacaccgcctggaactgaccgccgaaacgcggggttacctgccaatcgaagtattcgaccgctcgccagctcttgtcactgctgcccaatgtcacgtcaccggtatagccgagaccggtgcccggcccctcgccgtattggagcgcaaaggtgttgctaccgcccaggaaaccaacctgcttgtgctgcacggtaacggcccaaccgctattggcatcgtcacgatccggctcgtcgatgtaactgacaccgaactcgagctcgccaccgggattgctatcgaagcccccgacgttgaaatcgtgacggttgatgtagttttcctggaagacgttgtccttgcgtgaaaatgcgtagctgtacttcagcccaccgatttccatgtcctcgataccggcgccggtcgcactctggttccagtagtagaagtccgagatgtggatgtcatttcgcttgtagaaacgccggccggcccatagcgaaccaccgttgagcgccggcaccttgctccattcggcgtaggcctgaaccatgcgggcccaaccatgatcgccggtgaacttgggcgtgtgatcgtactggttgtagagcgccgccataccttccaggctcaccaccgatccgtcatccagcgtaagcagatcctgacgcagccccagctccgcatactgctcgcactcgttgccgaggcgaaatttggagggggctcccggaagctggaagcaggcttgcgacgcgctactgctcgattcgccgatcccgctgcgcacgtaaccattgaaatccagcgcgtgaaccgtaaacggcatagccaggctcgccagcgaaatcgcgaagcccaggcgtgtagtttttttcatattcgctccaattagctcttattgttgttactgcctttggatcgagccgaaaaggctctccttacgatccacaaccagcatcctgctcgctgcggttcgacttgttgcacccagcggcgttcgccggtgggtgcctaacctgacttacaaataccattcagaacgggcgggcgccggtacgcagagaccctgctaccgcgcgttttttccactcacgatcgccactcagcgggcaacgagccgggtaacggtcccgtcatgccctgacgaactggtatcggacatcaaacccaagcgctcgccggtctgcgcgtcgaacagcagcaccttgcccggctcgaactgcagcgtgagtgtttctccaggattgggtgcggcatccggtgccagacggcaacacaccttggtctgattgagcgtgacgaagaccatggtgtccgggccagttggctcgacgacctgcacctcggcgcgcagcgaaggcagctcgctggcagcgccgacgcagatttgctccggccggattccgaggatcacgtcgcgcccctccagtgactcgccaggtgccgcattgaccggcaactcgcagcggtcctggccgctgtccagcagcgcggaccagccgcctacacgcttgctcagacgcagcggaatgaagttcatcggcggagaaccgatgaagctcgcgacaaacaggttggccggatcgttgtagatctccttcggcgtaccgaactgctggacgatgccatccttcatcaccgcgaccttgtcgccgagtgtcatcgcctcgatctggtcatgggtgacatatacggtggtggtcttgagccgctgatgcatcagcttgatctcggtgcgcatctccacccgcagcttggcgtcgaggttcgataacggctcatcgaacagatagatcttgggccgccgcgccagcgcacgccccatcgccacgcgctgctgttgaccacccgacagctgcgacggcttgcgccccagcagatgctcgatctgcagcagctgcgcgacgcgagccacttcttcctggatcttggccgccggcaccttgcgcatcttcaggccgaaggcaatgttttcctgaaccgtcatggtcgggtacagcgcgtaggactggaacaccatcgcgatgtcacgatccttcgggctggccgtactgatgtccgccccgtctacacggatttcccccccggtgatgtcttcgagcccggcgatgcagttcatcaaggtcgactttccgcagccggaggggccgaccaggatcaggaattcgccgtcgtcgatcttcaggtcgatgtctttcaaggtgtcattggagctacccggatagctcttgcggacgttgcaaagttcaagtgcagccatgtcgttctcctaacccttgaccgcgccggccgtgagcccacgcaggaaatacttgccggcgaggatgtacaccaccagcgttggcagcccggcgatcatcgccgcggccatatcgacgttgtattccttggcgcccgtgctggtgttgaccaggttgttcagcgccaccgtgatcggctgcgagtcgccgctggcgaataccaccccgaagaggaagtcgttccagatctgggtgaactgccatatcaggcaaaccatgatgatcggcgtcgacatgggcagcagaatccgcccgaagatggtgaagaagccggcaccgtccaggcgtgcggctcgcaccagggcatccggcacgctcacgtagaagttgcggaaaaacagcgtagtgaaggcgatgccatagacaacgtgcaccagcaccagtccggccgtggtgttggccagaccgaacttgcccagggtgaacgaagctggaagcagcacggtttggaatggcagaaagcaaccgaacagcagcaacccgaagaacagctgcgagccgcggaagcgccacatcgacaggacgtagccgttcaaggcgccgagcgccgtcgaaatcagcacggccggtacggcgatcttcaccgagttccagaaatagccgtcgactacggcccacgccttgacccagccgatcacggtgaacacgtccggccaggaaagcaggttgcccgtgcggatgtcatcgggcgtcttgaagctggtcagcaacatcaccaccagcggcaccaggtacaaggccgccgccaacagtagcgtggcgtggatagcgagccgactcagattgagtgatttagtcatagcgcttaccccgcagttccgagtagaggtacggcaccagaattgtcaggatcgcggccagcatcatcatcgcactggccgaaccgatgcccatctggccgcgactgaaggtgaagttgtacatgaacatcgctggtaggtcggaagcgtaaccgggccctcccgctgtcatcgcggctaccaggtcaaagctcttgatagcgatgtgcgcaaggatcatgagtgcgctgaagaacaccggccgaaggctcggcagcacaatgcgcaaatagatggccggcaggcttgccccgtcgatctgcgcagcccgcacgatggactgatcgacgctgcgcagaccggcgagaaagagcgccatgacgaagccggaagcctgccatacggccgcgatcaccaggcagtagacgacacggtccgggtcgaccagccagtcgaagcgaaaaccttcccagccccagtcacgcagcatcttgtcgatgccaaggcccgggttgagcaaccattgccaggccgtcccggtgacaatcatcgacaaggccatcggatacaggtagatggttcggatgaagccttcccggcggatgcgctggtccagcagcacggcaagaaatacgccgatcaccaggctgacgccgatgaacagcccgccgaacaccgcgaggttctggctcgcgacccaccagcggtcgttctccatcaggcggacgtattgctgtagacccacccatttgtagctgggcatgaagctggagttggtaaacgacagcaccaacgtccagaggatgtaaccgtaaaagccaaccaggaccatcagcatggtcggcgccaggaccagcttgggtagccagcgctgcagcgcgtccaggggtgaggccatggtcttggtgattgccatcgtgacactcattcgggcgttaccaggtgaaggtgaaatccaggccgaacgctccctccggcaggaccgcagccctgccgagaggcgttttgactatatggagcgggccgcgcgtcggcccgggtcagcctactgtgcggacttgatcgccgcgtagagctgcgcgccggctttgctcgggtcggcgttcttttcgctcatgaagttggacaccacatcgaagatggcgccttgcaccgcgaggttcgtggccatgctgtgcgccatgctcggctccaggttgccgttcttgtcggcttccttgaagtcatccatggaggcctgggcgcagctgtcgaattcgctcatgtccagatcggaacgtaccggaatcgaccccttgttcttgttgaatacgtactggaacttgggctccagcgcgatcctggccaaggcgtgctgcgcggcgatgtcgccttcgtccttgagcttgaacatggcgatggaatcgatgttgtaggtgtagctgccagcggtgccgggcatggggacgcactggtagtccttgccggccaccttgtcggaagccgtccattcgcttttcgcccagtcacccatgatctgcatcccggccttgccgtcgatcaccatcgcagtggcgaggttccagtcgcgaccggcacggttgtcgtccatgtaggtggagagttttttcagggcggcgaatacttcggtcatttgcgggctggtcagggtcgccttgtcatgttcgacgaacgccttgtgaaagccatccggccccatgatgcccagcaccaggccttcgaagacggtgctgtcctgccatggctgaccgccatgcgcgataggaacgaagccggccgctttgagcttgtcgccagcggcgtagagctcttcgagcgtagtgggcgccttctcgataccggccttctcgaataccttcggattgatccacaaccagttgacgcgatggatattcaccggcaccgccacgtagtggccgtcgtacttcatggtgtcggagacggtcttcgacagcagctggtcccagttattggcctcggccacctcgtcgagcgggctcagcaggtcgagagcgccccactcctgcagatcaggccccttgatctgcgcggcgcccggcgggttgcccgatacaacgcgggtcttcagtacggtcatggccgccgaacctgcgccgccggcgacggcgccatccttccaggtgtagccggcctcgttgaccagatcgcgcaagacgtttaccgcggcggcttctccgccggaggtccaccagtggacaacttccacggtgcccttcgaatcagcggccatcgcggaaacaggaagcaacgaagcaagagaaatgacagtggcgaggcgagtaatcgcgttcatttaaataccttttcttgtttttatgcatgcaagcccaatgcttgcgctgcgttggattctaggccgggcgaaaacccccggaggtaacgaagggatgcgtgtatgtcacagcgctgttacacagaaaccagtgcggttgccatactcggagccagcggcaggcgcggcaacagcacggcttggtaagcgtgatagagatccgccttgcccggccagatgctgcccgccggctggttgtcactatcgagttcgtggtgccagctaccattttgcaaatcgatgaagtggctcgcgcagaactcccagaagcagcgataccagtcttcgtaaacctgctctccggttcgccagagcagcgctgcggctgcggcgctggcttcggcgtgtacccagtgcaagcgcgcagggaccaccggtcggctcgcccagtcgagggtataaaccagcccaggcgtgccgtccacacaccaggcatcacgacaggcacgggcgaagagttcgcgggcgttgtccagtagccatcgcggcgcatcgagcccggcgcgcagcaaggccgcttccaggtgcaggagcagccgcgcccactcgaaactgtggcccggcgtgctgccatagggacggaacgggtcggcgcggttgtcgtcgttgtaatccggcaacgcttgccaggagcgatcgaaatgctcgaccaccacatgcccacgcgtcgccgcatgaccttgaatcacgcgttcggcgatgcgcagggcgcgttgcagccataccgtggatccggtggcatcggccagggcgagaaacgcctcggtggcgtgcatgttgctgttggcaccccggtacgcttcctcctgctgccagtcccggctgaaactttcgcgcaaagcgccctcttcctcgctccagaaatacttctcgaggatcgttatcgcctcttccagcaaggccgaggctgcaggccgtccggcaacctttgcggagctgcctgccaaggcgacgaaggcatgcaagtaggcggatttgtcgccggtgcgcgtggcatcggcgaaccagccgccgaactcggcatcgcgcaaggcgccttgcagcgccgctacgccgtgatcgaccagctcggcgtagccggggataccctggatgaccgccagggcaaagcaatgggtcatacgtgtggtatggatcagttcggcgcgcgcgccatgcggaagtcttccgtctgcatcgagcgccgcgaatccgtcatcgactcgcgaggctcgggcgaacggtagcaggcgtatcccttcaccagccaaccaagccaggtgagtgggtttttgcagccagctgccaaggggtaactcaggtgatctcattattcttattcccaagaacgggtattcgtcgccatccaacaccgccatggcgcaaggcaacgtcgcggttgtgacgacacccatgaagaaatgttcgtgtagagatgatgtcgctgatagaaaccagcattggccgagtctagcgggcgcccggccgccgtcaggtaacgaaagcgtcgcccttcgtcacgagtcagtgacattcactcgggcgttctgggcaaccgcaacgtcactcgcagcccgccttgcggaagattgcacaggctgatctcgccgccatggctgtgggcgatattgcgcgcgataccaaggccgagaccgtagcccggttgcttggcggccaggcggaagttcggctcgaacacctgcttcagccaagcctccgggacgcccggcccctcgtcatcgacgtgcaaggcgaacgcctcagcatcgtcttcgatgaacaagtgcgcccgctcgccatatttcaacgcgttgtccagtagatttccgatgcagcgtttgagcgccagtggcttgccggcgtagggtgcgagcgccctgccctgaaccgttacgcgaccattccccgcaggtgcgaggtacggctcggtgacgcaatcgagtagcagattgagatccagcggctcgatgttttcgtgaatgtcggtgtccttgacgcactgcagcgcacccttgaccaacaattccaactcatcgagatcgcggctgaacttgcgctgcagtgtttcatcctcgagcagctcgacccgcaaccgaagccgcgtgatcggcgtacgcaaatcatgggagatggcgctgaacaactggctacgctcggtcaggtagcggccgatgcgctcacgcatgctgttgaacgcccggctgacctctgccacctcgctgccgccggcctcaggcaacagtaccgcctcgctgcccagcgacatctcgcgtgccgcctgcgccagctgtttgagaggccggctctgccagtgcacgagaatgccgatgaacaacaacaggaaactggtggtgaggaagatgaaccagagctgctgaaccggaatgctgtcgctttccagactgacgtatggggctggcatcagtgaagcaaggtaaagccattcgccgggcgcgatctgaatttgcgtcaccagcacgggcggattcagtggctccaggctcaacgcgtaatgcgcccaggagcgcggcagctcgtcgagtttcagcccgccgttgaatatgcgcaggtcgtccgggctgacgaagctgaccgacatgtcgaccgcgttgccgagccgctcgcgcaggacctcgtcgacctcggccagcaccgcctgcttgcgctcggtcggcggcaagatctgcatttccagcggcttgtcgttcaacgagacgaagaaacgcgtaccgcccatgctgcgcagctggtcgagcaccagcggacgataaccgagcggcaaggaccggaaatagctgacgctcgcggccatcgagtgcgccaggctgcgggcgctggtcagcagaccttccatctggctggctcgcagttgcgagacccagataaagctcgataacgcctgcgccaacagcaccaccagcaaggtcagaaacagcatccgaccgagcagcgagcgcggcaccggcaaccagcgacgcttagccgaacgcatcatgatgcggcacgacctgcgcggcgagcaggtatccgctgccgcgcacggtacgaatcagacgtgggcacttgccggtatcgcgcagccgctgacgcagacggctgaccgccatatcgacgatacgctcgagcggcattacctctcggccgcgcgtggcattggcgatggtgtcgcggtcgagaatctgctgcggatgatcgagaaacagcttcagcagcgcaaagtccgcaccggacagcaatacctcctcgccgtcctggtgaaacagccgatggctgaccatgtccagccgccactcgtcgaatgccagtacgtcactggtacgctcctggctgaaattggctcggcggagcaatgccttgattctggccagcagctcgcgtgggctgaagggtttgccgagataatcgtcggcacccagttcgaggccaatgacccggtctgcctcgtccgagctggccgtcagcatgatgatcggcatctgcgccagacgctgatgcccacgcacccaacgacaaaggctgaagccgtcttcgtcgggcagcatcacgtcgaggatcaccaggtcggccggatcgctagtcatcgcctgtcgaaacagcgcgccatcggctacggtgcgcacctgaaagccggaacggctgaggtacgcctccaatagttcgcgtatttcctggtcatcgtcgaccagcagaatcgatcgtccagcctggttcacctggcatcctttctcttgttattgagcgggtcaacgtccgccagacgcaccctccagcaattgctgcagcgccacgcccgcgccttccagtccgggataatccgccgtcacgacccagactggaatgtcatcaaagtagcggctcatgcagcccttgtcgcggaaactttggcggaagccgctacgcaggaagaactcgacgaagcgcggcacgataccgccagcgatgtagaccccaccgcgtgcgcccgtggtcaggacgttgtcacccgcgattcggcccagccagacgcagaactgctccagcaccgcgacggcgtagccatcaccaaccaacgcggcggcggtcacttcggccggcgtggtgaatcgtggcggctcgccgtcgacagcgcaactggttcgatagagttcgagcaaaccggcaccgctgagtatcgcctcagcattcacgtgcccgaacttttcgtgcaggcgagcccacaacgccgcctccctggccgtgccgatcggcaggcagacgtgcccaccctctccaggcaacgcgcgccacgcgccaccgtccagcggcagcagcgtggcgacaccaaggccggtgcccggcccgatcaccaggcgagcccggcccacttccgattgaccggggcacgcttcgatcagctcgccctcacgcaggcgcgtcatgcccaacgccatcgcggtgaagtcgttgatcagcagcagatcgctgagcccgagctcctgacagaagaccttgcggttcagccgccagtgattgttggtgaacgcgaagtcatcgcccgacaccgggccggcacaggccagacacaccgcctgcaacgcctcgacgctctgcccgacgccttgtagataggcacgtatggcatcttccgggcgcggatagtcgatcgtcggcaatacccgcaccgactcgatctgctggtcgcgccacaatgcgaaacgtgcattggtaccgccgatatcacctaccagcgccgtcacttgagcgcctccaactcctcggtgaacacgctcgcgcctttctcagccgggctgaacgccgcacgaagaaagccgaacagctcacggccgcagccgatgcccaggtcgctcggtgccttcacagcttcacggctatcgaattcggcctggtcgaccagcacgcgcagctcgcccgtctcgccatcgacgcggatgatatcgccgtcgcgcacccgacacagcggaccgccatcgagcgcctcgggactgacgtgaatagcggccggcaccttgcccgacgcgccggacatgcgcccgtcggtgactagcgcgaccttgtatccgcggtcctgcaacacgccgaggaacggcgtcagcttgtgcaactcgggcatgccgttggccttcggtccctggaagcgcaccacagcgatgaaatccttctccagctcgccgttcttgaacgcctgcgccaactcgctctggtcgctgaatacccgcgctggcgcctcgaccacgcggtgctccggcgcgaccgccgagatcttggtgacaccacgaccgaggttgccttccagcacgcgcaagccgccttccggcgagaacggccgttcggccggacgcagaatcgcttcgtcgagactggcctgcgggccctcgcgccagaccagccgaccatcctcaaggaaaggctcctgggtgtattgcttgaggccctgccccatgacggtgtagacgtcctcgtgcaacagcccggcgtccagcagcgtgcgtaccatgaacggcacgccaccgcaggcatggaagtgattcacgtccgcctgaccgttcggatagaccttcgccagtgtcggcgtcaccgcggaaatgtcggccatgtcctgccaggtcagctggatgcccgccgcctgcgcgaatgccggaatgtgcaaggtgtggttggttgagccaccggtcgcattcagcgccaccacggaattgatgatcgccttctcgtcgacgatcttgcacagcggcagatagttgcccgactgcgacgtcaggcgagcgacttggcgggccgcctcgcgggtcagttcgtcacgcagcggtgtataggggttgacgaaggacgagcccggcaaatgcagccccatgatttccatcaccacctggttggtattggcggtgccgtagaaggtgcaggtacctgggctgtgataggacagcatctcagactccagcagctcctcgcggctggccttgccttcggcgtaacgctgcctgacttcagccttctgcttgttcgggatgccagaaggcatcggcccgcctgggacgaacacggccggcagatggccgaagcgcaaggcgccgatcatcaggccggggatgatcttgtcgcagatccccagatacagggccgcatcgaacatgttgtgcgacagggcgatcgcggtcgccatggcgatcacctcgcggctggccaggctcatttccatgcccgcctcaccttgtgtcacgccatcgcacatggccggcacaccgccggcgaactggccgatcgagccgacgtcgcgaagcgcctgcttgatgatttccgggaaatgctcgtacggctgatgcgccgacagcatgtcgttgtacgccgagacgatggcaacgttggcttcgttcatcaggcgcaacttctgcttgtcgccggctgaggcgcatcccgccaccccatgtgcgaagttggcgcattgcagtttgccgcgctgaggcccgtcgctcgctgcgccggccatctgggcgagatagcgctgccgcgacggacggctgcgctcgatcaaacgttcagtaacttcttgaatccgcgggtgcatgccatcactcctgctcgtgaatctgtagttttaccaacaaaagaacatgtattcgggcttgatttctattttgacaggaataatcttgtaattcctacaacaaattccatccagggacccaatatgactattcgcatcgccatcaacggcttcggccgtatcggacgcaacgttctgcgcgccctgtacagccagaattaccgcgagcatctccaggtcgtggcgatcaacgatctgggcagctcggcgatgaatgcccacctcttgcagtacgacagcgtccatggccatttcgacgcaaagatcgaggttggtgacgatcggttgacagtcaatggcgactcgatcgcagtgacggcgatccgcaacccggcagagctgccctggcgccagcatcaagtcgacgtggtgttcgagtgtaccggtctcttcacctcgcgcgagaaagccagcgctcacctggaagccggcgccggcaaggtcatcatttccgctccggcttcgggcgccgatgccaccatcgtctacggcgtcaaccatgacattctgcgccagtctcaccagatcatctccaatgcctcgtgcactacgaactgcctggccccggtggcccaggtcctgtcgcgcgagtacggcatcgcccatggcctgatgaccaccatccacgcctacaccaacgaccagaacctgtccgacgtctaccacagcgacccctaccgggctcgctcggctacccagtcgatgatcccgaccaagaccggtgccgccgaagcggtcggtctggttctgccggagctggcgggcaagttgaccggcatggccgttcgggtgccggtgatcaatgtctcgctggtcgacctgaccctggagctgaatcgcgaaaccacagccgaggaggtcaacgcgttgatgctcgaagccagccagcgctcgccgattctggcgtgcaactcgctgcccctggtgtcctgcgacttcaaccacaacccgatgtcgtcgattttcgacaccaaccacactaaggttagcggacggttgctgaaagtgatggcctggtatgacaacgaatggggtttctccaaccgcatgctggatacctgccgagccctgcacgaagcaccataaccagacttggcgcctccccgcacagcaaggaagaccatgaaccgcatcgatttcgtcaccgctacactgccggcgcgcaagcgcatcgcgctggtcgctcacgatcactgcaaggaacgcctgctggaatgggcggatcggcagaaggacaagctgctgaaccatgaattgcttgccactggcaccactggcgtactgctcgagcgtcgcctggggcttgcggtggaatgcatgatcagtggtccgctgggcggggatcagcaaatcggtgcgcgcatcgccgagcggcgcatcgacatgctggtgttcttctgggatcccttcgaaccacagccgcacgacccggacgtcaaagcgctgctgcgggtcgccgctgtgtggaacattcccctggcagccaacgagagcagcgccgactacctgctttcgagcccgctgcttgatgaagcccatgggtatcgaatccctgactacgcgggctacctgaccaaccgcagctaaccgaacccggcgggcgtagcgatacaagcaatgcgttaacggcgtcccgcgcgcttgggctattctgagcttcgctctggaaacgccaccaccgccatgctgcaatgtcatgtgactaccctgcactcggtcgcgctcgtcctggagctgatcgatgccgagacggccgaacagttgctcagcgggagtggcatcacccccgaggatctccatcacccggacatgcgcatcacccgtgcgcaagaacttcgggtgtttgccaatgcactgcagcactgtcacacactcggccttgtcctggggcgtcgcatgcacgtgtcgtcttacggcccgcttggctacgcgatgctttccagcacgacgctgggcgatgcactacggctcgcgctggactaccccgctctgctcggcacctatttccatctggagttgctgaatgaaggcgataccgtctggctctcagccggcgactatcgctacacggcggagctggagaccttcagcgtcgagttctgcctcgcctcgctgaagcaggtgtgcgacgacctgctcggccgtccattggcgctgaccgcggcgacttttcgtcatccggttccggcgtacgaagaggcctatctcggtagctttgcctgcgagcgacgttttctagcgcgacgcaacgcgttcggcttctcggttgcggacatgcagacgccccttcccctggccgaccgggtcaccacgcgggatatgcgtgagctgtgtcagcgcctgaataacgaattcatcagtcgccaagggatcgtcgagcggtgccgtgaaatgctggccgggcagttatgcgagccgcccgggttacatggcctggcgcgccagctcaactgttcctcacgcaccctgagacgccacctgcaggaagccggtacgggctaccaacggcttctcgacgagctgcgctatgaacgcgcccgcgccctgctggaagaaggctcgctaagcgtcaacgccatcgccgaagcgatgggcttcagcgagaccgcgagcttccgtcacgccttccagcgctggagcggactcgcgcccagccgcttccgcgccgagcgcggcagcctgccccacacgctgcgcatcccccttatttgaacccagcggctcgctcggcctatcgggaccctctcgcagatattggccacttcgatcccctcttggccgcttcgatcgttctcagccgccgatttggatacgaacaatgaaggcaggagccacgaggagaaaataacaatatgctcacgttctacagcgacgaccatcgcctgcatcacttgcagggcgaaatggtcgcaggcgagccgaaaccttgcttcgaaatgccggcccgtgccgaccacgtgctggcacgggtgcgcgagcggggactcggcgaggtgcgccccagcaccgacttcggactggcaccagtggcgcgcattcacacgaccgaatacctcgatttcctccagaccgcctgggatcgctgggccgctgaaggcaatagggccgacctgtcgcccggtgtgtttccggcccggcatctgcgcgccaaacgcccggacgacctctacggacagctcggctaccacagcttcgacggcttcgcgggcatcaccgcaggcacctggcaagccatctataccgccgcccaactggcactgaccggccagcaagaggtcgccaacggcgcgcagggtgcgttcgctctctgccgcccaccgggccatcacgccagcgcggatgtgatgggcggttactgctacctgaacaacgccgccatcgctacccaggcgttcgtggaccagggcgccgcacgcgtggcgatacttgacgtggactaccaccacggcaacggcacgcaatcgattttctacgagcgcagcgatgtattggtcgccagcatccatgccagcccatcgttcgactatccgcattttctgggctatgccgatgagaccggagccggtgccggagagggattcaacctcaatctgccccttgccgccgccagtggctgggacgcctggggtgcggccctggacaccgcttgccgtgccattgcccactgcgcacccgatgcattggtgatttcgcttggggtcgacacctacaaggatgacccaatctcgcgtttcaggctcgacagccctgactacctgcgcatcggccaggccatcgccgggcttggtcgcccgacgctgttcgtgatggaaggaggctacgccgtcgaagaaatcggcatcaacgccgtcaacgtgctcgaaggcttcgagcagggttaacccccgacacgcatccactgaaggagagaatgatgaatcgttatcgccaatggatcacggcagcctgttgcggggccgccctgctgggctcgcaggcccatgccgccgaacgagagttgaaggtctacaactggttcgactacatcacgccgcagaccctggaagccttcaagcaagactccggcatcaagctgacctatgacattttcgataccaacgaagcgctagaggccaagctgctggccggcaactcaggctatgacttggtcgttccctccaatgtgtttctggccaagcaggtcgaggccggggtattccagaagctcgaccgcagcaaactgccgaactgggaacatctgaacccgcacctgatgaagctgatcgaggctaacgatccggggaacgcgcacagcgtcccgtacatgtacggcaccgtgctgatcggtttcaacgtcgagaaggtcaaggcagcgctcggtgaagacgcaccggtgaacagttgggatctgctgttcaaggaagagtacgtcagcaagctggccgactgcggtgtggccatgctcgattcaccgtccgaaatcttgcccatcgctctggactacctcggcctaccgcccaacagccacgaccctgacgattacgacaaggccgaagcgctcctgaccaaggtccgcccctttgtgcgctacttccacagttccaagtacatgagcgacatagccaacggcgagatctgcgcagcgatcggctactcaggcagcttccatcaagcggcgaacaacgccaggcaggccaacaacggagtgaccgtggacatgcgcctgcccaaggaaggcgcgccgatctggttcgacctgatggcgattccaaaggatgccaagaacgtggatgaagcccacgcattcatcaatttcttgctccaaccgcaggtgatcgctcccatttcggacttcgtcggctatcccaaccccaacaaggatgccactcccctggtcgaggaatcgattcgcaacaacccgaacctctacccgaccgatgaggcgatggagacgctttatacgctcgaaccgctgccgagaaaggccgagcgcgcccgcacccgagcctggagcaaggtcaaaaacggggtgtaacgacgccgacttaacgtgtcgacgtgccggacgatacggtttcgtccggtagctccgggggctcgtcggcctggtcgagaagatcatcaaagtcgaccttgagtccttgttccataccatccagctcggcgagcaggctccggaaactggtttgctcacgcggcgcttctgcttccatctccgcgtcggcacgggcctgcaacgcggacggcaccggcgcgtcctcgacgtcgaccggcaacggctcgggctccatctcccgcagcaccgccagcggcggcaattcatccaggcttttcaggttgaagtgatcgagaaattgccgggtggtggcgaacatcgccggccgcccaggcacatcgcgatgaccgacgacccggacccactcgcgctcaagcagcgtcttgacgatctggctgttgaccgccacaccgcgaatctcctcgatttcgccccgggtgattggttgtcggtaggcgatcagcaccagcgtttccagcagcgcgcgggaatagcgctgcggccgctcttcccagagccgcccgacccagggcgaaaagcgctcgcgtacctgcagacggtagccactggcaacctgcttgagctcgaatgcgcgccctttgcagctcttttcgaggacctccagcgccttgcgcaacagcgccggtgccgggcgctcggcctcgtcgaacaattcggccattcgctccatcgacatcggcttgcccgaagccagcaggagcgcctcgagcaaggaggcgagatctttgggatcggagagattcaaccctgattacctccactcatacgaccccctcttccgcccgagcgcgcacgtgaatcggcgcaaaaggctcgttctgcaccagttcgacgagtgactccttgatcaactccagcaccgccatgaacgtcaccacgacgccgagcctgccctcctcgaccgtgaacagcgtggcgaacgcaacgaaggccccgcctttcaaccgctccagcacttcgctcatccgttcgcgagtcgacagcgtttcccgcgtcacctggtggctttcgaacagatcggcacggcgcagcacctcagccatggagatcagcaactcctcgagactcacttccggcagcaacttgcgtgcccgtgcatccggcgcatcgattcttggaacgtgcagatcgcggccgacccgcggcaattggtcgagatcttccgaggccgccttgaagcgctcgtactcctgcaaccggcgtatcagttcggcgcgagggtcgagctcgtcctcttccacctcggccgaacgcggcagcaacatgcgcgacttgatctcagccagcatcgcggccatcaccagatattcagctgccagctcgagccgtacggccttcatcagctcgacgtagcccatgtactgacgggttatttcggcgacgggtatatcgaggatgtcgatgttctgcttgcggatcaggtacagcagcaaatccaacggcccctcgaatgcctcgaggaacacttccagggcgtccggcgggatgtagagatcctgaggcaggttgttgaacgcttcgccgtagaccagcgccagccgcagctgctcaccaggcggaccgtttaccgcctcggtctggggttgctgcatgctctctccaagtaacgtacgggattcgaatgagttcggcggaccgccggcgcgcgctagcgatagctcaggcccatggcctggcgcaccacgaccagggtttcgcgggcctcatcgcgcgcctgctcggcgccctcggccaggatgctacgcaccaggtccggattctgttcgtaatcggccgcgcgttcctgaagcggtgccaactccagcttgatcgcctcgatcagcggcgccttgcattccaggcaaccaataccggcagtgcggcaaccctgctcggcccattgacagacctcatcgtctgaatgcgcgagatgcatctgccaaaccgggcaacgtgtcggctcgccgggatcatgacggtggacacgtgccggatcggtcggcatgcgcttgatcttttcttcaatgtccgcaggcgtgtcgcgcaggaaaatggaattgctggcggatttggccatcttgccgccatccagaccggacaccttgggtgaatcgcttagcagagcctgcggctcgggaagcagcaacctgccgctcccttccagatagccgaacaggcgctcctgatcgccgagggtgatggtctgctgctccttgagcagggctcgcgccgtattcagcgcctcgagatcaccctgctcctgataggttttgcgcagactggcgtagagcttggagctcttcctgccgagtttgcggatcgccgcttcggccttcgcctcgaaatcctcctcgctcccataaaggtggttgaagcgccgcgccacgtcgcgcgcgaactcgatatggggcaactggtcggcgccgaccggtactaccccggcgcgataggccagaatgtcggcggcctggagcaacgggtagccgaggaagccgtatgtgccgaggtccttgtgctgcgaatcgagctgcagctctttataggagggcacgcgctccagccaggccagtgggcagaccatcgacagcaacagatgcagctcggcatgctccgggacctgggactggatgaacaaggtagccgagctgggactgacgcccgccgccagccagtcgattgccatgtcctggacgttgcgcgctatgtcagggcccgccgcctgatcggtggtcagcgcgtgccagtcgacgatgcagaagaagcactgatattcgtgctgcaatctgatccagttcttcagtacgccgtgatagtgcccgaggtgaaggcggccgttgggccgcatgccagagaccacacgtcgctgcgaatccatggagctcaaaagggtttcctttgttggttcttgacagggcgagcccggtcagccggcgaacgctgccggatcaccgcagccgacccgcacgatctccggctcgccatccaccaggctgatgaccgtggacgcttcgacgccaccgtaaccgccgtcaatgatcaggtccacctgatgttccagcgtctggcggatctcgtagggatcgctcatgggctcggactcgcccggcaggatcaggctcacactcatcaagggctcacccaactcggccagcagcgcctgagcgatgggttgcgccggcacccgcagaccgatggtacggcgtttgggatgcaacagcatgcgtggaacctcgcgagtcgcattgaggatgatggtgtagggccccggcaggttcgtcttgagtagacggaacgcagcggtgtccaccttggcgaacaggccgagctgcgacaggtcgcggcaggccagcgtgaagttgtgcttgtcatccagctgacgcaggcggcggatccgctcgatacccgccttgttgcccatcgagcagccgatcgcgtaggaagagtcggtgggatagaccaccacgccaccgtcgcgaatgatctccacggcctgcttgatcagcctggcctgggggttgtcggggtgaatctggaagaactggctcatggaaactccctgctcagcgggcaacagactcgcatggttcatgatcgaaatgcctccacacaggctgcagatcttctggcaagctccggtacattcccagttcagaccagtcgcctggtgcatggaaatcgcttccgacactggccatcaaaccgaactcacgggtcagaatcgacagaccgccaacctgatccagcggctgcatgccgttgactacctccaatgcatggccgcccgcctcggcgaactcggtgaccagacggcgccgtttgctgcgcgtgaggtcatattgccaagggtgcgccaggctgacccaggcaccggcgctgcgcagggtcatcacggtctgcgtgagactcggccagtgctgcttcacgtccccgagcttgcccgagccgagccacttgcgaaacgcttcggcacggtcacggacatgccctgcacgtaccaggaactcggcgaaatgtggccgcgccggggcattgccgctgtcgcccagctcctgctggatgccccgagcaccttccagtgcgcccggcatccccttcgccgccagccgctgggcgatcaactccgcacgtagccagcggccgtcgtgcagcgcctcgatggcggcctgcaaaggcgcagcgtcctggcggaaggcgtaccccagtatgtgcacggtggcgccgctccagacgcaggacagctcgataccgttgatcagccggattcccagcgagtcggctttggcacgcgccgcatcgaggccttccagcgtgtcgtggtcggtcagcgcgagcatctcgatgccccgtgcatgtgcccgttcgaccagcgcctcgggtgccagcacgccatccgaggcggtactgtggcaatgcagatcaacaatcattccgacctattctccaggaggttggcgacttacgtttctgaccgtcagggccagcactcgtgccgtcatccgcctcgtcaaagcttgagccacgtccccgaattgaccggcgtatggcattctgccaaggacgcggtttggtattatgccggccactaaccgcttctggctctctctcgtgaaacaaataatcgatttcatcccgctgttgctgttcttcataacctacaagctcgagcccagaaccttcgaagtggccgacctgagcctcaccgtcggaggcattttcaatgccacggccgtgctcatcgtcagttcggtcatcgtctacgcagggttgttcattcaccagcgccgcctggaaaaaggccaatggttgacgctgggcgcctgcctgctgtttggcggactgacgctggcgctgcacagcgagaccatcctcaagtggaaggcaccggtcctgaactggctgtttgcgctggccttcatcggcagccatttcattggcgataagcccttgatccaacgcatgatcggccatgccgtgcagttgaagccggcgcaatgggcgcaactgaacgtggcctggatcctgttctttctcgtctgcggtttcgccaacctgttcgtggccttcgtctacccgtccatctgggtcgacttcaaggtcttcggcagcctcgggctgaccctgcttttcatggcgggccaggcgatctacctggtgcgccacgtgcgccccgcacccgaacaaccctaggaggcaacatgctctacgccatcatcgctaccgacgtacccggctcactacaaagccgcctggccacccgcccggctcacctggcgcgtctcgagcagttgaagaacgagggccgcatggtactggccggcccgcatccggcgatcgacagcaatgacccaggcgaggccggttttaccggaagcctggtagtcgctgagttcgactccctgcaggccgccgaagcctgggccgcggccgacccttacaaggccgccggcgtctatggagaggtcgtggtcaaaccgttcaagcaagtcttcccctgaatcgatcgcccacgccacagctacggtcaggccgcgattctgcggccgttgaggaaaaaggagttccgatgcgccaaggttcgctgcccctgatgcttgttctgagtcttgccatggcttcggcgcaagctgacgaagatacgaccgccccaaccctcgaacagctggttgaactgacgcaaagcctgcccgagaacgaggtgcaacgtgaatcgctgagcaccggcctcgatacggccatcgccgacgccgaacgggctcagctgtcgcatctgcgccaggagaaccatcggctgcgtatgcagctgcaacagggacaaccgaagctacagccgcccctgctgaacgaccagcaacagtggtttgccgtcggtggaggcgtcggcgtgttgggttttctgctcggcgtgctgaccacccggggacgccggcgccggcaatggctgaattgaagcgagtacgagcaagagcatgagcgaactgctactgatcgacgatgatgaagaactctgcgaactgttggtcagttggctggcccaggaagggttcgtcgcccacgcctgtcatgacgggcagagcgcacgcgcagcgctggccgagcatcaaccggcggcggtggtcctcgatgtgatgctgcccgacggcagtggcctcgaactgctcaagcaactgcgtagcgaacatcccgacctgccggtattgatgctctcaggccgcggtgagccgctggatcgcattcttggcctggagctcggcgccgatgattatctggccaagccatgcgacccccgcgagctcaccgcgcggctacgcgcagtgctgcggcgcagccaacctgcaagcgcgccgacccagctggagctgggcgacctttgctacagcccggcccgcggcgttgccaatgtcggcgagcatgaagtgaccctgaccttgtccgaggggcgtatcctcgaggcgctgctcagccagcccggtgagccgctcgacaagcaagccctggcgcagctcgcgctgggacgcaaactgaccttgtacgaccgcagcctggacatgcacgtcagcaacctgcgccgcaagctcgggccgcatcccgacgggcgtccacgcatagtcgcactgcgcagccgcggctacctctacgcctcctgaacggctttacccagcctttaccctgagctgaccgcgcttgaccttgcgcgccatagactgtgctcatccggtcgaagccagaacctgtctgcaggcccctctggcgatcggtttccagctacaggagaaaccatcatgcgcaagacactgatcgccctgctattcgcctctaccctccccgccgttgccatggccatgcccgaagacggccaacaccaccgtagagaacatgcgccgttcgagcagctcgacctgaccaaggagcagcaaagccagatgcgcaagctgatgggcgagcagatgcagacccaccgtgagatcacccagcgctacctcgacaagctgcccaaagccgagcgcaaggcgatgcaggacgaactggccagcagccaggcaaagacgcacaagcagatgcgtgacctgctcaagcctgaacagcagaagcaattcgacgagatgcacaagaagatggaagccaagcgagccgaacgtgccgagttcaagcaatggaaagccgagcgcgatcagaagagctgacgcttccgaacctgacctgaaccaacccgcccgacccgctctgcctcacgcagcgcagctcgggctttgccgtggagatatgaccggtgcgatcactgttttggcgcattcttgcgaccttctggctagccatcgcactggtagcgggcctcgccgtgctgttgggacacgcactgaaccaggacagctggatcataaatcgccaccccggggtgaggaatctcgccgaaatctggaccagcgtttacgagcgccaaggcccgatcgccgcgcaattcctcctcgaacagcaccgtcgccgcttccacattgacgtgcaggtgctggccgagaatggccagcccgccattcgcggcacctttccagctcgcgccgccgcgttcgaggcacgccaggagaaccgtgacggcggcctgccctggcgccggctgaccaccgactacaccagcccgctatcgggcgagacctacctgttcatctaccgcatccccaactccgaactgcaagcgtggcatcgcggcagcctgttctggccattgagcgccatcgccatcgcccttgtcgtactgaccggcttcagcctgctgctcaccctgtccatcacccgcccgctcgatcgcctgcgcggcgccgtccacgacttggggcagaccacctatcaacagaattccctggcccgcctggcgaaccggcgtgacgaactcggtgtgctggccaaggacttcaaccgcatgggggcgcgactgcaaagcctgataaacagccaaagacagctattacgcgacgtatcccacgaactgcgttcgccactggcgcgtttacgtattgcccttgcgcttgccgagcgggcgacaccagcggagcgtgaagtcatctggccgcgcctggccaaggagtgcgatcgactggaagccttgatcagcgagattctccagctcgcacgcctggatgctgacccaggcgctgccgcgaatgtcgatctgccggcaatgttcgagcagttggcggagaatgcgcgaatcgtcgcgccagcccagcgcatcgaaaccagaatggataccgatatcgcactgcgcggctggtcggacatgctcgagcgggcactggataatttgctgcgcaatgcgctgcgcttcaatcccgaaggcgaaccgatcgagctgggcgccagaaaggatggcgactggttgctcctgagcatccgcgatcacgggccgggcgtcgacgacgctcatctcgcgcggctgagcgaacccttcttccgtgctcccgggcagaccacggccggccacgggttagggctggcgatcgcccgtcgcgccgccgagcggcacggcggcgagttgctgttgagcaatcatccgggcggcggcttcgtagccagtttgaaactgccaacgagcccgaaccgtacagcccttgctcgcctggattgaacgctactggccgccatcccagcgcgtaacgaatgagcgcggattcaacgccggcggtgtacggaggtcgccttccggggtcccaaggtagatgaaacccaccacttgctcgttgtcggcaaggcccaatcgctgcgccacatgcccatcgtaggcatattcgccggttcgccagacggccccgagtccctgcgcatgtgccgccagcaatatgccgtgcgccgcacaggcaaccgcgagcacctgctcggaggccgggatcttcggatgcggcaatacctgagcgatcacgatcattaccatcggcgcgcgcagcggcatcttgcgcggcttgcccagggcctcttcggtggcatcgggctcacgtaagcgaagcgcctcggcaaacacatctcccaagcggccccgcgcctcgccctcgacggtcagaaaacgccagggccgaagctggccgtgatccggggcgcgcaacgcggcgcgaagcagtacatccagctgggcagcggtcggtgccggatccacgagccgcgttacggaaacacggtttagcaacagttcgagagcatccatctgaaaacctccaaaaacgaatccgacattctaggatgtcggcacgctcgtgtggcaatcgatggcgccaagcacgtaccgctggaggtcaggccacccggtcgggtgaaagctgtggctccagtggcggcgtcaacggaggcaagccatgggccgcacgggccgcatcgcaatgcgcgttgtgctggccatcggcccaggacgcgtcgaactcgcggcaggtgctcgaccgctgttcatacatcgtgcagcgcaccccgcaaccgacgtcgcccataagcccaacacaacgtgccggcttggactcggtccccaacatcgcgacatggaacgggctgacctggacggtggcggcatccggcaccgtaccgccggacgaggcgcattcgccccagaagaaagacacacgaaagtacgcgcagcaggcgccgcacgtgaggcagggattgtcgatcgacatggaaggatgaataccgagaaaccggcaaagggccggcaccgggcggctattctattcatcgccgcgaacttgggaagagccccaaccgccccgtcgcaaaagatttttcgccaggccgatcgccggtttactgccgcggtgacaggggtagaatgaccgcctcatttttcgagccgagcatcaatcaaaaatggccttgccgacgctgcgcattatcggtttcatactcggcatcttcctgatcaccctcgctgtcagcatggtcattccgatgatcacgctgttcgccttcgatcgcaccgacgatctccaggcctttctctgggccagcctgatcaccttcagctccggcatcgcactggtagctccgggccgccccgaactggctcaattgcgtccgcgcgacatgtatttcctgacgacggtcagttggctggtggtgtgctgcttcgctgcgctgccgatgatgctgatccaccacatcagctacacgaatgccttcttcgagaccatgtcggggatcaccaccaccggatctaccgtactttccggcctggacaccgcgtcgccgggactgctgatgtggcgatcgatgcttcaatggctgggcgggatcggctttatcggcatggccgttgcgatcctgccgttgttgcgcatcggcgggatgcgcctgttccagaccgagtcgtcggactggtcgcaaaaggcgatgccccgctcgcacgtgatggccaagtcgatcctgttcgtctatctcgcactcaccttgctttgtggcatctgctactggctcagcggcatgaccccgttcgaggcgatcaaccatgccatgaccaccatctccaccggtggttattccacctcggacagctccatgggcaagttctcgcccgccgcgcattggactgcggtcgtcttcatgttgctgggcggcttgcctttcatcctgatggtctcgacggtgcgggggaaccgctacgccctgattcacgatcaacaggtgcaaggctttgtcgcgatgctgttcgcgatgtgcatcgcattcgccatctggctgacgctcaattccgattacgacttcctcgacgcgcttcgtatcgtgtcgctgaacgtcgtctcggtggtcacgacgaccggcttcgcgctgggtgactacacccagtggggggaattcgcggtactggcgtttttctacctgaccttcatcggtggctgctccggctcgacgtccggcggcctgaagattttccgtttccaggtggcctattccttactgcgtgccaacctggcgcaactggtccacccccgggcggtgatcaagcagcaatacaatcgccacccgctcgacgaagaaatcgtccggtcgatcctgaccttctcgttctttttcaccatcaccatcggcgcgctggccctggcgctcgcgctcttgggtctggacatgctgacggccttgaccgcggcggcaactgccgtctgcaacgtcggtccgggcctgggacccatcatcggtccggcgggtaatttctcgaccctgccggattcggcaaagtggctgctgtcgctcggcatgctgctcggtcgcctggagatcatcaccgtgctggtcatgctgacgccttcgttctggcgacactgagcggcgttacaactcaccgatgtcttcgttccacagctcagggcgctgggcgatgaagccgcgcatcatctcgatgcaggtcgcgtcctgcagtacgtcgatctcgacaccgcggtcgcgcagcaatcgctcctcgcccatgaaggtctggttttcgccaatcacgaccttggggattccgtaaagcaggatggcgccgctgcacatcgaacagggcgacagcgtggtgtagagcaccgagtcggcatagacgctcgccggttgccggccggcgttctcgaaggcatccatttccccgtgcagcacggcgctgccttgttgcacccgccgattatgtcctcggccgatgatttgccctcgatgaacgatgaccgagccgatgggtatcccaccctcggccaaccccttcttcgcctcatcgagcgccgcctgcatgaatgcgtccactgtctgcctcctgataagcctgcgagtgttccgggccgatcggccattgttgggggctaagcgatcagcccttgcgcttgatcagccgtccaccaagcgtaacggcggcgaagaccaagccaccggcgaggatgccgaaagccgcgtcgagcaccgtcggagtcagcccggcaagcaccgagccgaaatacggcagcgctaccgtgtgctcggcgctgctctcgatccactcgtgcacggtcttgaagccatgggtgaggatgccgccgccgaccatgaacatggcagcggtgcccaccactgacaaggatttcatcagccaaggggcgactgcgagaattgcgcgtccgatccgctgcgctgcgccgttcgcgcttttgctcagcgccagcccggcatcgtccagcttgacgatgccggccaccacgccatacacgccgatcgtcatgatgatggcgatgccagcgagaaccaccacctgctcggcgaacgatgccgtggccaccgtaccgagcgtaatggcgatgatttcagccgacagaatgaaatcggtgcgcaccgcaccgctaatcttgtcccgttcgaaggcaaccatatcgacgctcggatcggacagcgcatcgatctgccgagcatgagcgtcatcatcggcatgcagaaagcggtgtgccagcttctcgaaaccctcgaaacagagaaaggcgcccccaagcatcagcagcggcgtgactgcccaggggatgaacgcgctgatcaacagcgcggccggcaccagaatcagtttgttacgcagcgagcccttggcaaccgcccagacgacaggcagctcccggtcggcctttaccccggtaacctgttgcgcgttaagcgccagatcgtctccgagcacacctgcggttttcttcgcagcgactttggtcatgacggagacgtcatccagaacggtggcgatgtcgtcgatcaaggcaagcaagctactggccaaaggtaggtcgtcctagtgatagagagaaggcaaagcggcaggagcatgccaccgtttcgagcggatgaacattaaggcgccgggcggtggtacaagttccgccatgtcggcgcgggcccgaccgccgcagtcgcgacgaggcgtcgagcgatgatccggcagacggcgtggccaggagccatcgatgaatctagactgcgatgtcaacgacaacaagaggtgcaacatgagcacgcatgccgccgaacgctttacgagattcgccgatttctacccgttctacctggcagaacacagcaaccccgtctgccgtcgcctgcattacgccggtagcctgctggtgctgggcatactggcctatgcactgatcagccagcaatggctctggctgctggctatgcccctggcgggctacgggttcgcctggatcgggcatttcatcttcgagaagaaccgaccggcgacattccaatatccgctgtacagcttcctgggtgactgggtaatgctcaaggatatgctgaccggaaagatccgtttctagccgtcgagcgggccgtacaccgatttaccgcgcctcgtcacggattgagatgggtggtttggcgcattggcggtgacttggttatgatcaccgatcagcaccgcacgacgcacattcgactcgaacatcgcatgctagagcggttgaatctttcagggacagtaaccaccatgccaaccgtgaccggtgaacggcgaaacggcctcgcgactcgcccgctgcgcgagtactacgcccgggttttagcctatctgagctgtgccgccacacttgccgccggtgtttacacccagcaattcgcactcgatctgttgtggatggtgccctacaccctgctatatccgcatttcgcctatcacctgagctaccgcttcaagcgcgagcaccctgaacgcacctcgcaaaccctgctgtctctcgacgccctgaacgcgggtgccggcatcgtgctgctcggctgcagcctggtgcccagcctgatgttcctgctgaccctgggtttcagcgcgctggtcatcggcagtttgcgccatctgttgctgacggccctgctggtggccggcggcatggggctggccagcctgcttgtaccgctgcgcctggacctggcaacgcctccgctggtggcggctgtcagcatcctgttcaccacgttgtacgtctgcatcaccgcctactacgtgcaccagcaaggtgaacgactggcgcaagcgcgccgcgaagtcgaggccgagcaggctaaagcagcacgtttggcccgcaacctcgccaaatacctgtcgcctcaggtgtgggaatccattttctccggcaagcgcagcgtccgcctggaaacccagcgcaagaagctcaccgtgttcttctccgacatcaaaggcttcaccgaactctccgaagagctggaagccgaagccctgaccgatctgctcaacaactacctcaacgagatgtcgaagatcaccctcaaatacggcggcaccatcgacaagttcgtgggcgactgtgtgatggtgttcttcggcgaccccaccagccagggcgcgaaaaaggatgcggtggctgcggtatcgatggccatcgccatgcgcaagcacatgaaagttctgcgccagcaatggcgcgcccagggcatcaccaaaccgatggaaatccgcatggggatcaacaccggctactgcaccgtcggcaacttcggcgccgatacccgcatggactacaccatcatcggccgcgaagtgaacctggccagccgcctggaaagctccgccgaagccggcgagatcctgatctctcacgaaacctattcgctggtcaaagacgtcatcatgtgccgcgacaacggccagatcacagtcaagggcttctcgcgtcccgtacagatctatcaggtggtggatttccgccgcgatctcggcgctaccagcagcttcgtcgagcatgagctgccggggttttcgatgtacctggacaccaacggggtgcagaacttcgacaaggaacgcgtgatccaggccctcaatcaggccgccgacaagctgcgcgacaaggtcatcatgtaataccggcgccgccgcgcagccgatccaaccgcagccggccacgccatccgcatgcagtcgaggtcaccatgtcgcccattctgtccctgcgtcattacaaccacgaccagatcatccacagtcaccatcacacgcagctggtgttcggtttgcgcgggcgtctggacttcgagatcgagggccagggcagccgtatccagcagcagttcctcgccgtcgtgcccagcgaggcgcgccacgcctgtggcagccctgacgggagcatgtgcctggtgctggacattccggacggcgactggctgcagcaacgcctcggccatcacagcgactccgcccggcgcttgctggagcaaagcgcagcgctgcacctgaacccgatgcaaagccaactggttggctggctcgcagccagcccggtcaacgacccgatcatcagcgagcaaggcgcaaccctgctcttggccagcctcgccaacggttgcgagccggcaggctggcaacgcccactgccgctggcctcgcttcgcgaccacatcgaccgacatctggcccatccgctcgaggtcagggacctggcacgactggccggcctttccgtggcgcgtttccacgcgcgcttcgccagtgaaaccgggcaaacgccacaggaattcgttcggctgcgtcgcctgcatcaaggccgggcgctgctattgagcacgcggctgacggtcggcgagatcgccgcgcgcgtcggctatgcctcgcaaagtgcctttaccgccgcactcgcccgcgaatacggaaccacgccccgcgtgatccgccgcgaggcgcacgacaaactgcgagagtgaagcgacagaccgatcgcctcgcgcgccgtagcataagcactcactgttatccgcaatgccacgaggcatcccaccgtgaggcgcatatgtttcgtatcgatctatcggccgtccttgcccgacgttgccgacccgcgctggacgtcagaccatgacccatcgcaacgccctgctggcgattcacttcggtgcgctgatgttcgggttgtccgggatattcggcaaactggcggcaagcacacccctgatcatcaccttcggccgagccggctttgccgtcgtggcgctggtactggccagccagctgcttcgcagcaacagcgcccgcgcaagctctcgccagcgggtcggcctgttgctcggcggggttctcctgggcgggcactggctgactttcttcctggcggtaaaggtcggcggggtcggcatcgccacgctgggcttcgccagtttcccggccttcacggtattgcttgaagggctgctgttccgcgagcgcacccgaccgatcgagttcgccatggtggggctggtatgcgcaggcctgctgttggtgacgccacacttcgatctcgccagcgaaagcaccgtggggctgctctacggcatcctttcgggcctgacgttcgccctgctctctctgctcaaccgagccgtcacccgcggtgtcgatccagtccaggccgcactttggcaaaacggcaccatactgttgtgcctggtgcccttcacctggagcgcgctaccggcagtgccggcactggattggctatggctggcattgcttggcgtgttctgcacggggctggcgcacagcctgttcgtggcgagcctgaaagtactgaaggctcggaccaccgcagtcatcttcgccctcgagccggtctacgggatcgcctttgcgtggtggttgttcagcgaacagcccaccctgcgcatgctgctcggcggcaccctgatcatcctggcgacggtgattaccagtcgcctcaaggcgcccgctacgccagcagctgttaccccactcgcgaagcggcccgcagcgccccgctcgtagatccgccgatatgccggcgcctgattacccagcggcgaaggccctagtgggaatggcgcggaacctcggcgccacggcaaccgacgaggaagtcgaagtcgcagccctcgtcggcctgcatcacatgctcaacgaacagccgtcgataaccaccgtcccacagcaggccctgcggcgcttgccacgccgccagccgttcttgcagctcggcgtccggtatatccagatgcaaacggccctcgtaacagtccagctcgatgaaatcaccgttacgcaccaccgccagcgggccaccggccgcagcttccggcgcgacatgcaagaccacggtgccgtaagcggtaccgctcatacgggcgtcggagatccgcaccatgtcggtgattcccttggccaataccttcggcggcaggcccatgttgccgacctcggccataccgggataacccttggggccgcagttcttcatgactaggatgcaggtctcgtcgacgtccagatcggggtcggcaatgcgcgccttgtagtcgtcgaagtcctcgaacaccaccgcacgaccgcgatgcttcatcagctccggcgttgccgcagagggtttcagcaccgcaccgctgggcgcgagattgccgcgcaatacgcagataccgccgtccttacgtagcggattgtccagcgcgcgaatgacttcgtcctcgccatagatcggggcctgagcgcagttgtcccagagcgatttgccgttgactgtcagcgcatcgggattgggcaacagctgatgttcacccagccggcggatcaccgccggcaatccaccggcgtagtagaactcttccatcaggaagcgcccggacggctgcagatcgacaatggtgggcatgccacggccgatacgggtccagtcatccagatccagttcgaccccaatccgcccggcgatcgccttgaggtggatcaccgcattggtcgaacctccgatggcggcattgacgcgaatggcgttttcgaacgcctgcttggtcagcaccttggacaagcgcaggtcctcgtgaaccatctcgacgatgcgcatgccggacaggtgcgcaagcacgtaacggcgcgaatccacagctggaatcgcggcgttgtgtggtaacgaagtgcccagcgcttcggccatgcaggccatggtcgaagcggttcccatggtgttgcaggtgcccgccgaacgcgacatgccggcctcggcggagaggaattcgttgaggtcgatctgcccggccttgtactgctcgtgcatctgccaaacgatggtcccggcaccgatgtcgcggcccttgtgcttgccgttgagcatcggccctccggtgacgacgatggccggtacatcgcagctggccgcgcccatcagcagcgccggggtggtcttgtcacagccgaccagcagcacgacggcatccaccgggttaccgcgaatcgactcttccacatccatgctggccaggttgcgggtcagcatggcggtgggtcgcaggttcgattcaccattggagaacaccgggaactcgaccggaaaaccgcccgcctccagcacgcctttcttcacgtgctcggcgatcttgcgaaagtgcgcgttgcacggcgtcagctccgaccaggtgttgcaaatgccgatgatcggcttgccctggaattcgtgatccgggatgccctggttcttcatccagctgcggtacatgaagccgttcttgtcagtggtaccgaaccattgagcggagcgcagggggcgtttatcagtcattgcgatacacctgttttcgtcggccagcccaccgggcctgccaggtttaacgttcgggttgggttacaacagccaggtcgagatggccgggaagtagagcagcagaccgagtaccgcgatctggatgacgatgaagggcaccatcgagcggaagatgtcggtcagggtgatatcgggcggcgccacactcttgagatagaaggcagcagggccgaacgggggtgatatgtaagacacctgcatgctcaccgcgaagaggatgccgaaccacaccgggtcgtagccgagcgcgacgacgatgggcacgaaaatcggcaggcagagcatggcgatgccgatccagtcgaggaacatgcccagcagcaggaagatcagcatcatcaccagcacgatgacgaagggcgcgacgtccaaaccggtgattgccgccgagacgaagcggttgccgcccatcaggttgtaaacccccaccagacaggccgcgccgataccaatccagacgatcatcccgcaggtctccagggtctgggtcaggctttcctggagcagcttgaggctgaactcgccacgcaccagcaccgccagtagcacgcccagcgcgcccatggctgccgcctcggtgaccgaagcgataccgccgtagatgctgccgagtaccagcccggcgatggcgatcggaaagaacatccccttgaacgcctcggccagggtgagccgcggcacgctggcgtccttctcctgatgcgcaccgcccatgtgcgggtagcgcatgcacatcaccaccacgtagagcatgtagctgcccatcagcagcgctgcaggaacgatcgctgccttgaacaggtcggcaatggagacgctggcgatcaggccatagatgatcagcacgatcgagggcggcaccatggtgcccaacgaaccacccgcacagaccacgccgatggcgatgcgcttgtcgtagcccaggcgcagcatctgcggcagcgccagcacaccgagcaggacgatttcgccaccgataattccggagatggcagcgagaaagaacgccacgacgatggtctgtaccgccaccccgcccggcagccggccggcgaagaagcgcatggaattgaacagatcccgcgccagccccgatcggtccagcaagcccgccatgaagacgaacatcggcacggccactagcgaatattcggtaatgaagccgaacatgcgactggccaccagcggcacggccaccgggccgaaccagccaaaggtgaagcctgcggcgaccaggccggtgacgaacgccaacggtagccccagcaccagcaacgcgaagatcgcgaaaatcatcaggtaggttgcgatctcgatgctcatttcgtggcatccgtatcaagacgcgcacgtcggtgagtcgcgatccgcaccacttgctgcacgcacatcagcgcgatggagatcaggatgacgatcttggtaaatgccgggagcggctggttccaggacgatcccgaggtttccaggcgccagctgccatcgggcgcatgagtcgcgttgtaggccagcacccaggcggcataaccgatcgccagacagaacaggatgcccagcaccaggttcagcagctccagccagctccgcttaggcggtgaaaggcgatcgagcaggatgcgaatctggatgtgccggttggtcgccagcgcatagggcccgcccagcgcgaagatggcagccaccaggaaggtcgtggtttcgtgcgcccactcggtgggcgagttgaagccgtagcgcatgatgacttcgaacacactgaccagcatggcgagaaacaccagccaggcgatcatctgaccggctcgacgaatgccgcggtcaagcagcccatgtcccggttcgggcgcgcagacgtccagatgatcgtcggaggaaggttgaggttttttcacggcagagctcctcggactatccggccgtagccggaaagccgttggtcatcgaagaagagtgtcgcgaatggcgacttagagcattcccttgtcttgcagataggtctggattgaatctaccgcctccttggcctggggactgcgatcacgccaccgcgaccactcgtcccgggcggactgacggaacttcttcagctcgccctcggaaagcgaagtcagcgtcacatcgcccttctgcttggccagcgccacctgctcctcgtctttcttctgcagatcgctgaccagttgctcggtgaacgcatcgaccgagtcttcgagaatcttctgctgctcaggcgacagctcatcccacaacgctttgttgaccgagatgtccttcatcggcatcgagtggaagccgggatagacggcgaacggcgcgtacttgtggtacccctgctggtagttggttgagaacaccgtgtaatcggccgcgtcgatcacgcctttttccaggccggtgtacacctcggaagtcggcagattcaccggtgccgcaccgaccagcttgaagatgttggagaccatgccttccggcgcacgcaccttcagccccttgaggtcatcgaggctctcgatcttgcgcttgctgatcagcgactcggcgcctacggcaccggcgcgaatgaggtgaacgttgtagggctcgaccaggcggttgtagcccacctcaccgcccgcgttgcgcatgtagtcgaggaacggcgcagggccgctccaggcgccgaccatgttgccgtacaccgcgaacgctgggttcttgcccgaaaaataaccggggtcagtgatatggccctggatgatgccggcgccgaccgcatccagcgtctcgttgttgccaacgatggtgccggtgggcaggacttcgatgttgatctcaccgccggttttttcaccgacgcttttcgcccactgctgggcgatgcggtactcgtcgtcgcccgcgtttacgttgatctggaacttccagtcctgagcagcggcgacactgccggaggtcaggatcaggctcgccgcaaggacaagaccggcacggggaatactcggttgcatagttgcctctccacttattgttattcggcatctcggccgcggtgacagtgcttcttgttgcctgtcccgctgttgaaaagagtaaagagcgcagccatcatcaacaaatacaaaatctcgccgcacctatacgcaaacggatatatccaacatgaagccgatcaacagcaactggttcgttcgagctcgcctgaagaaccgccacatcccgttgctggtggcgttgggcgacaccggcaacctaaatcgcgccgccgaagggctggggatctcccagccggccatttcgaagctgttgaaggaattggaagacgggcttggcgtcgcgcttttcgagcgacatgccagaggcgtggtcccgacgctttacggcgagaccatgattcgccacgccagacgcctgcagaacacactggacaacgtctacagcgaagtcgacgcgctgcgccaagggcagcagggtcacgtccggatcggcactatcctcacgccctgtgctgagctgttgccggaggtggtgggccgcgccaagcagcgcttcccgagtctggaactgagcatccggactggctcgagccgtgatctgatggcgatcctcgacgatggcgaactggattttctggtcgcgcgcttctttgccgggagccatcagcatgatttgcgtttcgaaccgctggccaaggaacccctgcggatctgtgcgcgggcaggactcatccaggggccgatgacccgcgccgagctgaatgccgccgactgggtattgccgccagccggcagcgtgttgcgtcaggaattcgatggcttgttccagcgtgtcggcatgcgcccgccgaccaaggtggtcaacgccgaaaacctgctgatggtcaccaccctggtggagaagaacgacatgctgaccgtgctgccgcgcgatgtgctggcgcactatgcacgctatggaatgctcgccgagatcgaggtcgactccagcatcgacatcgacctgaatcagggtttgatggatttcggcatcatcaccaaagatcagcggctgctgtcccccgccgcacgcaacgtgctggagctgttacgggatgtcgcgcgggagatcacgccaggtagtggcccatgtcagaacgcgccaggataagcgccgccatcgagcaacaggttctgcccggttaggtagccggcatgggagctgcagagaaatgcgcagaatgcaccaaactcctcggcgctaccgaagcgccgcgctgggatcccatgtaggcgcgcgttggcaatctcatcagatgatttgccgctggccctggcgccggcatccagtgtcttctgcaggcgctcggtcgcgaatgcgcccggaagcagattgttgatggttacgttgttagcggccagttgcggctgccgcgccagacctgcaacgaacccagtcagtccgctgcgcgcgccattggatagcccgagaatgtctattggcgctttcaccgcgccggatgtgatgttgatgacacggccaaagccacgcgcggccatgtcgtcgacgcaaactttgatcagctcgatcggcgtgagcatgttggcttccagcgcggcgagccaagcctcccggttccagccgcggaaatcgcctggcggcggacctccggcgttattgattagaatgtccacctgcggacaggtcgccagcgctgcctcgcgtacatccgggcaggtaatgtcgcccacgaccgtgcgcacctccaccgacggattcaacgcgcgcaactcgttggcagtggcctccaacgcctcggcattccgcgcgttcagcgtcacgttcaccccttcgccgaccaaggccatggcgcaacctcttcccagccctttgctagcggcacaaaccagcgcccagcgacccgcgattcccatttccatcgttgcatctcctgcagaccgccgcgaagcagcggtgcgttggtcgtttgacttccacgccaagacaacccagcgggcgccccggcccgccaacgttcagttccggtacacagccatcatagcgagcgctcgagcatccagagataatcgtcggcgctggccagccgaggattggtcctgtggctgtgatcggccagtgcgccctcgataatccgagggaaaagctcgctggtaacccccagctgcgccagacgcgtcggtaagcccaggcgtgcggtcatatcgtgtatcgcaggtcccacgctgtcggggccctgcagttgcatggcttgggcgatccgcgtcagtttatcctcgcgccgcatcgattcactgctcgcgttgaagtcgatcaccgctggcagaaatatcgcgttaagggtgccgtggtgcagccgtggatcgatgccaccaagcgaatgactgaggctgtgcacgcacccgagccccttctgaaaggccatggcaccctgcatcgaggcactcatcatgtgcaaccgcgcctcgcgatcactcggctcgcggtaggctcgctcgatatgcagccaagcacggcgcaagccgtccagagcgatgccgtcggccggtgggttgaaggccggtgacatgaaggtttccaggcagtgggcgatggcgtccagccccgtagcggctgtcattagaggcggcaggccgagcgtcagctccggatcgcagatggccaccctgggtatcaggtatggcgacagcacacccaccttgcggccatcttcgagaatcagaatcgcgccgcggccaacctcgctgccggtgccagccgtagtcggaatggcgatgacgggagctgtgtccgaggtaatccgagccgcccccccttcgatcaccgcgaactgcttcagcggaccttcgtgggtgccacaaatggcgaccccttttgccaagtcgatcgcggagccgccacccacagcgatgacgccgtcgaagcctccctcgcgatattgcctggccgcgctgcgcaccgccgcctcgttggggttcgatggcgtctggtcgaaaacacctgcacgtgatggatcggccagctgcgccaggacccgatcgacgatgccagtggcacgaacgccggcatcggtaaccagcagtgggcgatgaatcccgatgcgctcgcattcctgctgtaacaaggtgatggcgccgtgatcgaactggacctgggtgacgtaattgatgagcgacatagcagagcacctctgtctgggttatggtttttgtaatagctgcggaaattaccctggctgcctaacgcctcttcaatacgctcgacagccgtgattaacgccctgaagctatgtcagcgggtgctccctgactaatgagagccattgatatgactataactggaacttatagatgctcccttccgtctcttcgattttttcccgcctgcgtctgaaacagttgcgcttgttaatctcgctgggcgagcagggttcgctgatcaaggccgccgaacagatcgccatcagtcagccgggtgccaccaaggcactgcaggaaatcgaaagcgcgctgggcgcaccgctcttcgtacgcaccaaccgcgggctggagccgaacgacctcggtcattgcgcgattcgttatgcacgcttgattcagaccgacctcacccatctgcgcgaagagatgatcggcatccttcaaggtcatggcggtcggttggcggtgggcgtgatcatgggcgcggtgccgttcatgaccgaagccttgtcgcggctgctggaaaaacgacccgagctgtcggtggaaatcgtcgaagacaccagcgcacggctgctgcatctactcgaccagggtcgcctggacctggcgatctgccgcaccagcatcagccggcaaccggagctgtatgactgccgcaacatccacgatgaaaccctcgctgtggtggcacaccgtgagcatccactggcgcaccgcgaatcgataacactggcggagctggccgattcacgctgggtggtctattcagcgaacatgccgatgcggctgttactcgagcgcgaattccatgaggccggactgcgctttccgctgtacctgcttgaaaccacctccgcattcacaaccctttcgctgctgcagaagaacccgacattggtggcgttgctgtcgattgacgtggcgcggttctgcacccacttcggcatgacgacgatcctcccgctggagctacatagccgcagcgagccatatcaactgatcacccgccacggcgccagcctctcactaacggcacgcttcttcattgaggagctaacaaccgaagcctcagcggtgccggacgtccaggcataaaaaaaccctgtcgggatcgacccggcagggttaaagggtcacccggctacaggcaacccacgtggtagatgtatcaatcagcactcgctggcgttgatttcaaccagttgcacttcagagcgaggcgctagtggtctcaccatcgacaagccggttgatgcccagcggattggcgtttttcagcgcatccgggagcaactcgtcggggaagttctgatagcacaccggccgcaggaagcggtcaatcgctagcgtccccacagaggttccacgggcatctgatgtggctgggtacggcccgccatgaaccatcgagtcgcagacctcgacgccggtcgggtagccgttgagcaacagccgtccagccttctgctcgagcagagccaccagatcgcccgactcggcgagatcagcccgctcggcgatcagcgtggcggtcagttggccgcgcaagccatgcaatgcacgaatcaactccgccttgtcggcgacttcgactaccaccgtggtgggcccgaagacctcctcctgcagcagttcgtctccgtctatcagcaacttcgcatcggccttgaacaattgaggccgcgcctggttgccctcctgcgcagcgccggccaggtgggtgatgcccgggtgcgcctgcagatgttccaggcccttggtgtagctggtcagcgtaccggcattgagcatggtctgcgcgggctgctcggacatgaagcccgtgagccgctcgaggaacgacgaaaactccggcgagcgaatgccgattaccatgccgggattagtgcagaactggccacagcccatcaccacggacgcggtcagctcgttggcgatggcatcgccgcgggccttcaacgcctgcggcaagaccagcacgggattgatgctggacatctcggcgaacaccgggatcggctgcggacgtgcggctgccatgtcgcacagcgcacggccaccgcgcaaagagccggtgaaaccgaccgcctggatcgccgggtgcttgaccagccattcaccgacgccgccgccgtagatcatgttgaacacgcccttgggcataccggttttcgccgctgcacgcatgatcgcgtcagccacgcattcggccgttaccatgtggccgctgtgggccttgaataccacagggcaaccagcggcaagcgccgaggcggtatccccgccagcagtggaaaatgccaagggaaagttgctcgcgccgaataccgcgaccggtcccagacccatgcggcactggcgcaagtcagggcgcggcagcggtttgcgttcaggcagcgcatgatcgatccgcgccccatgaaaatcgcctcggcgcagcactttagcgaacaagcgcatctggccgctggtgcgcccgcgctcgcccagaattcgcccggccggcaacgccgtctcgcggcaaaccagatcgacgaagtcatcgcctaaggcgtccagttcatcggcaatggcgtcgaggaattcagcacgcttgcttgccgccagcgagcggtattgcggataagcagcagcggcagcttcggccgccgcattcacttcgtcctgagtggcctgatggaactcgtacggcaaagcctcgccagtagtggcatcgaagctccgcacaacgaccgaaccagcggcgctacgggcaccgccgatgtagttttgaccgtaaatatcgggcattgggtatctccttgacctgagaatgagggcctccacgagcgcgcagaggtgggccgatggcccgcgaatgaagcaaaacccgccgatccttcgggaatcggcgggctgttgcgaaaccggcgaagcgagccgatccgtttcagagctgctttacaccgcctggagcgatggccacgcgatggatgccaataccgttgcgcagcggctcgccgaacgcgtccaggctgacttcgaaccgatcgcccggctgcgccttgacgccatcggcaaacgacagcgtcgcagtaccgaagaagtgtacgtgtacatcgcccggacgtagaaactgagcatatttgaaatggtgatactcgaggttctccaggctatgacacatgttctcttcgccggaaagaaattctttctcccacaacacctgctcgccacggtgtatgcgactggttcctgccagatgcgccggtagctcgccaacccgcagctcggggccgaatgagcagaaacgtagtttcgagtgcgccaggtaaaggtaattcttgcgctcgaccacgtggtcggaaaattcgttgcccaaggcgaagcccagacgatagggctgaccgtcatcgccgatgacatagaggccggtcagttccggctcctcgccatagtcctcggcgaaatccggcaccgggaaatccgcacccggtcgcaccacaatactgccatcgcctttgtagaaccactcgggctgggcgccgacggtgcccgtctgcggtcgcccgccctgcattccccagcgaaacatctgcatggtgtcggtgagtttggtttcgtcctgttcgacctgttgatgcatcttgtcgcgagtcgaggcgctgcccaggtgggtaaggcctgtgccgctgaccagacagtgcgccgggtcctcatgatccagcggtggcagcacgcgcccggcttcgagcagatcgcgatagagcgggccatcgactcgggagtgagcctcaacctcagccgccagactacgtcgcgcgcggatcgccgccatagccagttcgcgggtgctgcctgcttcggggagcacctcgatacgctcgccgcggaccacgcccacctgccgctggccctgctcgttttcgaattgaatcaaccgcatgcgccgttcctcttgttgtattgacgcctgacatcgccagaccttgtggcaatcactttaaaaaccacccggggtggtgcctaatgaaagcttctgattaagcgataactttccctcatccccatgattgcagccctcccctccatcgtttcccgtttgcggctcaagcaattgcgattgctgattgcccttgacgaacagggctcgctgcaccgcgccgccgagcaggtttcgatcagccaacccggcgcgaccaaagcgctgcatgagatcgaaatcaccttcggtgccgagctgttcacccgcaacagtcagggtttgcagccgaatgacctgggccgctgcgtgatccgctacgcacggctgatccatagcgatctgagtcacctgcgcgaagagatgatcggtattctccaaggccatggcggccgcttgtcgatcggggtgatcatgggcgcggtgccactgctgatgcgggcccttggccgtttgcggcgcaggcagccagagctttcggtcgagatagtcgaagacaccagcgcccgactcctcggcatgattgacgagggcaggctcgatctcgccatctgccgcagcagcgtcagccgacggccagacgcatatgactgcctgaccctacaccaagaacagctggccatcgccgcgcacccgaaacatccggccagcagcgccaaggccctgcgattagccgatctcagtgactaccgttgggtggtctacccggcaaacatgcccatgcgtttgctgctggagcgcgagttcagccaggccgggctggaattcccgcgctacccggtagagaccgcctccaccttcaccatgctcagcctgcttcaggaagatcccggcctggtggcagtcatgcctttggctgtggcgcagtttagtgaaggcttcggcatgatccgccgcttgccactaagtctggagtcgcgcagcgaaccctacggggtcattactcgtcacggtagcagcctctcgcctgccgcccagctgctgctggaggaaatggaggtcgagcagctcgccggctgacagcgatcagcccagcggctgcaacaaacctctcgcggcgagattggtcatcaatgcgcgcacgccgaaatcccatggcgcggcgacatcgctatgggtcacctgattgatcaagctacccagctccgcgctacgaatgctgacccgatcgcccagcttgtgagtaaagccggcgcccggcgcgtcgcggtcttcggtaggcgcgaacagcgtgccgagaaacagcaggaagccatccggatattgatggttgcggttaatagcctgaccgaccagatccagcggatcgcggctgatctgatccatcgaactgcggccctcgagcacgtaaccatcctgtccctcgacgcgcagctccaccacgctacgccgtacatgttcgatgccaaagctgtcgtcgaacagccggatgaaggggccgacggcacaggacgcgttgttgtccttggctttgctcaagagcagcgcgctacgcccttcgaagtcgcggaggttgacgtcgttgccgagcgtcgcacctaccacctcgccgcgactgttgactgccagcaccacctctggctccggattgttccaggccgatcctggatgaatgccgatctcggcgccagagccaacggcagccagcacgggcgccttggtgaatatttccgcgtccggcccgatgcccacttccaggtactgcgaccagagaccctgttcgatcagcaagctcttcaagcgcatggaggcctcagatcccggctgtatcttcgccagatcgtcacccagcacctgacgaacctgaccacgcaccgcctccgcccgagccgggtcgccggccgcctgctcctcgatcacgcgctcgatcatgctggcagcgaaggtgacgcccgctgccttgatcacctgcaggtcagctggtgccagcaggtgcggcctggccggatcgggatcatcgctgctgttggccagcagcgcctcgatgctggtaatcctcggcgcatccagcttgtgcaaacgctgcagcagctcgggctcttcgaacaggccactcagcgtcggagccagccgggacaaatcatagacaccgtcttcgcgcaacagtacggggaccgggccggcaatttcacctggtaaccagatgcgtccgacaagagtgccctgcaccccgtcgacgggcagggtgttttcgggagtaagttgaatctggcagggcatgtcgttcaccttggcaaagataggaatgccgcgcctataacgcgcagtgggtccataccgatacagcctgcagtaatatccagtgctgcggttcggcggtggcgcggcgattgccactttaggcaccctcaccgccgggcttctaatgacaaattctcagggaccgatatgacttcgttatcaccgcaccgccgaacagaccgctcatgagcgctgaaaagagcaacctgcccgcgctgaaaaactggctcaagtaccgccacctggttttggtatccaccttggcgcgtaccgcaaacatgcacaccacggcagagcagatgggcctcagccaacccgcgataagcaagatgctgcgtgatatcgaggagttgttcggcttcgcgcttttcgagcgcctatcgcgcaagttggtacccagcgagctaggccagtttgtcatccaatacgcggagagcaccctcaacgatgcgcagcgctttgcccatcaaatcgacaccttacgcaagggtggccacggcaacatcaagatcggggcaatcattgcggccaccgctgcaaccattccggtagcgctagccgagctcaagcgtcgtagacctctgcttatgatcgaattggtggagcagaccagcgatcatctgctggacatgctcgaaaacaagcagctcgacctggtaattgcccgttttacaaatacccgacagcaacagcgtttcgactttcagccgctggccgaagaaccattttggctggtatgcaaacgcgaccatccgctcagttctcaatgtgatattcaccccgccgaactcacccgctggccctgggtgctttacccattcgatacgccgatgcgacagatgctcgaacagctgctcagccagctcgacgtcgcaccaccaagcaatgtcatcgaaaccacctcggttcagaccacccttcatctgctgcgtaacagcgagacgctggcgctattgcccgaagctatcgcccggcaacaggtcgagcagggattactttgcgaactgtcttcgagtcttaccaccccgtcgctcaagtacggcattctcacgcgcaagcatcaggcaccgtctagcaatgcacaggagctgatggagattctgctgcaaggccgcgttgaagtctgacccccgctgcgtcggtagggacgcagcggcaaccggctgctgacgaaccggtagctggcccacgggacaacccacgaaagtagacagcagccgggtcgctgcccgctggatctcgctgcgttgtacgcttcgtgcccggcgggcgtatgccccacctggcgtgcgataacagctcgttatagcgcgatgagcaagcctcattagacaggccacttttgctgcaatagcttcggatcagccttgcaggcggagcgaatcggcaaggtcgccgttttcgcattcgatggcgtcaatggccggagcttgcttagcgcggacccacactaaaaataaattcaataggtgactgtcatgaacaagaacaagctacgcgcaaccccgcgcccattgaaaaccctggtcctttcaattttgctggcatcgccggcgatggccatggctgactatcccgacaaaccaattcaactgatcgtgccttgggccgccggtggcggtagcgatgcagccgcacggggcatagccgctgcgctggaacatgagcttggaacaaccgtgaacgtagtcaaccgcaccggtggcagcggcgtggtgggccataccgtaatggcaaagtcgaagccagacggttacaccctcgggttcatcacgggtgagctgaacatgatgcattggcaggggctgaccaagatcaaccgtgaagacttcacccctattggcatgaccaactatgactaccccggcgtgcagataagcgctgacgcgccgtacagcaacattacggaactgcttggcgccatcaaagaaaagccaaaggggacgttcaaggcgtctggcaccggcatgggtggaatctggcacgtggcttttgcaggtctgttgatggaccaaggcattgcccccgatcaggtcacttggattccaagccagggcgccgcaccagcgatggtcgaactggcggccggcggactggaaatagtgccgtcctcagtaccagaagcacgcgccatgattgatgccggcaaagccaagggcctggcagtagtttcgccagagcgcaactccagttttccaaacattccgacaatcaaggaaactctcagcagcgactactcactgggtgagtggcgtggtgtcgccggtcctaaaggcatggacccggccgtcgtagccaagctcgaaaaagcgttggaagcggcttacaagagtgatctttaccaagatttcatgaccaagcagggcttcggcatggaatggcgcaacgctgatgacttcaagaccttcctcgctgaaaacgacgcttacatgggtcgcatcatcgaaggaatcggtttgaagaagtaaatcgacgatagccgaatcataccggcgcccctggcgccggtttcagcacatcgcgtttacgctcatcctctcgagcgcgcagggcaaaataatgaaagatctatctcttggcctggttttcctggtcctgggtgtcggcgtcatcctggcttcccaggaattcccgaaagtaggcaacttgcaatacggtgccggcctgtttcccatcctgattggcgcaggcatggcggttggcggtctgctgctggcgtttggcgctactcgccagattgtccgtgaggcaggtcagaacggcgcattcagcctgctcccgcgacctgacgcgagttggctgctgcccttcgttccttgcgccatggttgttggttacatctatttcagcgacacgctaggcacgctgttgagcatggtgctgatcatgttcgttctgttctgcctacgcggcgttcgcctgctgcctgcgttgattacttctgtcgttgcggcgctggtcatcaactacgccttcaccaatctgctttcggttccgctgccacaaggcatgctaagcatctaggagtacggacatgccagagttcattgacggcctgttactagtcctcaatcttaaaaccataatggtcgttgtactcgccgccctgtttggtgtctttgtcggcgccattcccggcttatcggcaaccatggccgttgcgctgttggtgcccatcacgttctacatggaccccgtggcggctattgccgcgatcatcaccactgcggccatggcgatttttgctggcgatatccccggcgcctacctgaacattcccggcacaccgtcttcagcagcgtacgttggtgattccgccgcgctcggtcgcaagggacgcgcgcgcgaatgtctgggggtcaacctggtgtgctcggttatcggcggactggccggaaccatcgtgttggtaatgattgcgccaaaacttgccgagtttgcacttaacttcagttcattcgagtatttctggctggcaattctcgggctgagcagcgctgtgttcgtctcgcaggggtcgctggtgaaagccttcctttcactgatggtcggcttgctgctctccaccatcggactggacatgatcagcggcacgccgcgcttcaccttcgatgtgcccgaccttttcgcaggtatcaacttcattcctgtaatgatcggcttcttcgccctcaacgaagtgatgaagctatttgccagccggcacgcgaccagcgaaacggagcaacagagcgttgcgcaacagggcacggtgtttggaaaggtcccgtactacctcaagcggtattggcgcaacctgatccgtggcagctctctgggtgccctgatcggtgcgcttccaggagccggcgcggacatcgccgcgtggatcacctatgcaatcagcaagaagcgctcgaaagagccggaaaagttcggcacaggtcacatggaaggcatcgtcgatgccagcagtgcaaacaactcagccgtctgcggggcttgggtgccggcgctggtgttcggtattcccggcgactcgatcaccgcgatcgtgattggcgtgttgtacatgaagggcatgaaccccggcccgaccatttttatgaacaacggtgagatggtgtacggcctctttaccgcgttctttgtcgccaacctgatcctgattccgattggctacttggcaattcgcagcgctcacattttcgccattacgccggcacgcctgctgatgccgatcattctttgcttttgcatcgtcggcgcctttgccatcaacaactcggtcactgacatctggatcatgctgttgagcggcatcgccgtttacttcatcagcagtgctgacttcccggtcgcaccggcgattcttggcctggtactcggcggcgtactggagaacaacttcatgacctcgatgctcaagtccaacggcagcgtgctctctttcgtcgagcgcccgatcagcgcggtactgggttgcctggtcctgcttatcgccttgttcccactgctatcgaagttcctggccaaacgcacaagcccgccggtttctaatgttgttcaaggagaaaattgatgaacgttgatgccaaagccctggaacagctgatcgaacgcctgtttcggcaggaaggcgcctcattggaagttgccggcaccgttgcgaaagtactgatcgaaggcgacctgctgggccatcacactcacggtgtaaaacttgcgcagggttacctcaaggatatccgctccggtcacgccagagtcgatgccgccaggctgcgggtcgtccagcaatcgccggccgccacgctttatgatgccgattacctgctgggcccatatgccgtcagccaggcgctggatttcaccatcgcggcggccaagaccattggcgtcggcgtggcgaatattcgccgttcgcatcacatcgcctgcctcgccgcttacctgcaaccggcaaccgagcaggggttggtaccgatagtgctgacttctgacccggcggtcgcttccgtcgcgccctacggcgggcttgatccggtgtacacaccgaatccgctgggcatcggcattcccaccagcggcgatccaatcctgatcgatgtgagcatgtccacgatcaccaacgggctggtcaacaagacccgccaggccggtggccagcttgatcatcccgttatacaagccaatgacggcagcctgactcaagatccagaggcgttcttcactgacccgccaggcagcatcctgcccctaggcggtctggaattcggtcataagggcttcggtctgggcatcatggtcgaagcgctgaccgccggcctgggtggattcggtcgtcgtgacggcgtcagccaatggggcgcggcggtatgcgtgttgacactggacccaactttcttcggcggaatggacgccttccgggcagagatggatcatttcgtccagcgctgcctcgacagtcgtccccgtgcagcaggtaggccggtgcgcatgccggggcatgcgggtatcgcccgtcgcaggcaataccttgaagaaggcattccgctaccggatgacgttctggcatcggtccgtggtgcagcacgagacggcgggctggactgcccattctgatagcgccgtgacccagccaggtttccgccacaacgccgcgcctagcgcggcgttgtaatcttcgagggtttcaataacatctgcaaaagcactgatccggcctgcagataagtgctgactcgccctttaacaacgctggtgcgttactcaagcaatcagacgggcctaacgctttggggttagccaagaagctcattaccgaggtttttcgactccatcagtcgacaacgaaccagcgacagcctcggcgtcggctcgccatttcggatcatgaatcagatcgggacacagttcgtccagattactgcaacccagcagccccaaggtccgatccacttcggtgcgcaggatctcgatggcatgccccgcgccggggcctctgcccgcagccaacccatatagccccgccctccccagcaagacaccgtcggcgcccaataaaagcgccttgacgatatcgctgccacgacggaaaccgccgtcgagaaaaatgttcattttgcttttggccagccgcgccacctcgggtagcgtttcgatagccgacaccgagccatcgagctgccgaccaccgtggttggacagcaccacgccgtcgacaccgtattgcagagccagcttcgcatcttcgggatggatcatgcccttgacgatcagcttgcccttccagatgtcacgcaaccaggcaatatcctgccagctgagcgttgggtctaactcggcagccagcgcactggccgcacccttcacggtgtcctgaccgggcggtaacaaatcacccagattcttgaaacgaggcacgccattgggcaccagcacatcccagatccattcaggatggcgcaacacatcgagctgattgcgcaggtcgagcttgagcggccgcacgtaattgcgcctatcccattcacggttgccgaaaatcgcgctgtcagtggtcaccatgatggcttcaaggcccagcgcctcgacgcgtttgaccagcttggcgacgtggtcacgggtgcggtacagatagatctgcatccaggcacggatgccttccacctgagcgatatcctcgatcgacgtagtcgaggcattactcaagacaaaaggaataccagctttcgcggctgcctcggcaaggcgcaaatcgcccttgtcggtcaatagaccgttgaagcccgtggggccaaccatgaatggcaacgtggagggctggccaaagaatgaacgccgcaggtcgcgcgtacccacatcgcgtagcgtgcggggctgcagggtaatgctctcgaaaatactgcggttacggcgcagggtgaattcgtcgtcagccccgccttcgacgtattcgaacgaaaaattagggagccgccgtcgtgcgatttcgcgcaactcttcgatgttttgcgcgcgccgataatcccgaccaggatgaagtcgtctgttcatggtttaacctgtatacaaagcggcggtcgctggaacgcgcccgccgtaaagcttgaatgtcgactcggaacgggtgggccgtcaggcttgccaggcgcgaacgtcttgccgctgctcaccaagcccggagatgctcagagtcatctggtcgccaggcttgagaaacgtcggcgggtgcatgccggcaccaacgcctgggggcgtaccggtgctgatcacgtcacccgggttgagcgtcatgaactggctgatatagctgacgatctcgtcaactccgaagatcatcgtccgggtgttgccttgctggcgcagctcgccgctaacttccaggcgcaggtccagatcgcgcaaatcggcaatttcatcagtcgtcaccagccagggaccgatcggggcgaaggtatcgcaacccttgcccttgtcccattggccaccgcgctcagtctggaaggcgcgctcggacacatcattgacgatgcaataacctgccacataatcgagcgcctcatcgcgctcgacgtactgtgccttgcggccgataacgatgcccagctcgacttcccaatcggtttttcccgaaccgcgcgggatgattaccgtgtcgttggggccagtaatcgcgctggtggccttcatgaaaagcaccggctcggtgggtaccggcaagccggactccttagcgtgatccgcatagttcagaccgacgcaaacgatcttgccgatgttggccaacggcgtgccgatacgcacctctgcctcgacgcggggcagcgcgttttcatcgagcgcagccagttgcgacagacgctccggagacagcacatcgccggtgatgtcggcgatctctgcagacaggtcacgaatgaccccatccgcgccgagcaggcccggcttctcctcacccatcgccccataacgcagcagtttcatgccttgccctcctgtttggcgcgcacgctgacgccgtttatctcgcccagcacgtcaaacagatgcgggacgtatttgtcgccgtggcccaggcttttggcgagctggaacgtctgatagacggactccgcgatgatgccggtcgagggcgtcgacttggccagatcggtgtagtagcgcatgtcttttacgcagttgctcaacgcgaacttctgtcccgagtcatcgccattcaatacaaacggaatgatgcgatcgaaggttcgactgtgcccgccactgagactgcagatgtccgcgaaggcggctagatccaccccattcttcgccgccgtacagaaggcctcggcaagaaccgtcgcgttaccctgggcgatgaagttatggatgaccttggccttgtggcccgaacccaccgcacccagatgatggatggtttccgcgaagcactgaaggatcggccgaaccttttccagtacggcagcatcgccaccggccagcacgttgaggcagccttcgacggcttccttgggcgtacgattgaccggcgtgtccagataatgcgcgcctcggtcctcgaccagccgcgccagttcagcggtgcgcgccggatcgccggtactgcaatcaaccacgatctggccggcacgcaacccggtcaaaaggccttgttcaccggtcagtgtctggcctacttcattcgatcctggaaggcataacagcaccacgtctacacgctgagccagctccgcggcgttagccacttccgtagcgcctcgaaccaccagatcatccacgggctcacgacgacggtgcgccataactgtcaggccgaagcccttttttagaatgttcgaggccatggcatggcccatcaaaccgagcccgatgaaacctacattcaaatcactcatgcggaaaattcctcgaaaggcagcttggatatcagcggtcagcgccttgagcaaacgctgacggtgctaatgctggcgacctttatctcgcgttgcgtaccttgttgatttcttccatgaactgaccaaccaactcggcaccgtattcctcggtgaacttttcggtgaccggcttcagatggtcgcgcatgcgctgaatttcttccggagccacttcgttgatctgcatgccagccttggccagcgcagcgcgagaggtcacgtccatctcgcgggaaaccttacgctcgtaggcttgagcttcggttgccgcgtccttgatgatcttgcgttcggtttcggtgagctcgtcccaggtcttcttgctgaagatcgccaccagcggatcgtagaagtgaccagtcaacgacaggtacttctgcacttcataaaatttcgacgtctcgatcgccgcgagcgggttttcctggccatccacggtccctgtttccatcgccgtgtagagctcggtgaacgacaacggaacggggttggcgcccagtcgactaaatgtttcgatcgccgtcggaatctgctgcacgcgcagcttcagaccctggaagtcttccagtttgttgatgggatgcttgttgtttgtggcatggcggaaaccgtggtcccagtacccgagaccgatgatgccgtgcgggggcaggcgttcgagcagctgctggccgaccgggccgtccagcacggcgtcgacttccttggcgttctggaacaggaaaggcatgccgtaagcgccaaatcctttttcgatgccggtcagcagacccggggtaaccagggtcatgtcgaccgtgccgccctgtagcgatgagatcacttgggtatcgccgccaagggtgccgctagcgaacaccatcaccttcatcttgccgtcgcttttctccttgaccaggtccgcaaatttcaccgcgcccaagccatgagggtgattcttggcctgtacgaaagcgattttgaacgtgtgccggttgatttcatccgcatggctcgccgtagaggaaaacagtaggcttgaacacagcagagctgtcagggcttttggaaatattttcatgacgtttccttctgtttataagtgcaacttcaccggcatgacttgatgccgcattaatccatccgccgaagcctgagctccgcacggtctgggaactcaggaggccaaccaggcagcgggaacagtcaggatttgcgggaagaccagcagcagccctacgaccagcaactcggcaaacaggaaaggcagcgtgcctcgaacggtggcaacgaaatccaccttcgaaaccccggccacaacgttgagtaccagccccaccggcggcgtaatcaggccgatggcgcaggtcatgacgaagatcacgccgaagtacaccggatcgatccccgccgccaccgccacaggcagcatcaccggcgcgaggatcaggatgatcggcgacatgtccatggccattccgatgatcacgatgatcgccacgatcagcaacatcagcagacgagggctatccatcaacggttcgagcaaggcgatgatttcgccaggcaggtccgccactgtgatgacccaagccgcgaccatcgccgctgcgaccagaaacatcaccatcgcggtggtcgacacggccgaagccaggacctgatacaggtcgcggatcttcagttcgcgatagacgaacagcgagatgcacagcgcataaaccgccgcaaccacgcccgcttcggttggcgtgaacacgccgaatttcaggccgaccagaatgatcagcggcagcaatagcgcccagatgccctcataaagcgttttcagtacgtggcggcgggaggctcggtgagtggtttcgatggtttcgcggcgggagaccaggtaccaggcgacgcaaaggaacccgcccattagcaggcccggaacgatgccggcgagaaacagcttggtgatggaaacgttgccagcgacaccgaacaggatcaggccgatggagggcggaatgaccggcgcgatgatcccggcggatgcaaccagaccaaccgatgtgcctttgtcatgccccgccttgaccatcatcggcaccaacagtgcggccagcgccgcggcatccgcagcggccgagccggacaaactggccaacagacaggcagcaagaatcgttacataaccgaggccgcccttgatgtgccctaccagcgccaccgccatgttgacgatccgcttcgacaggccgccagcgttcatcagctcaccggcaagcatgaaaaacggcaccgccatcagcgggaagctgtcggctccattgatcaggttctgagcgatgatctgggcatcgaacagatccaggtaatacatcatcgaaatgccacagatgatcaacgagtaagcaatgggtacgccgatagccatggcgaccagcaatgagcatacgaaaatggcaatgatggccattacagcactccgttcttgttttctttttcggacacagcagccgtccaccgaaaatcgagctggcggctggagcaaatgaagaagcttcgctttagagatgcgcttccagctcgctcgaatcggacagatgaatttccttgccgagagccagacgaatgacctcgtatatgtggatgccgcctgcggagacaccgaacaagacgcccacgccatagaaccagcccatggacaggccggtaaccggcgaggggaaattgatgttgattagcatctgctgccagctaccccagaagaacaatagcgaacaggccagcatcagaagttgagcgcagataaggctgactcgctcacccttctcggggatcttcttcagcaagatgtcgacacccatatgcccgcgctcgcgaagcagcacgatggcgcccagaaaggttagccaaacaaatgcccaacgcgacatctcttcggaaatagtgatgccctggttgaagccgtagcgcaacaccacgttgccgaacaccagcacgaccataacgaccaggcaaaccactgaaagaaacctcagaagcgcgaaatatccattgaccaatcgaagcatcatcgcatcgccctcctctgccgaagaagcaagttggagcggatcccgggagcgacatgcaggcaagccgtcttagcttcgaaccggcttgtggcgggaggcttgacacgcaggggcgacgacatggcgttatctcactttcttgtttttgttgactgccggagcagcgctgtcgagttgacactagcatcacaaaacattgcgtgcaatgttcatttttgccagtatcaaggccgccgctcacaacaaaaaccgagaagaccatgcagctcatcaccaaaacgcagaccgtagtggtactcaatgccaaggattcagtagctgtcgcacgcaagccgattaacaagggcatggaaatcgctgaaatcggcattactgcgctagaaaatattcccgctggacacaagattgccctgcgagacctagcagcagccgagcccgtcatcaaatatggacaagtgataggtatcaccagccagacggtcaccgcaggccagcatgtgcatgttcataacgtggtcatgccacaaacccatgccagcgacgcactgcccccgcccgtaccacgtaccgaggtattgccgcccgagcagcgtcgacgcttcatgggctatcgccgaccagatggacgagtcgggacacgcaactacctggctattctgtcgaccgtaaactgctctgcgaccgtttcacgcgcggtggcaacgcatttccagaattcagcattgctggctgagcacaacatcgatggtgtggttgcactgacccacggcagtggatgcgccatcaacaccgaatccgaagggttcaagtttctcgatagagcgatctggggttacgcgcgcaacccgaacgttgctggcgtgttgctgatcggactgggctgcgaaaccaaccagatcagctcactgatgaagcgacacaacatcgaagaaagcgcgacgtttcgcgtgttcaacatccagaatgccggaggcacgcgcaaaagcatcgcgatggctatcgagcaggtcgaaggcatgatagccgcgctgggtcgactggaacgcagctcggaaagcgccgagcatctgactctgggtttacagtgtggcggctcggacggctattcgggcatcaccgcaaatccagctcttggccatgccgccgatctgctggtgcgcaatggtggaaccgcgattctcagtgaaacgccggaaatctacggagccgagcacctactcatccgtcgcgccgtgagccatgatgtggcgcgcaaactacttgcgcggctggcttggtgggaggagtacacacggatcaacaaagccgagctcaacaacaacccgtctcccgggaacaaggcaggtggcctgactacgattctggagaaatcgctcggggccgcggccaaaggtggctcgacaacgctcaacgccgtttacgaatatgccgagcccatcgacgaacacggcttcgtattcatggacagcccgggttacgacccggtctccgttaccgggcagatagcttccggcgccactatgatctgcttcactactggccgtggatccgtcgccggcttcaagcccgcgcccagcatgaagctggcaacaaatagcgagatgtttgcgcgaatggaggaagacatggatatcgattgtggcgggatcgtcgaggggcgggaaagtatcagccaggcaggcgagagaattttcgagatgttgatagatgtcgcgtccggtgcgccgaccaagagcgagctatataactatggcgacaacgagttcgtaccttggccggcaggtgccgtcacctgacgctacgcaaacgctccagatatggcacatcggcgaccttattgttctgcttgaagtaagccagtctttggctgacttttcgctcggcaatcaaaaggtgctcttccatacactgcgcagcgtcttgcgcatggccggcctgcagtttcaggaatatttcgaggtgctcttggaagaacggctcttcttcaggaaaataactcttatcgagcaatatatgcttacctgaaagcaacagggagtgggtccggcggagcatctgcagcatttcacggttggggcagtagccaagtgtgcggatatgtagatcgctctccagatcgtcgaactggcggctttgcatgtccgggtacacctgtatcgccctgaccagtcgatcaatgaagagtgctaccttcgctgacggtaaaaactccgcggcgcgaagcagaacatagggctcgagccgtctgcgcacttcatacagatcggcaagtcgctgatcgtcccactcgattaattgccagcgtgagcgctcgtctttttctacaagaccgagcaaatgaagcctggtcagtacctgattggaaacggttcggctgatcttgtaatgcctggacagctcaagctcgttaatacggtgagaaccgaacaaagagtggtgtaacagttcccgctcgatataatcataaactcgtcgccaggattcggtttttttcggcctgctctcgtcggagagcgaggcgaacgtgtctgcatcaatcttgtttcgaatgacctgctctgattgtttgccaaccagataacctctaccgtcgaatgtccggatcaaaccttcgtcgctaagcatggcaagcgcttgtcgcactggagacctgctgactgagaatatctccgccaggttaccttctaacaaaagggttccttcagccagtcgcccgtcattaatacttcgagctattaatgtgaacagttgatccttcagatgccttttcatacgcgtcttaatttcagccaaagtccgacaagcgcatcatatcgcaacgtataataatttaacgcttgtcgttatgcccgaggtcccgctgcggatcgatctcgtcgcgaacccgctgcttcagttccttggcttcgggaaatcccccgtcgcgcttgcgctcccagatctgcttgccgttgcaatcgatgtgaaaggtgccgccactggccggcaccagcgagaccttgcccaggtcctcgccgaacgtcgacagcagctcctgcgccagccaggccgcgcgcagcagccactggcattgggtgcagtaggtgatcacgatctcgggcttggtatcgggcatgacggagcgctccggggctggcgggacgcctataatagccgccatttcgcagtcgtcccgccggtgttgcccatgtcccgtctcttgttgctgctgatcctcctgatgccgctaccaggatttgccgattcccagcccaccaccgggctggttctttctggcggcgccgcacgcgggctcgcacatattggtgtcctgaaggctctggaagagcacggcgtgcgcatcgacgcgattgccggcaccagcatgggtgcggtgatcggcgggctctacgcggccggctacagcgtcgaagaactggaacagctggccggcagcctggactggcagcaggtgttgtccgacgatccagcgcgccaggacgtgccctttcgccgcaagcaggatgaccgcgactttctggtcaagcgcaagctgagtttccgcgacgatggcagccttgggctcccccttggcgtgatccaggggcagaacctggcgctgctgctcgagcgcttgctggtacatgccagcgatacacgcgatttcgaccaattgccgattccgtttcgcgcggtcgcgaccgatatcgccaacgatcagaaagtcgtattccgcagtggtcacctgccccaggccattcgcgccagcatgtccattccggccgtattcgcgcccgtggaggtcaacggtcggctgctcgtcgacggcggcatggtggacaacattcccatggatgtcgcgcgtgagatgggcgtcgaccgactgatcgtggtggatatcggcacaccgcttctacctcgcgaacagctgctgacggtggtcgacgtgctcaaccagtcgatcaccatgatgacccgacgcaactccgaggcgcagttggagacgttgcgcgccgaagacctgttggtacagccgatgctggccggcttcggtgcgaccgacttcggccgggcgaagcaactgatcgacgccgggtatcgggccgccaacgcactggaaggccggctgcaggccatgcgccaggaaagcggcggcaaccttgcgctcagtctcgcccgctcggccgaaccccgctcgccgctgattagcgcggtacgcatcgagaacaactcgaaggtcggcgacgcggtgatccgccggtacatacgccagcaggtaggcgagcgcctggatctgcaggggctgcagaaagacatgggcacgctgtacgggctggattacttcgaacaggtcgaataccgcgtcgtacatggcaagcaaggcaatacgctggtcattaccacccgggagaagcgctcgggcacggactatttgcgcctgggcatcaatctctccgacgatttccgcggcagcagtgcgttcaatatcggcgccagctttcgcaagaacggtatcaacgagctcggtgccgaatggttgacccgactgcagctgggcgatcaccaggagctcttcagcgagttctatcaaccgctggatgccggctcgcgttggttcgttgcgcccaacctgtatgccgaagcacagaacgtcgaggcgatcatagacaacgaccccatcgccgactatcgcttgcagcgctatggctacggactggacctgggtcggcagatcgccaacaacggcgagttccgctttggcatcggccaggcctggggcgaggcggacgtacgggtgggtgaccaggcgctgccggactattccttcaaggaaggctattaccagcttcgctattcattcgacaccgtggacaacgtcgacttcccccgcgagggcgaggacatcggcatcaccttgcgccagtacgacccgagcctgggctccgatgcacgttatcgccaatgggaactgcggctggacaaggccgtcagcttcggcctcgattcgctggtattcggcgctcgctacggtcgcacgcttgacgatgccgacatcgtgacctcgagcttcctgctcggtggtgcacggcagttatcgggattccgccaggatgccctgtccggtcagaacgtcagcctgggccgcttgatctatttccgccggctgacaccacgttcgttcctgccgctggactttccgctctatgtgggcgcttcactggaacgcgggcgcgtctggaacaacgacaacgcgttcgacagtggctacatcaatgccggtagcgtcttcatcggatacgagacgccgctcggcccgctcaacttcagttacgggctgaacgacgaagccgagcgggcgctgtacatgaatctggggcgcagcttctgatccggcgctccattcattcattgcacgggcgccgggctcaggcgatcctggcgagcagctcgcttacctgccggcgctgctgctcgtcgccttcggtggcgaggctctcgagaatcacgcaagcggtgtccatgtcaccctgcttgatgtaggcgacggcctggttgaggcgaaccagatgctccgggttaggctccagctggcgcagctcctcggccgacggcatcgagtcgaagctctgcgcaccttcgagcaggctgggcagctcgccgatggtgagcatctcctcatcgaagtcatccagccacggctgcgagtcggcgaacgtggcttcggacgcagcctcgaccggcgcgaccaccggatcgctcggtagcgccgccgaagattcctccagcacaaaggtaacgtccggatccagcatgggctcggcaaccggcgccatcggcgcaacggccgctgccagcgccgggtgcagtgccagtagctgatccagctgtacctgactgccaccggtttccagatagtccgccgcggacgcaacgtatccgttgacgtcgcctgtttcggccaacagcccaaggtggcgcaggcgatagtcgagccgctcgggcgcccgctcgataccacgcagcaatacgtcgatggcctcgccacgacgaccgtaggaaaggtagatgtcggccgcctcgagcgcatcggtttcactcaccgaggcctgtgcaggctggcgcggcatctccaccggcgctgtcgtactcatgggcctggcgcccagcggcttggtccccgcgggcggcattacgacgtcaacagactcggcttccggcttgttacggcgaccaaaccacagaccggcaagcaacagggcgatcaaggtcccgcctcctggcagcgcccagtcttgccacttgaacgatacaggggccggagtatttggctcgacgaccggctgaatgcgctctgcttcggccggcgccggctgttcgcgcggccgtgccgtgaccacctgcgagcgctcccgctcggccagttgcgcgctgaccgtgttcaactccagacgcatatcgctcaacagttgcttgagctgctggttctcctcgcggctggctgccagctcttcggaaaactggcgacgcagggctgccagttcatcttctgcaggctcgggctcgggaatcgacgggcttcgatcgatcggctcgacctccggctgcaactggcctgcatcagccaagtcaggcgcggcctcgacaaccattggtgccgttcgctcggcggcatccggcagcagcaggttcgcatccgacttgagccgcgcggcgtcgccaccgaggaaagcttctggattcaacgcctggatgtcacgcatgaactgggcgcgtgaagccctcgtgctgcctgcatagcgtcccgcaatggtccacagactctccccgctggccacttggtggcgcttgccttgcgccgcctgcggcagctcggccggcggcacgaagcgcgcaggttctgcaggtacaggcgataccacggctgcgggaatcgcgtcggccaggttgcgggctggctcaggcgtgctcggtaacggatccagcaggacggtgtactcacgcaacagccgactcttggcccgagtgatctccaccaggaaattcaagtagggctcacggaccggcttgttcgagacgacgcgaatgcgactgcggttgccgtcaatgaccggtgtgaagctcaggtcctgcagaaagaccggccgttcgatacctacccgagcgaaatcgctgctcgacgccaacacgacgcggatctcgtcgctggacaggttgcccacatccagcagatcgatttcagcggccagcggctggttcagagcggagtgaagcgtgatgtcccccattcccaacgccgacgccatgcccgaatagatcagcgagctggatgctactgttaacaagactcgacgacctagtgccatggcgatctccacaagtggcacgcagcgctttggtcgcccgcccactgttcgatgactgaactgtgacgcggttatcgacgggaacgggaaaagattgatgctattcgtcggctatgcgcgtaaaggcattgtgccatcaatcgcaaatacaagcctagcgtcaaaagacgaacgacatgccgccaattgcgccggaaaccagacggttgcgtaccgaagctcgacctgccgcgacgcctttgtcgactgagccgatagatgccgtaccggtgggcgctgcggttagcctttgacacggccgagattggccaggatccgttcgtgcacctgttggcacatccgcaggtcgtcatcgtcgatgccttcgaacagctcctcacgcacttgcgttgatatcgcctcgatccgctgaatcagcggacgcgctggcgcacccaaggtgatgagcttggcccggcgatcgccaggcgccggctggcgatgcaccaggccttgtgcttcgaggctgtccagcagccgcgccagggtaggcccctccaccgctacgctctgagcaagctcacgctggctggggtcgtgatcgaaacgggcgaggtgcagaagtaccagccaccgtgcctgggaaaggccgaggtcagccagccgccgatccagctcggcgcgccagccacgcgacaattgcgccagctgcatggcgaatcggtgttgctcgggatacatggaatgacgattccgaaaaactaataattagcgagctaatcacagctccggaaacctggcaaggctaccttcgcccgggtacgttacgctgtgttgcgggacgccgggctagacagggcgacgaacaagccaagcggcattgcgtcgcactgccaggcctcataactcgaactcggcctggagcgatgcgcgtacgcagaacaacacggcttcaggaacccggccggcgaaatgctcggccacggccgccacaggaggcagctccccttcaccatcgagaaaggcttcctgaatttcttccagcaaggcctcgggcagatccagagcctgctccaggctgagctgctgctgaccgatggcttcggcaagcatggcgtaaacgttcttttcactgcagtcgagctggcgggcgatctgcacgggcgtcatgccggcacgggccagcgtaatcagttcgtggcggatatctgccggcgatcggggagcgcttgccgtgccttgcagcacttccaggaaggcctggccgtagcgttccagcttgcgcgcaccaacgccgctgatgcgcgccatgtcgctgagcgaccccggctggctgcgaagcatttccagaagcgtcgcgtcggggaaaatcacatacggcggtaccccgtgctcttcggccagtttgcggcgcagggtgcgcaacgcctcccaggtttcgcgctcctcgctacgcaccagctggctcgcagcactggccgacgacttcggtgccttcaccgccaattcgcgacgcagctccagggtcacctcaccgcgcaacagggcgcgacaggtatcgctgaggcgcagcccgccgaacccctccagatctacatcagccagcccgcgcgcgaccaattgacggaacagcgagcgccattccccttccgagagcgccttgccgactccgaataccgacaggtgctgatggccgaggctgcggatcttctcgttgtcgcgccccagcaggatgtcgaccagatggcccacaccgtagcgttggccgctgcggtagatggccgacagcgcttgcctcgccggctcggtggcatcccaggtctgcacgccatcgacacagttgtcgcaatgcccgcagggctcgggcatctgctcgtcgaaataggccaggagcacctgacggcgacagcgggtttcttcgcacagcgagagcatggcgtcgagcttgtgctgctcgatgcgcttgtgccgctcgtcaccttcggagttgttgagcatctgcttgaggaaaatcacatcctgcaagccgtacgccatccaggcgtcagcgggcagcccatcccgacccgcgcggccggtctcctggtagtaggcttccagcgacttgggcaaatccagatgggcgacgaagcgcacgttcggcttgtcgatgcccatgccgaaagcgatggtcgccaccatgatcaggccttcctcgttgaggaaacgcttttggtgaaaggcccgcagatcattcggcaacccggcgtggtaaggcagcgcgggaaacccctgctcggtaaggaacgcggcgatgtcatcgaccttcttgcgcgacatgcaatagatgatgccggcatcgccacggcgctcggccaggaaccccatcaactgcttgcgtggctgctccttcggcacgatgcgatagaagatgttcggtcgatcgaaactggaaaggaaacgctcggccttctccagatgcaggcgctggacgatttcttcacgcgtccgcttgtccgcggtggcggtcagcgcgatgcgtgggacgctgggaaaaaattcggccagctgcccgagctggaggtattcaggacggaaatcgtggccccactgcgagacgcaatgagcctcgtcgatggcgaacagaccgatctccaggcgctgcaagaacgccagcatacgcggctgcaccagtcgttcgggcgcaaggtagagcatcttgatttcgttgcgccgcaggcgatcggcgatgtcgcgctgctggtcggccgtcagggtcgagttgagcgccgccgctgcaactcccagctcttcgagcgtggccacctgatcgtccatcagcgcgatcaacggcgacacaaccaccgccaggccgccgcgcagcaatgcaggcacctggtagcagagcgacttgccaccgccggtcggcatcaacaccagcgcgtcgtcgccgttggccacgcgctggatgatcgcaccctgattgccacgaaacgcgtcgtagccgaaaacatcttttagaatgcgctgtgcctggtcgagcatgccggcctccgaaacaagacgcgcgagtatacgccacaccgccgcaccgttcagagccaacagcgcccatggcgataaccggccgctggtggaactccttggcgattcttccatctgtctgtgacggggggctgaaagccggcgcgaccgcagcgttaccacggcgcggtagccgggggctggtagctcgtctagaatcactgctgtcctctatccaaggtagtcatcgatgtcattcgccgagcaactcgcccgcctgcaagtgtttctggatgcagatgatctgcacgaagaggcgctcgattacatcgccgcgcacggctacctcaccgcactgtgcatctgttcggagccggtccccgagcgtgagtggatcgacgcgctgttcgccgaaccgccgaaatacgcagacgacaccgagcgcgaagccatcgaagcgacgctggtccagctcaaggcgcatatcgcccgacagttggccagcgacgaagacatggaactgccatgcgacctggaaatgggcgacgagcccgacgaatccgacctgcgtggctggtgcatcggcttcatggaaggcgtgttcatgcgcgaggaagtctggttcgaagattcggaagaagaagtaagcgagctgctgcttccgatcatggtcggctcggggctgttcgacgagcaaccggaattcagcgacatcgccgcggaccgggatctggtcgaggaaatggtcgcgcagatccccgagatactcaccgcgctgtacctgatctgccatgctcccgaagagaagccggcacttctcaagccgcgcaagcactgaccccggactaccgccgtggcccaccgcgatattccgatgtatcgcaacccggtggtacgttacctgctgctggggacgggctggttaagcgttgcgctcggggtggtcggcatcttcctgccggtcctgcccaccacccccttcctgctgcttgccgccgcgtgctttgtccgtagttcacggcgcttctatgactggctggttatgcaccccaggctcggcccctggttccgggactatctggaaggcaacggagtgccgctgaaaggaaaggtctactcgatcatagccatgtggctgagcatcgcgctgtcctgctggctggtacccatgccttgggcgcgggccggcatgctcaccagcgctacgctggtgacgatctatatcctccggctgaaaacgcttccaccgcgttaggcggttatccagccgtcacctcgtagcagcgtgattacgctggaacacttcagcccccatcgcggcaatctgcgcctcgatcatcgcgtcgaaaggtttcaacaacgcctcgaagcgatcatcgccctcaagcaggttcaacgccgtcactatcgcttcgagtgtggacaaagccccgggcatcggcgccttgcgcagtcggtagcgcgacaccagcccttccggcaaggtcgcacgcggcaggctggccaggcccggattgagatgcagcaacttgcgagccttgcgccaggtgccatccggaacgatcaatcgcaacggccctgacgcctgcgccagctcgccgacgcctatggcccgttctcccggaaacaacagatagttctcgacaccatcatcggccggcaggtcttcgaaccgctctccgatgcgcagttcggcattggtcaggccgagcgcggccagacgcgccgtgttcaacgcatgcccggattcgctcggatgctgaaggatcaacacggcggtgtcgttggtgatggacggaatcaaagcgcacaggcaatgactcgacggccgctgacaacggggacattgcgagcgcgacatggatactcccggacaagaacggcaagtctgccacatccggcgcaaacgtaacggtgagctaagctgatcgcgacgctcacaacgagaggctgcaacgatgctcaccctgcaccatctggatcattcccgctcgcagcgcgtgctctggctactggaggagcttgagctgccatatgaaatcaagctctacacccgagatcggcaaaccatgctgggcccggctgaactcaagaaggtacacccgctcggcaaatcccctgtgatcaccgatggtgagctgacgctggcagagtcggcggcgattctcgagtacctgctcgaccgctacggtagcggccgactggccccgcctgtgggctcgcctgaatatcttcgctttcgctattggatgcattacgccgaaggctcggcgatgcccccgttgttgctcaagctggttttcgaccgcgtcgccaacgggccgatgccgttctttgtacggccggtcgccagggcgattgccaacggcgccaacaaagcgttcataggcccgcagctgaagctccatctggactatatggagagcgaactggggaaatcgctctggttcgccggagacgaattcagcgccgccgacatccagatgagttttccgctggaagccgcccaatcacgcgcgggactggacgccagccggccgcgtctgagcgcgttcctccaacggatacgtgagcgccccgcctatcagcgggccatagcgcggggcggtccggtgatgcccgggcgatgaatgtcgcccgagatagccgatcagcgtcgccggggtgctgaatcgtctcgctcggcgcggacccggatcggctgcaaccgaggcggttcgatgaagccaagcgccactgccagctgccagcacacattactgagccatgctttcatgatgaaccctcctgcttgattacgggtcggtggagccatgggcttcgcactcagcataacccaagaaatgccgcctcgcctgcgccagatgttgcagattattcggccccgtgcgcgtcattcggctctataaaatgcgacccggacaatgtacaagcgttcatcgtccgggctctagcttgcgcctgtaggggaatacgtcgattaccttaccgtcgcctatcgcttgctgcaggcccttccagtagttggcgtcatagagttcgccgtgcagcttggcgaacagccgtcgttgctgcagatctgcgaacaggaaacgcggaaactcttcagggaacacgtcgttcgggccgaccgaataccacggctcggacgccatctcgtcttcgggataacgcgcctcggggatataccggaagttcacttcggttaggaagcagatctcgtcatagtcgtagaacactactcggccatggcgcgtcacaccgaagttcttcagcagcatatcgccgggaaagatattggccgccgcgagttgcttgatcgccaggccataatcctccagcgcatccttgacttgctgctcgctggcattttccacatagatgttcaacggcgtcattcggcgttcggtccagcagtgacgaaccagcaccgtatcgccctgtacctcgaccgtcgacggagcaacctccagcagctccgcaaggcactcgggttcgaacttggccttggggaagcggaaatcggcgaattcctgggtgtcggccattcgccctacccgatcgacactcttgaccaaccggtatttctcgatgaccgtcgcgcggctgacattcttggcgtgggagaagcgatccttgatgatcttgaatacggtgttgaacccaggcagcgtgaagacgctcatcaccatgccgcgcacgcccggtgccatgacgaagcggtcatcggtagtggccagatggttgatcagcgcgcggtagaactccgatttgccatgcttgtaaaagccgatcgaggtgtagagttcggcaatgtgcttacccggcatgatgcgcttgaggaagctgatgaaatccgcaggaatcggcacctcgaccatgaaatacgagcgcgtgaacgagaaaatgatcgatacttccgcctcgtcagtgatcagtgcatcggcgacgatgcctttaccctcctgatgcaacagcggtaccaccagcggccattgctcgtcgcgagtgaagatcctgccgaccagataggcacccttgttgcggtagagcacggagcagaacagctccaccgtcaactctgggtccttgcacacccaatcgggcaaagccatttgcagctgagtctcgagcctccgcaggtcgccgctgtggtccgcataaggcacagcgaaggcgaagtcggtgaggatctgcgcaagcatgccgtgcaaatcgccgccgggccggtagcggcgaatctgggccatccgctcgtgagcacggttcgatggacgggtcgtgtggatgaacatggtgccgtcgctgatacagtcgtggctgaacagcgtgcaaaagatggagttgtaccaggtctcggatagctcatcatcgaagcgtgggttgatctgttcgatgtacgcctttttcacatgcggccagcgatccacgtcgagcaagacgtcggcttcgaatatcgaacgcaggttggccgccgtttcagcgaccttctgctcgtacaggttgatccgggccgccgaggctcgttgcgcgtcctgccactgcgcctgctcgaagcgagcccgtgcgccttcggtgatcaatcggaactgctctcgatagtcatcgaagcccagcagaatctgtcgggcgatttcggcgtcaggtgatacacggcccattgaattggtctcggcaacggcgggagtctcgagcttagccagaggcggaacccaaggaaagcatcccggcggcatgagacccggtttgaaagcgtgaatcgccttgccaggtgactggcgctcgccaacactcctccgtctaccactggagcctcccatgcgccctctcgatctcgttcgcctgcttggtctcgccgctatctggggagccagttttctattcatgcggatcatcgcgccggagctgggaaccttcccaaccgcgttcttacgggtgtcgttcgcctgtgtcggcctgttggccatcctggcggcgatgcggatccgctgggacttccgcgggaaactgaagttgtgcctgattctgggcatgatcaattcgggcattccgttcgcactctacgcgctggcggcccagttcctgccgaccggctactccgccattttcaacgcgaccacgcccatgatgggggtcatcatcggagcgttgttctttgccgaaacacttacagcggcgaagctgaccggggtgctgtttggcctgagcggcgtggccctgctgacccgcaccggccccgtcgccttcgacgctcatttgctgataggcgccctcgcctgcctgggcgcaaccgcatgctacggagtcggcggcttcctgacccgtcgctggatcaatcaacacggcgggctcagcagcgagctggtcgcattcggcagccaggcgggcgccgtcctgtgcctgttgcccctgttcgccttttccgtgctgaccgcgccgcccgcctcctggggtggcggttccgtctggctcagccttgccgggctcggcatcgtttgtacggccttcgcctacattctgtattttcgcctgctggcggacatcggcccggttcgaaccctcacggtgaccttcatcattccgccattcggtgtgctgtggggggttatgtttctcggcgagcgactggactgggcctacgcttacggcggcgcattgatcgccgtggcgctctggctcgtgttgaagcagacgccggccacagtggcggcgcctgctgccgaagcggctagcaacgttccggtaccggccggaacaccagcacgagccccatcacaatcagcgccatgccaaccagactaagcgctgccaggcggttgccgaataccagataatccatcacggcggttaccgcaggcaccagatagaacaggctggtcacgttgaccagattgccattggcgatcagccggtacagcagcagcgtggctgcaaccgagatcaccaaccccatccagagcaccgacagccagaaacccggctcgagcgtcaggtccaacggctgcgttgtcgcgacgaacgaacaaagcgccaggccggcaaggtactgcagaggcatggcgcgcagtggatcgccctgaacacgtttttgcagcatggagccaagggtgatactcgacagcgccagcaaggcgcagcccacgcccgccccggataacccacccacacctatgctctggtagaccaccagcactagcccggccagaccgagcaacagactgaacagccgcagtggacgcaaggccttccgttccagcaacaccgccgtgaggatcggctggacaccgagcaccgttgccatgacccccggcgtcacctgtagatccagggccagcagataaaatatctgatagctacccagcaacaccaagccggttactaccgccagccagcgcgccgcccacctgtcgggcggcgataacgccgcccacttcgtcacggccagcaccgccagcaatgcgatcaggaagcgcaccaagagaaaggcaaacggcgatgcgtatgccaggcccaacttagacacgattgcgccgctgctccacagcaacacgaacagagcagtggtcgcgtgcgcgaccgctgcggtacgagaaaagaacatcatcctgccaccttcgaatagggcatacgaaactgcgccagcgaatggcagacgcagtgaccgggaggccggcgaaccggcgtgactcaggccagcgcgggtggcggtggcggagcccggaaaacgcccggtggtgggctcccaggatgacagagcggagcgttcggcatgagcacaggcacgatggagccgtccggaatgggacaggcctgatcgatggcgctgctgcaagagacgtggctcataccgatctcgaagcggtgggaagactgactataggtgtaccgcgccgattcgccaaggcagcgtcggcgcggtggggatcactgctgcaattcctgctcaccgaacaggtcggcaaacaacatggtggacagatagcgttcaccggagtcgggcaggatcaccacgatgttcttgccctgcatttcgggacgctcggccaagcgcacggcggccgccatcgcggcgccgcaggagatgccgcaaaggatgccttcctctcgcatcaagcgcagcgccatggctttggcctcttcatcgctgacctgctcaacctggtcgaccatggcgagatcgagattcttcggcacgaaccccgccccgatgccctggatcttgtgcgggctgggcttgacctcctcaccggcgagggtctgggtgattaccggtgagctggtcggttcgaccgccacgctgaggagcttcttgcccttggtgttcttgatataacgcgacacaccggtgatggtcccgcccgtgccgacgcccgataccagcacatcgatgttgccttcggtgtcgttccagatttccgggccggtagttttctcatgaatcgccgggttggacggattctcgaactgctgtggcaaatagtattgctcggggttcgacgcggcgatttccgaggccttctcgatcgcgcccttcatgcccttggccggctcggtgagtaccagctcggccccaagcgccttgagtaccttgcgtcgctccagactcatcgaggcaggcatcgtcagcataagtttgtagccacgcgccgccgcgacgaaagccaggccgatgccggtattcccagacgtcggctcgacgatggtcatgccaggcttgagacggccgctttcttccgcgtcccagatcatcgcggccccgatccggcatttgaccgagtgagccgggttacggccctcgatcttggccatgatgctgacgcccttgggccccagccgattgatcatcaccaacggagtgttcccgatggcctgcgcattgtcagcaaagatgcggctcatgacagtgtccctgcaaatgaaaatctggactgatcagcctatgcgctgtctcctggctcgtccagccgaactcaccgacgcatgccagggtccacccacaggtaagcccttcagatactccagaccagaccgggcacgtcatgaaaaaacgctaccaactgccgttgtggatactgctgtcgatcgccctgctcctgctgatcgctcacctggctttgccgtacttggtacttaactacctgaacgacaagatggcggacatgggcgagtatcgcggccatgtcgacgacgtggacctggcgtggtggcgaggagcctatcgggccgatggcgtcctcatcgagaagaagaacgagcgggttcaggcaccacttttcaccgcaccgacgatcgacatcggcgtgagctggcgggcgctgtgggaggatcacgcgctggtcggagaggtgcagctggagcacccgcaactgaatttcgtcgatggccaaggggccgacgactcgcagaccggcgaaggcgtcgactggcgcgagcggctggaagacctggtgccgttcacccttaacgaattgcgcgtaaccgatggccagctgtcatttcgtaacttcgaagccgacccacaggtgcacatctacgccaatgcgatcaatgcaagcctctacaacctgaccaataccgccggtgggcagggtcgcgtcgcgacgttcgaaggcacggccaaattcctcaatcacgcgccgatggaagccaccgcccgcttcgacccgtacaccgattgggaggacttcaaggtgaacctgcgcgtgaccgacgtggacctgaccaagctgaacgatttcagcaatgcctacggaaacttcgatttcgccggaggtaccggcgacctggttatggaggtcgaagccaacgacaaccaactgtccggctatatcaaacccttgcttcacaacgtcgacgtgttcaatttcgagcaggatgtcgaaaacgaggacaaaggcttctttcgcggcatctgggaagcggtggtcggcggcagcgaagaagtcttgcagaaccagagcaaggaccagttcgcgacgcgggtcgagctctctggaagcaccaagaataccgaggtcagcccgttccaggcctttatcgcgatcctgcgcaacgccttcgtggaggcattctccacccgtttcgaacggtcgttgggagaggaagatgagtaagacatgggaggcagctcgcgcccattcagtgactgaatgatccactcgcgttcacagtccatgtcccatcccttatagtcatttgcctaaccagacatgacgcgcctgcgtgccaggcccaatccaaggaaatcccgatgaagttcgaaggtacccagtcctacgtcgccactgacgacctgaagctcgccgtcaacgcggccatcacgctggagcgcccgctactggtcaagggcgagccgggcacaggcaagaccatgctcgccgagcagctggccgaatccttcggagcgaaactgatcacctggcacatcaagtccaccaccaaggcgcatcagggcctgtacgagtacgacgcggtaagtcgcctgcgtgattcgcagctcgattcggaccgtgtgcacgacgtgcgcaactacatcaagaagggcaagctgtgggaagccttcgagtccgaacagcgggtcatcctgctgatcgatgaaatcgacaaggccgacatcgagttccccaacgacctgctgcaagaactcgacaagatggagttctatgtctacgagaccaacgaaaccatcaaggccaagcagcggccgatcatcatcatcacctcgaacaacgagaaggagctgcccgatgccttcctgcgtcgctgcttcttccactacatcgcgtttcccgatcgcgagacgctgcagaagatcgtcgatgttcactatccgaacatcaaaaaggacctggtcgccgaagcgctcgatgtgttttttgacgtgcgcaaggtccctggcctgaagaagaagccgtccaccagcgagctcgtcgactggctgaagctgttgatggccgacaacattggcgaagcggtgctgcgcgagcgtgatccgacccgcgccattccgccactggccggtgcactggtgaagaacgagcaggatgtacagttgcttgagcgtctggcgttcatgagtcgtcgcgccagtcgttgacgtcggcggctccccacggggccgaccacctcacatgacctggagaaaagccatgcaaacgcatactggtagttgcctctgtggcgtcgtgcgctatcgcatcgacgcaccgatcaacgagctgacccattgccactgcaagatgtgtcgcaaggcgcacggcgcggcgttcgccagctacgcgagcgtccccctggaagcctttcactttctttcgggcaaggaccagcttggcgtcttccactcctccgagcatgtgacgcgcaccttctgcattcgctgcggcgcaaatctgcaattcgtcgacaatcgcgagcacgagttgggcgtggctgccggcacgctcgactcgccgctgccggtcccgccacaggagcacatcttcgtaggctccaaagcggactggtacgagatccgcgacgggcttccgacgcacgacgaagatcgctgacattcatataaacaggtgccgctacgacggcactaccgaggttctgccatgctgcttggcctgttcaacgaaatgcgcgccgccaaggttccggtgtccgtgcgcgaactgctcgacctgatcaacgcgttgaaacacaacgtcgtattcgccgatatggacgagttctactacctgtcccgggccattctggtgaaggacgagcggcatttcgacaagttcgaccgcgccttcgggatctacttcaagggcctggagaacctcgaccagcatatcgaggcgctgatacccgaagagtggctgcgcaaggagttcgagcgctcactgagcgacgaggaacgggccaagatcgagtcgcttggcggcctggacaagctgatcgaggaattcaaaaagcgcctcgaagaacagaaggaaaagcacgccggtggcaacaagtggatcggcaccggcggcaccagccccttcggttcgggaggctacaaccccgaggggattcgcatcggtgatgccggcaagcgccagggcaaggcggtgaaggtctgggatcaacgcgagtacaagaatctggatgatcaggtcgaactgggcacgcgcaacatcaaggtagccttgcgtcggctgcgcaagttcgcccgccaaggcgcgcaagacgaactggatctggacgggaccatcgatcacaccgcgcgcgacggtggtttgctgaacatacaaatgcgccctgagcggcgcaacgcggtaaagctgctgatcctgttcgatatcggcggttcgatggacgcccatgtgaaggtgtgcgaagaactgttctccgcctgcaagaccgagttcaagcacctggaatatttctacttccacaacttcatttacgaatcggtctggaagaacaacttccgtcgcacgtccgaacgcacctcgacgctcgacctgctgcacaagtacggcgccgactacaaggtggtgttcgtgggcgacgcagccatggcgccttacgaagtgacccagcccggcggcagcgtcgaacactggaacgaggaagcgggttacgtctggatgcagcgcttcatggaaaagtacaagaagctcatctggatcagcccgtatcccaaggacacctggggttacaccacctcgaccggcatcatccgcgagctggtggaggaccggatgtacccgctgacgctgagcggcctggaagaaggaatgaagttcctggcaaagtagccgcgcgaaacggtcgctcgaagggcaacaaccagaggcccttggctaggtaccacccggacggcctggacgagcgacgcgacgggttccgcgtgtgcggcgatgagggaacagcaaccttcgcattagcaagtaaagacattcgacgatccacgccagcaataacgcgcagccgatgccccaggcgatcgcttccggtgccagcaggacctggaagcgatagctgctccagacctgctgcctgagatcgcgatccgcccctaccaatacatgccaggcctgcgcgtaccagggcccctgcatgatccgccactcgcgttcaagcaagcgcacgcgcccgaccagggcggagacgctgcgcgcatcgctctgtatgacgggatcgtcactggcccgatagtgctcgaccaacgcgttcagatcgccttcgaaaaagcgcccggcggtttcctgaaaaccttccaagccttgctgtgcctcgagccgacgcgcttcgacgtggcgttcgtacgcctcgataaagcctgggacctgaaccccgatcagcagaccaagtgcaaacagggtcagccgcaaatagctgcgcagcatcattcggtccgcccgcgcgcgacgcattcacccagccgccagagcgtccactcgcccgccttatgaacgtcccattgctcgttgtcggtcaaaggctcggtggccaccacggtaaccacatcgtccggggtcgtctcggaggtgaaatccaccgccagctcggcgtccttcaactgcgcagggccgaaaggcgcgcggcgcgtgatgtgcgccagcttggtcgagcagaaactgaacaaccactcgccgttgctcagcaagcaattgaacacgcctttgcctcgataaccagcgcaggcctcgagcagatgcggcaacagatcttcagcctcaacgcgatcggggaaatcactccgcacccggttgagcaggtcgcagaaagccgcttcgctatcggtgtcgccgaccggccggtagaacccaggcggaggttggaaatcggcgagctggccgttgtgcgcgaagcaccagtgttgtccccacaactcacgcacgaaggggtgggtgttgaccaacgaaaccttgccgacattggcatgccggatatggcctatcaccacctcgctcttgatcaggtagtgctgcaccatcttggccacctcggactcgcagctggcaaccggatcctggaacaagcgcaaaccgcgtccttcgtagaaggcgataccccaaccgtctttatgcgggccggtgcgtccgccacgttgcatcaagccggtgaagctgaaatgaatgtcggtcggtacgttggcgctcatgccgagcagttcacacatgcgtggtctcccgttacgtctcgttcacgcctgatgccggatccatccagcaagctcagagtcgaggctcggtccgcgcctgatagcggccagccgggcggtattcgtcgtcctcgtcttcttcgagccgctcacgcaaagttcgtgaatcctcatcgctcgccgccgccacgcggcgctgcttgagccggcgctcgaccggccagcgcaacgcgacgaacaccgcgtacaggccgaaggcgatcagcccgtagagcgccaggtcggcgacggcacgccaggcgttgttgccgactttgaacaaggtatcgagcgccgtgatcgccactgcgggcgcgaacagctctcgcgtcggatcgacgatggttggcgtcaatagcagcacggcgacgatcaatcgcaacggctcacgcagccagcgccacaaaggccgggtgactcggaaccacaccaggaggcagcccagcgcagcaatcccgtagatcgtccaggcgagcaggtagtcattggcgaataggaacataagggtctcttgtatagcgcacgggcggttaccaatctttgctggcgcgcatgatagcagccgcaagactgccgaccgccgcttcgcgacgcaatgacacgctggtcatcatgcgggtaacgccgtataacgctgcaaaacaaaaaaggctggaaagcccccacagcgtgccaagaagccatacttgtcacatggatacagcaggagagccatcatgacctatcaacatattctggtcgctgtcgactttgccgatgagtgtcatccggtcgtcgcgcgagcccaggcactggcgaccgcaacaggcgcgaagctggcgctggtacacgtcatcgagccaatggccatggccttcggcggtgacgttccgatggacctgtcgatgcttcaacagcagcaattcgaccaggcccgcgagcgcatgaacggcttcgccgaccgttacccaagcctgaccgcggaacagcgtcacctggcctacggccaaccccgccaggaagttcatcgcctggccaaggagcagggctgcgacctggtggtagttggcagtcatggccgtcacggcctggcgctgctgctcggctctaccgccaacgacatcctccatggcgcgccctgcgatgtactcgccgtgcgcctgaaaaaacccgaataactctctagccgagtgcctgagcccaagggctcaggccagctctgcgccctcgcccgcgctcatcactaacggccggattttcctcagctgggtttccagcgagtacgtcaggctcgacgccatggaaaaaaaggtcaggaacgccttcaggttggaatcgccgtggcaggtgtcgtggatacgctgccagaacgcctggttgaccagctgtaactgctgaaatgagcgcaccaggccacgtaattcccagtcggcatgacggccttcgcgcaggttgaagtattgccgggccagatacagcgagaccgcacgcagcacgaactcctgattgcttgcaaacggcagatgctggtgtgccatcggcttgagtttgcccagcaccgggcaggcgctggtggccatgatcacaccaagcagcgccctcagcccctcctccaacccaaccagcttgttgtattcacgttccggcgtgcgcacccgtacgtgcgccttcttcaccgcaggcagtccctgaaaatcctcgatgacctgatgcagatccaccgcagcgggacaatggctgaactggtcccggctcagcgggcaattgttgcactgctgatgatccagacgcgtccacttcggtgcctgcgcggcggcaccgtgatcgtaggcgcgatccaactcgatccggtagctgaactcatgctcgtcgtccaggacgatgcggtaatcgattgccatctatggtccgtccagtgctgacagatagtgttggattgaatgacgactcaggcccgccaacgacggtgcgggccagacaatcttacggttgccggacagccctactcggctcagtcctccaattccgcccagcgctccagtagttcgtcgagttctttttgcaatgcctcgaggcgagctagcgtttcgccagtatgctccgcagtctgctgatagaacgccggctgcgcaatttcggcctgcaatgccgcgatgtttttttcgactgcgtctatttttccaggcagggcctccagttcgcgctggaccttgtagctgagtttcttctttgccggagcggcttcggcgaccggcgccgccggtttgctcgccggcgcttcggtcttgctttccttcgtctcggttacaccgagcagcctgggcgaaccaccctggcggagccagtcctgataaccgccgacatactcacgcaccaccccgttcccctcgaacaccagcgtgctggtgaccacgttgtcgaggaaggcacggtcgtggctgaccatcagcaccgtaccttggaaaccgagcagaacctcttccagcaactcgagcgtttccacgtccagatcgttggtcggctcgtcgagcaccagcaggttggccggtttgctgaacagcttggcgagcaagaggcgtgcccgctcaccgcccgacagcgccttgaccggcgtgcgcgcacgttgcgggctgaacaggaaatctcccaggtagctgaggacatggcggttctggccgtcgatggtgatgaagtcgcggccctccgcgacgttgtcgatcaccgtcttttccagttcgagctggtgacgcagctggtcgaaatacgccacttccagacgggtcccggcttcgaccttgccgctcgaaggctgcaggtcgcccagcagcaacttgagcaaggtcgttttgccggtgccattggcgcccagcaggccgatccgatcaccgcgctgcagcaccatggagaagtcgcggatcagtggctcgccacccggatgggcgaatgtggcatgctcgaccacgatgacctgcttgccggatttttccgccgcgtcgatctgaatgttggccttgccctgatgctcgcgacgctcactgcgctcggcgcgcagcgccttgagcgcacgcacacggccttcgttccgggtccggcgcgccttgataccttgccgaatccagacttcttcctgcgcgagcttcttgtcgaacagtgcattggcagtctcttcggccgccagttgctgctccttgtgcaccaggaaactggcgtaatcgccgttccagtcgatcatgtgcccgcggtccagttcgagaatccgcgtcgccaggttctgcaggaatgcacggtcgtgggtgatgaacagcaccgcgccattgaagcccgtcagcgcctcttccagccaggcgatggccccgatgtccaggtggttggtcggctcgtcgagcagcagcagatccggttccgagaccagcgcctgggccagcagcacgcgtcgccgccaaccgccggacagttcagccagggttttatcggccggaagctgcaggcgactcagcgtgctgtcgaccagctgctgcaggcgccaaccatccttcgcttcgagctcctgctggacatgcatcagcttgtccagatcggcctcgttctggatgttctggctgagatggtggtaatccgccaacagctgaccgactccggccaggccctcggcaaccacgtcgaatacggtgcgctcgtcagctagcggcaactcctgcggcaactcaccgatcttcaggcctggtgcgcgccagatctcgccgtcgtccggcaactggctgcccttgaccaggctcagcatgctggacttgccggtcccgtttctgccgatgatgcacacccgctctccccgcgcaatctgccaggacacaccatcgagcaatgggttgttgccataggcgagggacacattggtcaacttgagcagggtcatgacgatctccgaaaaacagggcgcgcagtctagcagaatgcgtttcacagccgatcgccgacgagcgccttaagccggccttcggcgcgccaccatggtcgccgcatcggcatgttccagcacggtctcggcggcccgtaagcgcgttcgtcggaacccgccactttgtttgtttcaagcgcttaatcctcgtttaactgctcgactcggcaagataagctagtggccagcaatcccatgcccccgtcttcggaagtctcatgcgcggtcgactctccagtatctgtttctgtcttctttccatcattttcaccatcgagaccactcaagcggccaccctgcaacagcagcgacagctttacgacgaagccaagcgggcgctggacaagggcgatagcggcccctaccggcgctatgcagcgcaattgcgcgactatccgctggagccctatctcgcgtacgacgaactgacggcgcgcttgaagaccgccagcaatgcggaggtcgagaaattcctgaccgagcacggcgacctgccccaggccaactggatgaagctgcgctggctgcgcctattggcggcacgtggcgattggaagcctttcgtagcgcactacgaccccaagatgaacttcaccgagctcgattgcttgttcggccagtaccagctcgccagtggccagacgaaacaagcgtacgagaccgccgagcggctctggctggtcggcaagtcgcaacacaacgcctgcgatgcgctgttcgatcgctgggaggccgccgggcagctcaccgagccgctgcgctggcaacgtaccaagctggccgtcgaagctggaaattatggcctcgccagtttcctggccaagaccctgccgacgctcaaggcgcagggcgagctaatgatcgatgtggcgcaaaagccgcaaatgctcgggcagccggatcgcttcgcacccgcgtcccagacgatgggcgatatcgtctcgatcgggctacgccgcctggcacgcaccgatccggaaaaagcacttggattgctcgacagctacgccaagcgcctgtcgttttcgaccgatgagaaagtggccatcgctcgccagatcggtcttaccctggccagacgcttcgatgcgcgggcactgacggtgatggcgaactacgaccccgaactgcgtgacgataccgtcagcgaatggcgcgcacgtctgttgctgcgcctggggcgctgggatgatgcccacgcgctgacccaacggtttcccgaaacgcttgccagcaccagtcgctggcgttactggaacgcgcgcagcctggagctggccaagcccaacgacaagcaggccgcccagctctatcgaccggttgccgatgaacgcgacttctacggcttcctctcggccgaccgtatccaggcgccgtacaagcttaaccatcagccactcgcgctggatccgaagctggtgcagaaagtccgcaacaccgcagggatccgacgcgccatggaatttcatgcccgcggccagatcgtagatggtcgtcgtgagtggtattacgtgagccgcctgttcagccgtgacgagctggttgcccaggcgcggctggcctatgagatggagtggtattttcctgccatcaggaccatcagccaggcgaaatactgggacgatctggatatccgcttccccatggcctaccgcaacagcatggtaagtgcagccaaagcccgcgaaatccatccgagctgggtgttcgccatcacacggcaggagagcgcgttcatggccgatgcccgctcgcaggtcggcgccacgggattgatgcagctgatgccggcgaccgcgaaggaaacggcgcgacgtttcggcataccgctacagtcgccccagcaggtgctcaaccccaacgtcaacatccaactgggcgcggcctacctgagtcagatctacagccagttcaaaggcaaccgggtgctcgcgtccgcggcctacaacgccggccccggtcgagtgcgtcaatggttgaagaacgccgagcacctgcccttcgacgtctgggtcgagaacatcccgttcgatgaaacccgccagtacgtacagaacgtgttgacctactcggtgatctacggccagaagctcaatgcgccgcaaccgctggtggaatggcacgagcgctatttcgacggtcagtagaacaccgcggcgcaagcgtcggcagacggcaatccgatcggctcggattgccgagggcaccgctttcgatggagcgaagcgtccgacgtgctattgcgccattccgccgaagcgctagtcgagcacttcgaccgacatgcccacactcagcgcaccgctaccgctgccttcggcaatgaggttctggccaaagaacacgccgccgtcgcccttgcgatagctcagcagggtcgtcagcggctcgcggttggggctctgctcgccagtcagcggatcgatggtcggaatgatgcaccgtgaacacggcttgaccacacgaaacgtcatttcgccgatgcgaatgcgccgccaacggtcttcggcgtagggggccgaaccagcgatcaccaggttcggtcggaaccggcgcgtatcgagcagctgtcccacacgcgcggaaagatcgtcgagcgagcgctggccgatgagcagaaacggaaagccgtcgctgaacgccgtccgctcaccgggccgagcatagtcctgatcgatctggatgccctgcgtcgcaggaagatgtaccaaccggcagggtcgatcgagcaaccgcgacagccacgcggccgcggcgtcacccgcgtcgggcgcctgcaggctttcgcgccagatcagcacgccaagcgcaacgccctgcgcatcgggtaccggtacctgcaacggctccatgcccggcgcgctcaattccagcgccgagtcgcctcgccatcgcgcgtgtaacagcgccatccggggcagtacacgctgcgtcaggaacttcccggtcgcggcgtcaaccaccatccaacggcggtcgccgaccaagcccagtgcatcgcaccgggcctccgtaagctcttcggcagaaccggacttgagcgggaagcggtacagcgaagacaggtgcatacggaggtctcgatcggctggtgggtcagtgaggttcgtccagcagcaagcgttcccggacgacgtccaccagtttctccggctggaatttggaaaggaagttgtcgcagccgacttttttcaccatcgccaggttgaaactgccggacagcgaggtatgcagcaccacatacaggtcttttagacgcggatcgttgcggatttccgtggtgaggcgatagccgtccatctctggcatctcggcatcggtgaataccatcagcagtcgatcggtcagtgtttctcgggcatcggcccaggccttgagcttgttcaaccccttaacgccgtcgctggccgaatgaacggtgatgccgagctggctcaaggtttcgcgcagctgcgccagggccaccgtcgaatcgtcgacgcagagcacctcgcgcccccgtgcgcgctcgagcaccgggtcggttaggcgctccggcgcgatgctggtgtcatacggaacgatctcggccagcaccttctcaacgtcgatgacttcgacgagcgcgtcgtcgaccttggtgatcgcggtgagatagtgctggcgtccggccgtcgacggcggtggcaatacctcctcccaattgaggttgaggatgcggtccacgccgccgaccaggaacgcctgaatcgagcggttgtactcggtcacgatgatggtgctgcgttcatccggcaccagcggccgcagcccgatggcgcgcgacaggtcgatcaccggcagcgtctggccacgtagattgacgaccccgcagaccgacccatggcggtgtggcatcagcgtcatcttcggcagttgcaccacttcctgcactttgaacacgttgatggcgaactgctgacggcccgaaagcctgaacatgaggatttcaagtcgattctgccccaccaaccgggtgcgttgatcgactgattcgagaatgccggccatagcgggctccttgtgaataagggaattaggaggctatcggccgtggacgtccgcgcttgatcggtcagggaaagtatttatcggcaaccgacgtgcgcccggcgaaccgagcgcaggcggtcaggcggtctgctgttgatcacgcagcaagggttcgtcccgtagcaacggactatcgtcaggcagatgcagccgcaacgcgcggcgcttcactgaaaaacgcatgcgcttggccgcgtagggctcgccatcgagattgatgccgatctcgtccggcccatcgacctcgagccacggcacccgcgcctttaccgaaacggtgtcgatgcccagcagtccgccgctcagcagcgtgcccagggtcccgaccgcgtcagccggagccgggacgatgcagatgtcgagcaggccatcatcgatcgacgcttgcgggcaaagctgctgcccgccaccggattggcgcccgttgccgatcccgagtgcgagaaattccccctcccaggcgaagtcaggcgcaacgaaccgcccccaggccgcgcgcaactcgttgaaacgcgacagtccggtcagcagataggcactgccgccgagcactcgcttcaactcctcggaggtggtggccgtcaccttcgagccgaagccaccggtcgccatgttgaggaagggctggccattcatttcgccgacatcgaccggtaccggatcgcgactgagcaacgtcagcgcatcgaacggtgccagaggaatgtccgctgcgtgggcgaagtcattggcggtacccaacggcaacaccgccatgctcgcatcggacccactggccagtagcgcctgcgccatctcccgcacggtgccgtcgcccccgccggcgaccagcgtgcggtagccggcatcgagcgcctccagcaccagccgctcggtatcgcccgcctcccaggtgacccgcacagccagttcgttcccgagttggcgccattcgttgaccgcggcccgcaactcctcgttgagcgcttgtttcccgtgaagcacgagcaacgccttggatctgttcatgccaatcgcttccatttcaatgtccgcagataggacccgtcgcagccctggaaagttgtgagcaggtgagcggtcatggggcttaagccgaccacaggccgagctgaccatcggtcagaatcgagcggaacaaaaacccatcgaccggccttcctgcgcaaatttcctttttaatttcagtcagttgcatcgctcatttaattcttcctatcgacaagcgactttgcgccccgtgggtgaactcatttccaggaaggcggtcggagcagttgtccaggtgaaggttgcgatagcggcctgccatcagaaccgcggatcgcggcgatcaaatcgagtattgagctagcaatagccgtaggaaggagccttgtatgcgcttacagtccgttggaacccttgagtacgcccaccccagtttcgttgattacttcctagccagtattcgcctgatccacggtcttacctccgtgctgcccggcgtcctgttgctgctgttcctgccgctcgaattaccggtgggtggcgggaccttcagcaccttcctgatgttcttcggcgtgatcagcgtggtcatcttccaatcggtcggcatctacagcgaagaggtgttcagcacactgctgcgcttccgcacgatgctggtcgcctgggccgcggcgttcagcctgctgatcttcatgcaccagggactgggcatgttcaactatctcgaagccaagcacctgaccttctggttcatcaccagcggcgtactgttcggcgccgagcgcctgatgatgctcgcgctgttccgtcgtctgatggccaaaggcgtctacctgcagaacgcggtcattctgggcggcaccgacaacggtgtgcgcgtagccgaatatctggcccatcatcgcgacatccgcaccggcgttctcggcttcatcgacgaccgcctggagcgcttgcccaagacccttgccgacctgccgctgctgggtaacacgcgcgatctggaacagatgatccgcgaggaaaaggtgacccaggtgctcgttgctctgccctggttcgccgacagccgaatcggccaggtcatcagcgaactgcgcaaactgccggtcaacgtgctgctggttcccgacatggtcgcgtttcgccatgccaacaagcgcatcaccgaggttggtggcctgccgacactgatcgcatccgacctgccgctgcgtggctggtcgccgatgttcaagcgcatcgaagacatcgtcctgtcgagcctggccctgctcgccgcggcacccgtgatgctgctgctggcgctggcgatcaagctggactcacctggccccgtgctgttcaagcaaaagcgctacggctacaacaaccgtctgatcgaggtgttcaagttccgctccatgtaccacgagcgcagcgatgccaatgccgatcgccagaccacccgtgacgatgaccgcatcactcgggtcggccggttcatccgcaagaccagcctcgacgaactgccccagctgctgaacgtcttcctcggcagcatgtcgatggtcggcccgcgtccccatgcgaccgcaaccaaagcggccggcgtactgttcgaagacgccgtgtcggaatactccgcgcgccaccgtgtcaagcctggcattaccggctgggcacaaatcaacggctaccgcggcgagaccgacaccctcgaaaagatcgagaagcgcgtcgagttcgacctggattacatcgaacgctggtcggtctggttcgacatctacattctcgcgcgcaccattcccgcgctgctgttcaacaaggacgtttactgactgctgtttgcacgacggcgacctacgggcgacatgccctctacacgcgcgagcacagcaggacgattgaactaatgacgcgagcgaatatcagatttgcgttccgtgacacgcgcgcccaaccgcccgtgaattcagggctcagaggctaggcgagaatgtttcagaacatattgattgtctgtgtcggcaacatctgcagaagcccggcggccgaagcactgttgctggacagactccagggaaaagggctgacgatcagctcggcaggtataggcgcactggtaggcaacccgatggacaaaaccgcacatgaagtgctgaccgagcacgggctggaacaccgagcccaccgtgctcgacaggtcgacagcgaaatgctgcaccgggcggacctgatcctgaccatggagcagagccacatccagcatctccgccagatggcccccgaggtccatggcaagacctttctgataggcaagtggttggacgacattcagattcccgacccctttcgtcaatccaaacccgctttcgaacacgttcacagccttctgacgcagtccgtcgaaagctggcttccttacctgaaataagaagaaggaacttcaatgaccaccatgccacgccccatatatgaaaccaaagaggacaaggacatcgatcttgcccacctctttgatacgttcatcaacaaccgaaccctgatcctgaccattacaggattcttcgcggccctgggtgtcgcctatgcgttgctggcgacaccggtctacctggctggcgcgatgatccagatcgagcccaaaaacggcctgccaagtctgaccgacgtggttaacactaccccggcggtatccccggcgcagaccgagatcgcgctgctcaagtcgcgctccgtcgtcggcggtacggtcgaggcgttgaatctggacatcatcattgagccacaccacttccccctgatcggtggcttcatctatcgccagttcgaaccatccgaagaaggcgagctgggctggtatccggaagggttcgaatcctacgcctggggtggtgaatccctgcgcgtgacgcacctgttcgtcccggaccagatgcacggtgaagaactgacactcgaggccgcggaaaacaacggcttcatcctccgcgaccccgatggcgaagtggttgcccaaggcgtggtaggcgagccggtcgaaacgccggattacgccattaccgtcagcgaactcaacgctcgaccaggcaccacgttcacggtcatcaagaaccgcacctacgcgaccaccgaggattaccgcaatcgcctgtcagccggtgagctcggcaagcaatccggcatcatcaccgtgactctcgaaggcaccgatccggacaaggccatcgaggtgctcgaggaagttgcgcggcgttacgtcgagcagaacgttgcacgcaacgcggccgaagcgacgcagagcctggaattcctcagcgagcaggtgccggaagtccgcaagaagctcgacgccgcgcagaccgcgctgaacaagtaccagaccggcaaccgttcggtggatatctcggccgagacccagtcggtgctcgatcgcatcgttgacctggagaaacagatctccgagcagaacctcaagcgcaccgagatggagcgccgcttcacccgtcagcacccgaatttccaggcgctgatgaatcagatcaaccagctgcagagccaaaaggccgaactggagaagcagatcggcacgctgccgtcgactcagcaggaactgctgcgtctgacccgtgatgtcgaggtgtcgtccgaaacctatgcgatgctgctgaacaagacccaggaactggacatcatccgggccggcaccgtgggtaacgtccgtatcgtcgaccatgccgatgccgacatcgatgacccggtcaagccgaacaagcccctgatcgtcatcgccgctaccctgctgggcctcatgctcgccacggctttcgtctatgttcgcgaagctctcaagcgtggcgtggagaacccggaggaaatcgagcgctccggcatccccgtgtacgccgccattccgttcagcgaaaagcagggcgcgttggaaaaacgcctggcgaactacaagcgcgacaagagcagtgcctcttacctgctgacaatcaacgacccggccgatctggcgaccgaagccatgcgcagcctgcgcaccagcttgcacttcgcgatgatcgaggccaagaacaacatcctgatgatcaccggccccagcccgggcgtaggcaagtccttcgtgaccagcaacctggccgcggtgatcgcgcagtcaggcaaaaaagtgctgctggtcgacgctgatatgcgcaagggctacctgcacaaggtcatgcgctgccagggcgagaaaggtctttcggacatcctctccggccgcatcaccctgttcgatgccatccagaagacccagctcaacaatctccacgtgatcgcccacggtcagttgccgccgaacccgtcggaactgttgatgcacgagaacttctctcgcttcgtcaaggagatcagcggcatgtacgacatggtgatcttcgatacgccgccgatcctcgcggtgaccgatgctgcgctggtcggcagccaggccggcaccaccttgatggtgacccgctacggcctgaatggtgtcaaggagatcgaattcgccaagcgtcgtctcgaacagaacggactgctggtcaagggcgttattttcaacgccgtagtgcgcaaggcatcgacctacagcgaatacggttactaccagtacgactatcagagcaaataagcgcttggcgcagcttcccgacatgcgcggcatgtcgggaagccttatgacgctcgcattttccgtgattgacgatcgctcgcccatgccgggcgagcgggcagtttgcacccgttatacagcgacccatcgagccagagctttgcgcaagtcgctcgctgggcatcaaggtaaacactatggcacgtcgcgttcttttgcctctgtccgacacgatacggttgttcgccggcctggcgttggccggctgcgctgtgctggcgcaggctcagcccagcgagaagagcagcggtatcgacctgatcggcatcaacatgtcggcggccaacttcgcgccccacgtaacgcctggcaagctcggcaccaactatttctatccggatgaaacgtacttcaagtactacgcagaaaagaacattcgcctgatccgctttcccttcatctgggaaagactgcaacacgacctggacaaagggctcaacttcgatcagatccgcctgttagaacgcacgctcgattacgccgccaagcacgggcagaaagtcattctcgacatgcacaactatgcccgatacaagggcgagctgatcggttcgggcagcgtgccttacgaagcctacgccaacgtctggcacaagctcgcggagcagttcaaggatcatcccgctctgctggggtacgacatcatgaacgagccccactccaccaaaggactgtggcccgcagcggcccaggcggcggtggacgcgatccgtcaggtcgatatggacacgctgatcttcgtcgagggtgaccgctggtccagtaccttccattggcgcaaggtcaatgaagatttcctgcttgatgatccagcggacaagctcgtctacgagggccatctgtatctggacagggatttctccggacgttacgccgccgacgaatccgtcgacccgatgctgggggtggaacgtgccagaccgttcgtcgagtggctgcaagagcacaatctgaaaggctttctcggcgagtatggcgttccggcccaatccgagacgatgttggtggcgatggacaacctgctcggctatctcaatcagcactgtattcccagcgcctactgggctgggggaccgggctggggcaagtacgtcctagccatagaacccatcgacggccaggaccggccccagatggaagtgctgcaacgacatatcaccaacagttgcaccgagtacgggccgtcgccacgcccctgatcccgctttgccgctcggcctaataagccaagcggcaggtcgggaaaacggtgtgaagcccgtctgaatttcttggcaattgcacgaacgacacgcaacccagccattaagccgttgtccaacgcttcgaccaagcatcggcgggtttaatacgagcggaactcgaatgacccgacggtatcgaaagcgttcgctaaccaccaccgcgcccggaaatcgctccactaccgggtcgcaatacatagcgtagcggcgcttcgatgggatcggcatggcaacgtggaatggcttgagtttgttgcggcgcagttgatcaggaatggaaaggcacctaaggactcaggggatgacaaacatcagctcgaaatttttgtatttgccgttaaccgtgctggcgctcgtgttgcatttctccgtgttcggggacagcacgcacaacccggtcgggttcaagtacctcaacgaagcctatctggcggtctgcctgggcggggcgctgctcctggtgctcgccgcagccgaagacgccgccagggaataccgtgtattgatgtactacgcgctgtacagcttcgtcgtctttaccgtgctgccagcgatattcgccttctacacctatggccagccgatcgcctacggcctcatcgaagagcggcgcattctgttcgcattcggtttcgtcccgctcctgctgctcgccaagaacctgactacgcgccagttcgagcattcgctcctttacgccgcgttgttcgctgcgttcctttcctggtgtttcaagttcggcatgctgcctgacctacgtacggaacaaaccgcctgggaccgtccagaccgttcctccatcggcccgttcctgatctgcttcgcctatttctattgcatccagatctgggcgaaaggcaagtcaccgatcagcggagaaaaaaggcaccgcaacctctatctggtcgtggcggcgatactgctgctcacgctggttttcgccacgcagacccgccagctcatcgtgctttgcctcgccttttcgctgttctgcctgcgggcgaaagcgattgtctgggcggcttcattgtgcgtgctgttgtcgcccttctttttctacccggaattgctccagacgctgggcctgaatatcgagttctacgagaacagcctcgaaggcgatgtcgatgatggcgtgcggcggtacaccatcgctgcgatcttcaggcatctggatctggtcaactggttgcccagcggttcgttgtcgctgatgtggcaagacggtttcatcccctacttcggcgaacacttcttcctgtcggatgttggcttcattggcaccatgttccgcttcggattcctgacctttttcgtggtgcccatgtcgctgttcgtctaccagcgcatcgcccgcaatatcaacccggatatgggcttcaactacgccgtcatgctcgcgctgttcgttatctggccgctcagtggcctattcgagtacgcgcagccgatcgtagtgatgcttttcgttatacatgccctccgcgcacgccatcttcgcagcaaggaacgagtacatgaacgtcgcacttattctcaactacaaagctgctactgaaactatcagctgtgcagagagcctgctcgatcattgtccgacgatcgaccatatcgtcgttgtcgacaacgattcccaggacggctctgatcgcgccttgcagcaatggctcgatgaaaagccttcggccaaggtcacgttgctttgcaacccggaaaacaatggctatgcgggcggtaataactacggcttgcgctgggcaatggaaaatctccaacccgaatatttctgggtagtcaataacgatacctatgtcgacagcgatgccttctcgccattgctcgaagcgttgaagcgtgatgatcggcagttcgtcggctcgctggtattgagtgccgataccgggcgcctggaatgttacggcggaggcaagctgtacccgattctgggcaaggcccgcctgctgggaaaaaaccagagcatcgatgcgttacagcagcaactgccccaacatgacccggattacatcatgggctgcagccttgccttttcagccgcgctgaccaaggaaatcggtctgatggatgaaagctacttcatgtatttcgaagaagtggattggcaatatcgcgcccggcgtttcggtgtatctatcaaggtaatacccgaaagtcgcctgtttcattatggctcgctcagcctcggtaaccgctcggccttttatcattactatcgcaaccgcgcagcaactcgcttcaacaagcgattctacggaccggttttcgctcttgtttccgcattcctgctttcggccgttacaacgatcaaggaattcagaaatcccgccctcgcctggtcgggtatcaagggcgccttcaagggagtagcaatgagtgtcaaatgataccagtgcgttcggaatagacttttattccggcaataaaaagacgttattgagctgcatccgcgaaggcgtaaaacaacccttttcgtttgtagtaacgccgaatgtcgaccacctcgttcaactcgagcacgacgaagcgctgcgcgacgcctatgccaaggcgcgctggaggctgtgtgacagccgcattctgctgtcgctcctcagccggctgggcgtgcatctggacgaagccatccccggcagcgacctgaccctggacctgctcaactgggccaacgaagcgcacctgcgtgtggttctgatcgggtccttggaaagcgaagcggacaaattgcgggcgctctaccccggcatcgatctgtatcactacaacccgccgatgggctttatcaagaagcccgaagaggtgcagcgctgcctgcagttcgtacgcgaaaacccgtccgaactggtcctgtatgcagtgggaacgcctcgcggggaaatactcgccgcggcgacccaatcgcatgagcgcacgggaatgggcttcagcatcggcgcgtcgatttccttcgcaaccgggacgatcaagcgggccccgaagtggatgcgtgaatacaagctcgaatggctgcaccgcatgtgcatggagccccgccgactggccaagcggtattggatcgacgcgctttacatagtgcccgcctttttgcgggagaagagcgccaggcagaaacccagtccggccaagcaggaatcctgatcggccagagtgaccgtcatccgaacatgccgaacacggccgttcaatgacacgagtcgacttatcaatggtgcctcgctgtatccagagccctgtgccaggcggagcgaagcaccagcaacttgaaaaacctaaccttgaacagggaagagaatgaaagcgatcatcacgggtattacagggcaagacggcgcctatctggccgagctactgctggagaagggctacaccgtatatggcacgtttcgccgtaccagctcggtaaacttctggcgaatcgaagaattgggcatcgacaagcatcccaacctgcatctcgtcgaatatgacctgaccgacctgtcctccagcattcggctgctggaaagctcgggcgccaccgaggtctacaacctcgccgcgcaaagcttcgttggcgtctccttcgagcagccgctgaccactttggatatcacgggcgcaggcgcagtgaacctgctggaagccattcgcatcgtcaacccgaagatccgctactaccaagcgtccacctcggagatgttcggcaaggtccaggccattccacaaatcgaaacgacccccttctatcctcgcagcccctacggcgtcgccaagctctatgcgcactggatgacgatcaactaccgggagtcctacgacatcttcggttgcagcggcatcctcttcaaccacgagtccccgctgcgtggacgcgaattcgtgacccgcaagatcaccgactcggtggccaagatcaagctgggccaactggacgtgctggaactgggcaacatcgacgcgaagcgtgactggggctttgccaaggaatatgtcgagggtatgtggcgcatgctgcaagccgatgagcccgacgtcttcgtactggcgaccaaccgcaccgaaaccgtacgcgacttcgtcaccctggccttcaaggcggtcgataccgaactgcagtgggaaggcactggcgagcaggaacaggcgatcgacgctgccaccggcaaggtcgtcatgcgggtcaatcccaagttctatcgccctgccgaggtcgacctgctcatcggtgatccgcagaaggccaaggacgtactgggctgggagccgaagacttcgctggagcagctatgccggatgatggtcgacgctgaccttcgtcgcaatcaacagggcttctccttctgacggcttcggcctgacgatcgaggcgccgcaccaggagacggactgcagggttccgcaccccttcgtcgcgcgcacaggacaagcggtcctgtgcgtgcctctcccggtactgccgcgctccggacgcggctgcggcgaccagagcccgcgaatgaggatgcgatgcggacgctaggctcgaagtttgtcggatagccgtaaccgggacgcaacatcccatgcctatatctgggatggagcgctccgctgaaattggaattcatcctatcgggaaaatcatgcgcaaagtgctgattaccggcgtcaccggatttaccggccgctatatggcagaagaactcgcagcccacggctacgaagttcacggcctcagctatcgtcgccccgtagacgagctgccttcggcggtttcggccattcactgttgtgcgctgaacgatgccgaaacgctgcgaaccctcctgttggaaatccgccccacctatgtggtgcacctggctgcggtgtcgttcgtcgcgcataccgatgcggatgccatctacaacgccaatctgctcggtacacgtcatctgctcgaagcgctccgggtcaccgccacgggtgtcgagggcgttctgctggccagcagcgcgaatgtctacggcaatgcgaccgaaggggtactggacgagtcatcgccctttgctccggctaatgactacgcggtgagcaaggcagccatggagtttttggcgagactgtatgtcggcaggctgccactgatcattacgcgtccgttcaactacaccggcgtcggccaggccgagcagtttctgatccccaagatcgtcgcgcacacccgtcgtcgtgccgatgtcatcgagctgggcaacctggatatcgcccgcgatttctgcgacgtcaggcaggtcgtccaggcgtatcgacgattgctcgaaacgcccgctgcggttggcgaaaccgtcaatatctgttcgggctcggcgtacacgctcgagtacgtactgcagcagaccgcagccatttccgaccatcgcatggaagtccgggtcaatccggcgttcgtgcgcagtgcagacgtaaagaacctgtttggttgtcgcaccaagctggattcgctcattggcgaccttccgcagatcgaactgaaggaaacgttgcgctggatgatcgaatatcgcgctccagctgaccgactctgataaccgtcatccggtcatggcgacctgaccggcccggctttgcccaggcagcatccgtagccggcccccgaccgtcacggcgtcgtcgatcacgttctataccgctacccatccatttctcaacagcccgcgtgagcaagcatgtggcagccgacttgcgcatcgaatcggcccaggtagcgcgctagagagcccgagctgagctatcggccaacttgctgccgagaccggtgtcatttatgcgcaccggcttgaaccccagtgaaacggagcggtctatggctactgtgagcagcaaggcgcccgttcctaatgctgcgaaaggtgaggacgggttgagctaaccgaaccatcactcacacggaacggtcctcgaatccaagtcggagacgtactgcttccggggctttgcggtagcgacaacaggaacggccgattggatcgccctcaggcatcgaactgatcacccatcagtcgctgtggacgaatcaaccagctcgatcctccagctaaaagtgaatcccgccgtttcacttcgtaaaaacaactattccgtcaaggatgaagaaccatgaaaccaatatttgctctcgctttctcttccgttctggcgctccagggatgtgtgttttcgcccggtcagtaccttgacccggatgagttcaaggacggcgcgaaatcgcaggacggtaacgtacagttgatccgcatcacgcccgatatcctcaaaggcgaactgtcttccgaccggggcacctccagcaaacaggagctgctcgacttcaaacccgaagcctaccgcatcggcccaaatgacctgctctacatcaccgtctgggatcaccccgagctgaccgcaccgtccggcccgcaacaacagctggacgccaacggccgcctggtccgcccggatggcaccctgttctatccttacatcggcaatatccaggcagccggccgcaccatcgaagagctgcgctcccagatcgcgcgtcgcctggccaactacatcgacagcccacaagtcgacgtagcgctgctgcgctatggcagccagcgcgtcgtgctgtcgggtgcgttcaacaccgccggcgaggtgcctgtcaccaccgccccgatgacccttgtccaggccattggccaggcgggcgtcgataccgctacggctgacctgtccggcctgatcctcaagcgcgacggccgcgagtacatgctcaatcttgacgacctgaaccgtccggattcctggctgaacgacgtgtacctgaaggatggcgacaagcttcacctgccttacaacgaccagaagaagatctacgtgctgggtgaggttactcaaccgcaagcggtcaacttcaaggcttcgagctacaacctgatggacgcgatcggcaccgctggcggcattcgccaggacactgccgacggcgaagcggtctacgtgatccgcggagctgaaaatatcgccaccgagccggccaaggtattccagctcaacgccgcttcgccgactgcctttgcactggccaagagcttcccgctccagccgcaggacgtggtcttcgtcgggccagcaggcatcactcgctggaaccgcttcatcagccaactgctgccgtcggctaccgttgttggcaccggtgctgcgttcaaccgctgatcgtgtaacaccgttcaggtcgatgctggcctgacaacagaaccgcagccatccctcggacggctgcggtttttcgtttcagctcagctggcagcagcggcccagcgaaagacaaacggcatctggccgccgttgtccaccgtactaacgcttcgtggccaggcgaaagcgtgatgccccgaccgcctggcgtaacgaacaccgattgcatgcctactccgtcgggatggtcggatcatcctcgaacatattgatgtcctcgtcgctgagtcctgcatcctcggggtcggacatcggcgtgtcgttaatgctcgcgccatcgggatcccccgggagcggcgtatccgcttcggagtcgtttgcggccgataccgcagtgcccatcatcatttcgacttgcatgcatcacctcgcagcgaggcccccaatggcccctgcagatatcgagcgttgataacggcgattggtgcgcaccagtggtcggagcagcgaagctgcccggcagcagcccagcgctccggtactaatcccgtactcgcggcgatttgaccccttcgatctataccggggccgggggaactcaacaacaatctcattgcttcgcttcttggtgtacggagccctatccactgagaatgggagattccaatgtccaagctgactcctctcgctgccgcacttctgttgatgacaagcggccccctcatggccaatgagcaactcgcagagatcgaacagatcggcaccgataacatcgcgcagcagacacaaagcggcacgatgcaccgatccttcattcgccagaacggtacggccaacgatgcgctgaccgaccaatcaggcgatgcgggcgaaggaagccaggccagcatcgagcagatcggcacatacaacgccgccgaggtctatcaggtccatgcaggctcctccggccttgccagcgcggaaatctcgcagtctggcgattccaatagcgcctacatcgagcagctccagtacctgggcgatcttgccgcaacggcaagcgttcgccaggagggcagcggcaaccagctcgaagcccggcagacatgggtgaacaaccagctggacgtggtttccctaggtcaggacaacaccgtgcatgtcgaccagaccggcttcagcatggcggacatccagcagaccggcgcgcagaatctggtgcagctgcagcagctgagcgcaggcatcggcggcgggactgctacggtcgaacaggacggtgtagccaatcaggccaacatctatcagacatcgggacgctacccagccggcgatgtgatgctgcaacagtccggcaccgccaacctcgcacagatcaacaccagcgatggccacagctcgctgaactatgcccagcggggcgcgggcaacgagctgaccgcccatttcagtgggcatggctcgcggatcgacggttattcggagggtaacgataaccaggtagcggtatcgcaggtcggagacgacaacagcctggatatcgcgcaggtcggctcggataacctgatcgacgcctatcagggttttcataaccatgaggcgctgataagccagtccggtgatgccaaccaggcgatcctgcgacaggagacgctgacgtatcagggtgcttcggccagcatcgtccagaacggcagtggcaacctggccaacgtcgtccagcaatgaggacagtcccgagggcatgagtgagctggaaagcccggcgctgggctttccagcagttaacgcggatcatcgaagctagcgcggacgctgcaccgctctcaacttcccgctgccgccaccgccacagaagaacccgccattaccgtcgtattcgagccccgacacaccgatgtccgggggcatttccacggtgctcagcacttccccggttgccggatcgatatgcctcagctcgctctcgccctcttcccagacgccatgccagaggtcgccctccgcccaggtgacgccggtgacgaaacggttggactcgattgtgcgcagcaccgcacccgtttgcggatccagttggtagatttttcggccgcgatactgccccgcccacagcgacccttccgcccaagcgagacccgacgcgtcctcaggcgccggaatcgaggcgagcacggcgccggtgtccaggtcgattttctgaatgcggtcgccggagatctgaaacaggtgctgaccatcgaaggccgttccggcatccgcgcgggtgtcgaacgaacgcagggtctggccactcgccgggtcgagtgcgtgcagtttgtctccactggcaaaccagacgtggcgcccgtcgtaactgacgccgtgtacgctgtcgacgttggcgaaaggaccatattcgcgagttatttgagctgttgaccgagtcattgcgcttcctccttggtaggtggagaaatcctagtcacatcagcgtcgccccagggagtaacaagatcgtcgcgaaacctggcattggtggcgccatccagcgacgcgacctgccgctgccgattgactccaccttgcccgtgctcgccagctcgtccaacgcgcgttgcaccgaacgctgactgataccgagcgcgagggccaggccggaactcgaccagcaatggccatccgcgagacatgccagcagcgccgcatgtcgcccttcgacgggacgggccagtacgagaacgtcgcttgcatcgaacggcaccagacggaagcctcccttggttgctgtcacactgaccagcgttcccagcagcgcccgaaggcgacccatttccactcgcagccgagcccggtgtgattcgtcggccgtccgggtacgaaacgcctgtgcgataagcgtgtgccgcgatacgtcgtccggccacgcttcggcgagcgctcgcaccaaggcaaacaacatcgggcgcttggccagggacacgcagctaccggcctggcacacgacatgacggcacccatccacgacgaccgatccagaggccagaatgcgttgcacgtcatccagcagcaccagccgttcgccggcagcgctgatcagccgcgccgcgggcatgtccagaatagcggacgcgcgttgcagttccgcatccagcgccgcaatacctgagcgcttcgcagcatgcgctgcccgggccaaggcctggcgcgccgttcgagcctgataatcacgaagtgccatgcccgcgatgatcagctcgtagatcgccttcgacgccgggcccagcccagcggggtccagctcacgaagcgcccgctctgcctcctcgatgcggccgatcagcagccatcgacgcagttccagcagtcgcgcgtaggtggcgttggcctgatcgccatgagcctcgagcgttaccctcgcgtcggcgagcgagcgttccggccagccaaggtcgcgcgatgccagcgccacctcggcttcggcgacgacgcaccgagcgtgcggcaccggttcgtccgttccaaaggcattcgcggcggctctgaacagcgctttcgcccgcacgaattcgccgagttgagccatggcgatgccgcgaagcgcgagagccgctgcgtcgtcgcgcagggcgatccgtttaagcgcgccgagcggatcgcctacggcaagcgcggccgccgcagcctgggcggaggcgtccattgctatccgaacaccactctggtcgggacccggtccgatgtttcgctgccctacgcgcatttcccagccaacctccatagagagtgtgcggcaagcatcctccccgcccggtgtgcatcacgcagcctcaaccatgcgcccggccgctcgctctctgcaccatagccgaacctcgggatgctgcaggcgtcagcaccgaaacccgagcaagcaaacatcaacgcccgtcagcatcctgattccaaggccgctgctagccgcacaacagcgaggaacggcagccaccacccgcgcaggtttggctctctgataaacttgctcaccattttcctggattcgaatccaggattaaccagcgtccacccgccttctcgttgcgcggtggacctgccgcgctgcaacgccgggcaattcgagtcccaccggaataccgcatgaatctcagctccaagccagccaccgccaacccgccactgtcccgccgtttttccgtggcgccgatgatggattggactgatcgacattgcaggttctttctgcgtcagctgtcccggcacgccctgctctacaccgaaatggtgaccaccggcgcgctgataaacggcgacgccgagcgcttcctgcgtcacgacgaggtggaatatccgctggcgctgcagcttggcggaagtgtgcctgccgacctcgctgcctgcgcgcgaatggccgaagcggcgggatacgacgaagtcaacctcaacgtgggctgccccagcgatcgcgtgcagaacaacctgatcggcgcctgcctgatgggccacccggcgctggtagccgattgcgtcaaggcgatgcgcgatgcggtcggagtcgaggtgacggtcaagcaccggatcggtatcaacgggcgcgacagctacgccgaactctgcgatttcgtcggccaggtgcgtgaagccggttgccggagctttaccgtgcacgcccggatcgccatcctcgaagggctgtctccgaaggagaaccgcgaggtgccgccgctgcgctatgacgtcgccgcccggctcaaggaagactttccggatctggaaatcatcctcaacggtggcatcaagacgctggaagagtgcgaaacgcatctgcagcgcttcgatggcgtgatgctcggccgcgaggcgtaccacaatccttatcttctcgcgcaggtggacgccaggctgttcgggagccgcgagccgatcgtcggtcgtgccgaggcgctgagacggatgcgaccctatatccaacgacacctggccgcgggcggggccatgcatcacgtcacccgtcacgtgctagggcttggccagggtttcccgggggctcgacgcttccgccaactgctctcggtcgacatacacaagagcaaggagcgtttggcgctgctggatcaagcgaccagtctgctcgaagggcattgaatcattgaccaaggaacaccagggatcattttcaatccaagtcctgtccgcccgcctctgcgcccgttgagtggctcggggacctcgggtaaggtcaggtcaactcagaggatagagcgccccatgacatccaaactggaacaactcaagcagttcaccaccgtggtcgccgataccggagacctcgatgccatcgcccgtctgcagccggtagacgcgaccaccaacccctccctgctgctcaaggcggctgccctgccccgttacgcggagcacctgcaggcagcgatgtcccgctgcgccggcgacatcgggctgggctgcgatctgtttgccgtggcggtagggcaggaagtgctcaaactcatccccgggcgcatctccaccgaggtcgacgcaagactctccttcgataccgaggcgatgattcggcgcggcgaacgcctgatcgggctgtatgaggaagcgggcgtctcgcgggatcgcgtactgatcaagctggccgctacctgggaaggcatccgtgctgccgagcaattggagaaatcaggcatccagaccaacctgaccctgttgttctgctttacccaagcagcggcgtgcgccgatgccggcgtgttcctcatctcgccgttcgttgggcgcatctacgactggtacaagaagcacgaaggccgcgactatgttggcgatgaagatccaggcgtgcagtcggtcagccgcatctatgactactacaaggcccatggttatcagaccgtcgtgatgggcgcgagcttccgcaataccggacagatcgaagcgctggcaggctgcgaccgcctcactatcagcccggagttgctgagccagctggcccagacggaagggccgctcaagcgcaagctgtcgcctgggcgcgcgtccgagccacgggttacgctggacgagaacgccttccgctggggattgaacgaggacccgatggcaaccgagaagctggccgaaggcatccgtcagttcgcccgcgatcaggagaagcttgaagcgctgctagcgtcctgagtcgagcgaatgcatcttgcggtcgggcgcagcggtaacgcagcccgacggcaaatgcgcagcaaaatgaacaaaaattgaacagacgatcgctggctcaggacaccttttgccacgcctgattcaggatcgctccagagcggtcacgaggtcacgaaaggcctcgcggttggagtcattgaggctcatcagtatacggtgagcctcgagcaccttggtcttgacgacgtcttcggactgatcctggctgggcaaatcggccagttgctcgggcgatggcaacggctgatcgacgatattgaacacctgatcgaaacccatcgactgcagcagccgggtgatatcggcgtgggtggtcaccagggtgggcagcatgccgatcttctgccgggacagaatggacaatttggcaagcagccccagcgtcgtgctgtcgatgcttcggctttcggtgagatcgatcacaatcgccgagaaattcagtgatgaaaaaattttctcgatggttgcatcaagcgccgagcatagcgtcagccgaatctcgccgacgaatttgaggatgaaggtgccatcctgctcggcgaactggattttgccagtgctcatgcaaggttcctgctcaataccagcaacgcgatgtcatcgggcatatcctccagatcggccaggccgagcactcgctgcagtccttccagcgtaccgccagcttcgcaaatcagcccaggcagacctgcttccttatctttgagggtttctcccggcaaaaggtccaaaatgccatcggaaagcagggtcaggctgaacgaatccggcagctcgatctcgtaattatcgtaggtggcttcgacgaacaggccaaccggcagcccacgtccctccagatatctggccgcaccgtcggtatagagcaccggcatcggaagatgtccgccaatgctgtaatgcaggatattgcgctcttgatcgatgaccccacccagcatggtcacgtgcttgcccagcttgcagttgatcagcccgcggttgatgtggtcgagcacctcggatggtttgaacgctcgcagcgcccctccccgccgggactcatacagcaagcgcgtggtcatgaacttcaacagaacggtgacgaacgccgaggaagcgccatgcccggaaacgtcggccagataaaagccgatgcgatgctcgtccacccgaaagtaatcgacgaaatcgccggagaggtaaagcgaagggataatttgatgagcgaactgaagatcatcgaggccgcacggggtaaccggcaacatgttcatttgcacttgccggccggcgtcctggtcttcctgcaatagatgcaggctggcctggagatcacgattcgccgtttccagctgttcgcgatagcgccggttttccagacgcaaccgtgagcggtcgagcgctcggcggaccgaatgttcaaggaccgccaggtcttcgagcggcttgatcagatagtccgccgcccccagacgcaacgcctcgaccgcatcgctcatcacgccagcgccagaaacgacgataaccggaagatcgacctggcgttcgctgatcaggcgaatcaactccagtccgtccatctgcggcatgcgcagatcgcagatcaccagatctggatgttcggcatcgaacagttccatgcctcgcggcccgttaggcgcctgcagcaccttgaaaccactgtcatccagataggcggccagactggctcgtaccacatcgtcgtcatcaatgatcagcagcgtcgcgcttgggttgtgcatgttcctaccaggcggtatcgccaggacgttggcgaaagcatcagccccgcgcaagcgctgggcaagggatcttttcaaggcgcagacggtactcccatacgttcggcgtttcaagccaggcgccgccgctccggctgtgctttacagaccgaattggcgggcgctataagaacgaacgcaaccagaactcaaaggacgaaaaaatgaccctgagcgatcgggactacagcgagaaacgcgatttcattcgcatgcagatcgagaccgcgatcaccctgacacagggcagccagcgccatgagggcgtatgtctggatctttccagtaccggcatgcaggtcctcgccgccaccaacctgcaaatgggcgacaaggtgagcgtgcatatcccctcggaacacagcgaactcaaaggattggacgccgaaaccgaggtggtccgggtcggtacgcatgaagatggccggcagagcctgggactggccatcctttcgatgaactaagccacgtgcctcgcctttgcgaggtacgtggtgccctcgccgcttgaggagctgacaaccggccgaggcgacaacgatcagaagtcgtcttcgacctggccgtcctgggtacggaattcgcggttctgcagataggcgttacgaacgaagatgtacttgtcgccagtgatcatcttctcggccgaaagcaggccggcgcgcaagtccaccacattgatcgctcgggtcacgtttcgagtgggaacgtggtccatgtagggatacggctgcaggaacgcatcgggcacgcgcccggcggcgtcgcgcacggtgctcggccccagaagcggcagtaccacatagggcccgctacccaagccccacgcacctagcgtctggccgaaatcctcatcgttcttctgcagtcccatgcgggtcgcgacgtcgaagaagcccagcacgccgaacgtgctgttgaacaggatccggctggtgtcgataccagcgtcgcggaccttgccttgcagcaagtcgttggtgagcaccaccacgtcgcccaggttgctgaacacgttgccgatgccgtcttcgaggaaatccggagtaaccttctgataaccctgcgccaatggcttgagcgagtaggtatcgaccgtgtcgttgaaacggaagatcgcacggttcaccccttcccagggatcctcttcagcggcctgcagggatgcgccgaacacagccagcgcgcccaccaggacgactttgaaatatccgacccaatccttgccgatcatatgcatcgcggccttcccctcgttccgaaatggtggcatctgcctacaaagcgctgaagtataaatcgaatccgcaccgttccggcagccgacagacacgcgggcgacgaacttcgccgacgtccgcttctcaaagctgggacaagcccagcccgctggtttaaccttgctcatatcgagcgctggcgaactcgccgcccgaaaaacatcgagggaagcaacatgccggaacatgatctgcagtcgcagcttgccgagctgcgtagtcagctggcccatgacgcaccgctgtcggaagaagagcgcgcgtcgctgcaagcgatagcccatgacatcgagcttcgcctggccaacgagggtatggtggagcagaacgattcgctggtcgacggcgtcaatctggcagtcgagcggttcgaggtcagccatccgaacactgcgatgacgctgcgcaacatcatgcagacgctggcgaacatgggcatataaatagaagccgagagaagcgtgggaggctggacggaagcggcacgaaccagccgtgcccatcctgccccctcggttgcggtcgcttactgccttacgagccgcccgttgcctagcccctgcgtctcgctgctgcggtacgggttgatatccagcccgccgcgacgcacatagcgggcgtggacgcttagccactccggctgcagcaggcgctgcaggtcgaggaagattcgctcgacgcactgctcatggaagtccgcgtgctggcggaagctcaccagataggccaacaggctgccatgatccagcgccgcgccacgatagccgatgacgactgtgccccagtccggctgaccggtgacgggacaattggatttcagcagatggctgtgaatccattcttccgcctgacgccccggatcacagctcaacagctgcggccgcggtgaatcgtagtgctggatgctgacgtccagttcgtcgatgcactgccccgccggcacgacaatcccttcctgcgccacttcctccagcgtccgcaggcgcacgccgaccggcttgcccgctgcggccgacagatcccgcgccatcacctctgccagcgcctcgcggctgtcgaacaccgactggttcagcgaattgagatagagcttgaatgacttggactcgatgatgttcggcgagtccgccggaatgctgaactcaccaatcgcgacgaccggtttgccggacggcagcagccaggacagctcgtaacagttccagatatcgacgccgcgataaggcaaggtgtccgcgctcagcccgagttcggcccatttcggcgcgcgagggatggggaagagctgctcagggctgtaggtcgcgacataggcgctggatttgcccagcggagagagttcggcggggtgttgcatggcgggaacctgtacgaaaaatgaccgcaagtgtatcggttcccgccacgtttatcatcgccatcgccctttgcgggctactgacgcattccacggccgctcttgagcagcctgatacacaacaggtacatcagcacggcggcgaccaccatgaagctgatcgcgactccgatgcggatgtccgacacgccgagaatgccgtagcgaaaggcattgaccatgtgcaggatagggttagcgagcgacagtgtctgccagaatggcgacagtagattgatcgaatagaacaccccacccagataggtcagcggcgtcaatacgaaggttgggatgatggaaatgtcatcgaagttgcgcgcatagactgcgttgatgaagccgcccagggcgaaaatcgtcgaggtcagggtaatcaccagcagggtgatgcctaagtgatgcacctgcagatcggtaaagaacatcgacaacagcgtgacgatcagcgccacggccagaccacgggtgatgccgcctagcgaaaaaccgataaggatcacatgcggagacaccggcgacaccagcagctcctcgatggaacgctggaacttgctgctgaaaaagctggagaccacgttgctgtaggagttggtgatcaccgacatcatgatcagccccggcacgatgtactccatgtaggtgaaaccacccatctcgccgattcgcgagccgatcaggtttccgaagatcacgaagtacagcaccatggtgatcgccgggggcagcagggtctgcggccagatacgcgtatagcggcgtatttcccgatggacgatggtttgcagcgccaccagattgggccggaattcagcgttcatttggcccccttgggtagattgttttcaaccatcgaaacgaacagctcctcgagccggttggtcttgttgcgcaggctcaacacctcgatgccctgcgccgacagcatacgaaacagatccgtgatgccctggctcttgtcgacctgcacttccagcgtgtgatggtcgaccagcctcgccggataggggccgaggtccggcggcaccagttgcgactctttcaaatcaagcaggaaggtctcgacgtgaagctgcttgagcagctcgcgcatgctggtgttcttgacgatctgcccgtggtcgatgatgccgatgttgcggcacagctgctcggcctcttccaggtagtgggtagtgagaatgatggtgatgccttcacgattcagttccgtgagaaacgaccacatcgagcggcgcaactcgatatcgacgcctgcggtcggctcatcgaggatcagcagtcgcggacggtgaatcagtgcccgggcgatcatcagtcggcgcttcatgccaccggacagcatgcgcgaagacacatcgcgtttgtcccacagcccgagctggttgaggtactgctcggcacgttccttggcgatcttcgccgggatgccgtagtaccccgcctgggttaccaggatgtcgaacgccttctcgaactggttgaagttgaattcctgcggcaccacgcccaggcatcgcttgagtccgccggggtcacggtccaggtcgtgcccgaacacattcaccgtgccgcccgtcttgttcaccagcgtggagaggatgccgatggtggtcgatttgcccgcaccgttggggcccagcaaggcgaagaaatcgccttcggtcacatcgaggtcgatacccttgagcgcctcgaagccgtttccgtaaattttcgtcaactgccgaatggatagagcagtactcataaggaatgcacacaacgcggagagattcagagtagataagggcgacaccgcgcaattgcaacacgcgtggcgccgatgcggtaaatacctggctgggatagcgtaacgcgcaacggcgtttcggtcattcaggaaactcgcaagcgcatcgccagtcactatcgagtacccatcgcgtcgacctgtcccttcaccccagccatcccaagcgcctatgctcatcacgacgccaaacgcctaacaaggaaaatcccatgaccctgctctggttgcttgtcttactgctcggcatcgccgtgatcgctcacttacgtgtatcgccggtgccggcgctggcgatcgttgcggcgtacttgctgctgatgggcgcagccaacgaaaccccagcgctgctcatgctgattctctggttgttgctgatcgccgtggcggttccgctgctggtcagtgatctgcgcatcaaatacttcagcgggccgatgttcgactggttcaagaaggtgctgccgccgatttccgacaccgaacgcgatgccatcgacgccggcaccgtctggtgggacggcgagctgttcagtggccggccgaactgggacaccctgctcggctaccccagggcgacgctgaccgaggaagagcaggccttcatcgacgggcccaccgaggcgctgtgcgccatggtcaacgactgggaggtcggccagcgcctggatctgccgcaggaggcatgggactacatcaaggccgaaggcttcttcgccctgatcatccccaaggaatacggcggcaagggtttctcggcctacgcgcattcacagatcgttatgaaactggcgacccgcagcggtgacctggccagcaccgtcatggtgcccaactcgctcggcccggccgaactgctgatgcactacggcaccgacgagcagcgcaaccactacctgccgcggctggccaacggcacggacatcccctgcttcgccctgaccggcccctatgccggctccgatgccggcgcgatgaacgacagcggcgtgatctgccgcggccagtggcagggcgaggaagtgcttggcctgcgccttaactgggaaaagcgctacatcaccctcggtccggtcgccacactgctcggcgtcgccttcaagacctacgatcccgagcatctgctgggtgacgaggaggaactgggcatcagcctggcactgatcccgaccgataccgcgggcgtcgagatcggccgccgtcaccttccgctgggcgcggccttcatgaacggaccgaactggggcaaggatgtcttcgtgccgctggaggccatcatcggtggccgcgacatgatcggcaaaggctggatgatgctgatgaactgcctctcggtaggtcgttccatctcgctgccggccaccggcgtcagtgccgcgaaggcctgcagctacgtgtccggccgctacgcgcagatccgcgagcaattcaacgtaccgctggccgccttcgagggcatccaggagccgttggcgcggatcggtggcaatgcctggctgatggacagcgcgcgaatcctcaccgccaacgccgtcgacctcggcgagaaaccctcggtgctgtcagcgatcctcaaataccacctgaccgagcgcggccgcgcatgcgtcaccgacgccatggacatccacggtggcaagggcatcatcatgggcccgaacaattacctgggccggctgtggctgtcggcgccgatctcgatcaccgtcgaaggcgccaacatcctgtcgcgcaacctgatgatcttcggccagggtgcgatccgctgccatcccttcgtcctgcgcgagatggagctggtgcatgaacccgaccgtgacgaagcggtgaagaagttcgacaagctgctcatgcagcacatcggtttcgccgtcagcaacacggccagcaccctggtgctcgggctgaccttcggcctgttcggcaaggcaccgggcaccgacctgacccgcccctacttccgcgcgctggatcggattgccgccgcattcgcgatgctggccgacctgtcgatgatgctgttgggcggggagctcaaacgccgcgaacgtttgtcggcgcggctgggcgacgtgctcagtcacctttacctggcgtccgccgcgctcaagcgctatcacgaccttggccacccgaccgaacaggcgccgttgttgcgctgggcattggaagactgcctgtgcaaggccgagcgcgcgctggccgacacgctgagcaacttccccaatcggctgcttggcggagtgttgcagttgttggtgtttccgttcggagcgcgtcacaaggggccgtccgacgagctggacgctgaggtggcggcaatccttggtcgtccggaaggcgacccggcgctggagcagatactcgacggcgtctgtcgcccggacgatgccgacgaggctttcggtgcgctgcgcgatgccttcgatgcgctggctgccgcccagccgctgcagaagaagctgcacaaggcactcaagagcggcgaattcaagcccgccgcgcatgaggatccgatcagcgccgccctcgcggccggcgtactggacgcctcggaggcagagcaactcaccgcggccgaagctgctcggcgcaaggtcatcagcgtcgacgatttcgacaaggcgcaacttgagctgagcgaagggaaaatccgctgattcggcttcaggctgcaggcttttagcctgccgcctgccgcctgccgcttcataccatccggcgaccgtcctggccggataccgaacccagggcggcccaccgagtcaacagcacacgccccaattaatcccggcgcccgtataatcgcgcgcccaatcgacacaggtgaaccatggccaatccttatcacgaccacaatctggctcttctggcccatctgcgcggcatcctgctggcgatgggtgaaaccgagcaggtttcggaagaaagccatgcgctgttcctcgaacgcttcgacgaactgatcatgaatctcaagaacgtgccggaagagaggcacatgggccaggatatgatctgccaggtcttccatcgctacccgcagatcgcccatctggtgccacgcgacctgctctggtacttcggcggcgactgcctgcatttcatgccggatgaggaaatcgagatcttccagcgcctggaagaacgtcgctacgaggccgaggaaaacgacgagccgttcgactggaacatggaacggcagctgatgagcatgccggacgaaggcccgcgccactgagcaccatcagcccttgcggatagcggcggactgcggtccgccgtatgcgttaagcgggcctcacgcccgccgctgcttcaggaagcccagcggccggggcggcaccgctgagctgccaagccaacggctcggcacgttcgatcagggctggttcgctgcctcggcagccttgatcaggtcggcgccgatttcaccttcgaactttttccacaccggccgcatcgcttcgcgccattcgccgcgttgctcgggagtcagccggatgatttcggtcttgcccgactcggcgatggtgcgcttggccttttggttgagctcatcagcctgacggttcacctcgaccgacacttcctgcatgacctgctccagttcgctgcgcacatccgccggcaggccctgccagaactgggtgttggtgatgaccatgtagtcgatcaggccgtggtcggattcggtgatgtacttctgcacctcatgcaccttctggctctcgtagttcgaccaggtgttttcggtgccgttgacaacgccggtctgcaggccctggtacacctcggcaaaactcatcttgcgcggattggcacgcaccgccttgaactgctcctccagcacctgcgaagcctgaacccggaatttcagtccgcgcgcatctttcggctcgcgcagcggcttgttggccgacatctgcttggtgccgttgtgccagtaggccaggccggtgatgttcttgtcttccatggccgtcagcagtgccttgccctgcgggctgctctggaaacggtcggcagcggccaggtcgtcgaacagaaatggcaggtcgaagatctggatcgacttgtcgtactgctcgaacttggccagcgaaggcgccagcagctgtacatctccgatcagtagcgcctccatttccttgccgtcgccgaacagcgaagagttgggatagacctcgaccgtcaccttgccgggcaggcgctcctcggccagcttcttgaacagcaatgcgccctgccctttgggcgtgttatccgcgaccacatgggagaacttgatgacgatgggctcggcatgcgccagagccgcgatggaaaaagaaagcgcgcaggcgagcgccttgagcgtgttactcagcatggaagtaccctcttgtttttgtcggttggtacgtttcgcgggcaccgcgtcgcggtcaggggaccgcttgcccggcacgttgcagcaggcgacgggcacggccgatgaccggtgcatcgatcatctgcccgtcaaccacgaagacaccctcgccagaggcaccggccgcgaggacgcgttgcgcccaggccagttcgtctgcgttgggcatcaacgtccggtgcaccacagccacctggctggggtgaatgcacagcaagccgccgaagcccatgtcgcgggcgtcggcagcgaatcgagcgagtccgtcgagattgaggatatctgggaatacgctgtcgagtggcggcgccagattggccagccggctgtgcagcagcagcgcatagcgcgcctggtcgaggacacgctcggccgcagacgtgccactggccagcccgaggtccagcccgaggtccagggcgccgaaggagagccgttcgacgccgctggccaccgcgatctcaggcagcgcggcgagccccctggcactttcgatgatgggccagaccggtttaccgcactccgccgccgtcgccacctgggcggcacactcgactttgggcagcaacaccccgatcacaccggatcgtgccgcacagagctgcaggtcttcggcctgctgagggtggccggctgcgttgatgcgcaccagcacccgagcttgggcgtcgctggcgagaaagctatcgagcgcttcgcgcgcctgcgccttgaggggctcggcaacggcatcttccaggtcgacgatgaccacatcggcaccgctcgacagtgccttgggaatccgctcggggcgggtcgcaggtacgaacaatgcgctacggatgatgctcgggttcatggtggtcccctcgatctgctgggtcatctggatgccgctgctgtatgcgcgaggctgctcgcgaacccgctgttgcgccctgatcgcgggttcgccagcacgccgatgcaacccacggccatgttcacaccgcaccctgttcgtgcaggcgccgaatatcgccctgtgcgtagcccagctccccgagcaaggcatcggtgtgctggcccagcgccggaatcgggtccattcgcgggctgaacgcgctgttgcgccccggtggcagcaatgccggtagctcgccggccgggctgccgacctcactccagcgctggcgtgccttgagctgcggatgagcccagaccccggccatgtcgttgacgtgggcgttggcaatcggcgcggcatccaggcgcgtaatcacctcatcggcactcaacttgccgaacgcctcgacgatgatcgcgcgcaacgcctggcgattatccgaacgcagcgagttgctggagaaacgctcatcgctggccagcttgggctggagcatgaccttttcgcagaacagcagccactcgcgctcgttctgcaggccgagcatcacggtgccgccgtcaccggtcgggaacggcccgtacgggtagatggtggcgtgcgcggcgccggcacgcgggggcggcggcgcaccttcgtaggcgtaatacagcgggtagcccatccattcgaccaggctctccagcatggtcacgtctacccggctaccctcgccggtcttgtcgcgcagcatcagcgccgagagcacaccggtgtaggcgtacatgccggcggcgatatcggcgatggagcagcccgccttggccatctcgtcttcacccggcccgccagtaacggagagaaagcctccctcgctctggatcaagaggtcataggccttcttctgctcgtaggggccgccctcgccgtagcccgagatatcgcagacgatcaaccgcgggaagcgctcgtgcagcgcctcgaatgacagtcccatgcgcgcagcggcgcccggtgcgaggttctgcaccagcacgtcggccccggccaacagccgctcgaggacctggctggcgccttcctgtttcacatccagggtcaggctttccttcgagcgattggtccagacgaaatgcgacgccagcccatcgacccgctcgtcatagccacgggcgaaatcaccggtgccggggcgctcgaccttgatcacccgggcacctagatcagccaactggcgcgtgcagaacggcgcggcgatggcatgctctaggctgatcacggtgatgccatcgagcgggcggggtttggcttggctcttgttcatgttcggttcctgcaaattcggcgtagggtggaaaacggcagcgccttttccacgcgtctgttcaagctcatgcgacgttggcgccctgttggtggatgaggcttcgccgccatccaccctacgagtctgtgtatgttcacgtccggttgcgggcggtttgtgggaacggtcttgaccacgaaaccgatcgcggtcgagaccgctcccaccagagccacccgcccgacggttaccgcagaacctcgaggtccgtgatctccctcagccgccagaccgtctcgatcagtgcgtccgcctgctcatcgccacgcgcgccggagaactgcaccaggcgacggaacttgtcttccagttctgcacggttgagggtattgcccgggtcacccttgggttcgtcgatggcacccagcagcgcgcgaccgtccgtggtggtcacctcgacacggccaagccagcgggcgggataggcggcgtccacctctggatcgagggtcatcgagaccttctcgcgaaactcgccgacgagcgggtcgctgagcgcgtggctgtggaattcggtcagcccggccttaccatacagggcgatcagcccaagcaccgtgcccatggagaacttcgcctgatgcaccgtctgtggcaccgtcacgcggccgagcacgtcgatcgcgccttggtgaacatgggtggttacgcgggtaatgtcctcggcgcgcagcccttcgcgttgcattagctcgagcaaggcgtcggcagccgggtgggtatggcggcaggaagcgtggaacttgaacgacgtctccgccaacgcccatcggttgccaaggcgatccgacaatttgctcggatcggcatcgctggacatgccggcggccatgccctgctcgccttccaggatgttctgcgcaccagtcaagccttcagccgtcagataggccgcgagcagtccatcggcggccgccttggcggtgtgcaattgcttggagtcggcggcgtcacggagaaactcccagaggccggcggcctgggtgccggcactgcctagcagatgagcgaactgggactggttgaagcccatcagcttgcccaccgcgaccgccgctgccagcgtgccgacagtcgcggtggtgtgaaagatgcggtagtgcgagcggccaaggaactcgccgatgcggatgcccgcctcgtacccggccaccgaggccaccaatagctcgcggccggacttgccaaggtcctgcgccgccgccagtgcggcggggaacaccaccgtggccgggtgcagcaccgagctgttgtgcagatcgtcctgctccaccagatgcgagctggcggcattcaccagcgcggcgaaaaaggcgctgctgcccttgccattgatcaggatgcgcgccgggccgtcggccggccccatcttcgtggcgtaacgctcgaacagcgggatcggatgcgctccggcgctagccagggtcgagccgagccagtcgagaaagaggtcttcggtgcgggcgagcaccggctcggggatctgctcatagtgcagaccggcgagaaattcagtcaacgcctgggtgtgccggctcatgcgccgggctccatcagattcgacagttcgataaggttgagatcgggatcgcgcaggtacaccgagcggatcgggccggtcgcgccagtacgtttgaccggaccttcgacaatggccacgcggtgcgcctcgagatgagcgatcacctcgtccagtggcgtggcgacgataaagcacaggtctgccgagcctggcgtaggccgttcggcctttggctcgaactcgcgcccggcctggtgcaggttgatcttctggttgccaaaggcgagcgccttgcggccttccccgaaggtaaccagctgcatgccgagtacgcgggtgtagaagtccagcgtcgcgtcgacgtcggcgacggtgaggaccaggtggtcgaggtggtcaatctgcatggctgcctcctgattcgatgcgtcggcgtggattcgcttcgcgacatccgccctacaacccaatgccgctgcgacaccgagcggtccttgcgcggcttcttcgcggtcaagaccgctcccacggcaccgggttagaaactgcgcggcaactcgagcagatgctcggccacatatgacaggatcaggttggtggagatgggcgcgacctggtacagccgtgtctcgcggaatttgcgctcgacgtcgtattcgttggcaaaaccgaaaccgccgtgggtctgcaggcaggcgttggccgcctcccaactggccttcgctgcaaggtacttggccatgttggccgccgcgccggcgttgcggccgctgtcgtattcctcgcaggcccgccagcgcatcaggtcggcggcctcgatctcgatatgcgcctcggcaatggggaactgcacgccctggttctgcccgatcggccgaccgaataccacgcggtcgcgagcgtactgcgcggatttctcaatgaaccagcggccatcaccgatgcactcggcggcgatcagggtgcgctcggcattcaaaccatcgaggatgtagcgaaagcccatgccctcttcgccgatcaggctgctcgccggaagctcgagattgtcgaagaacagctcgttggtctcgtggttgaccatgttggcgatcggctggacggtcaggccgttgccgatggcctcgcgcaggtcgaccaggaaaatcgacatgccatccgacttcttcttgacctcggccagcggcgtggtgcgggcgagcagaatcatcaggtccgaatgctggatgcgcgagatccataccttctgcccgttgatcacgtatttgtcgccttggcgcacggcggtggtcttgatcttggtggtgtcggtgccggtggtcggctcggtgacgcccatggactgaaggcgcagctcgccgcaggccagtttcggcaggtagtagcgcttctgctcctcgctgccgttacgcagcagtgtgaacatgttgtacatctgcccgtgcacggtgccggagttgccgccgcagcggttcacctcttcgaggatgatcgaagcctcggcgaggcccaggccggaaccgccatattcttcggggatcattgccgacagccagccggcctcggtcagtgccttgacgaatgcttcggggaagcccttttcctcgtcgagcttgcgccagtattcggcaggaaatccggcgcagagaccgcgcacgccttcgcggatagcggtgtattcgtcgttcaggtacggattcatctcggttcctcgaaagctggcggtgctgtgttgcctttattggttgagcggtgtgggctttggccagccaatcagcttggcctcctccccctcaccccaaccctctccctcagggagagggggctggttttgtgtttcgcctgacagctgtgttgcgtttataggtgtgttcgggatggatcgggccatgccgatcagcttggcctcttccccctcaccccaaccctctcccctcagggagaggggctggttttgtgtttcggctgacagctgtgttgcgtttacacgtgttcgggatggatcgggccataccccgtcccccaaccctctccctcagggagagggggctggtttcgtgtttcgcctgacagctttgttgcgtttacaggtgtgttcgggagccgatctagaaaccggacaccgaccagtcccctcgccccttggggagagggttagggtgagggggcggagtcgcgccatgcacctcactcgaattccacctccgccttctgtgccaggccgttgtggtcacccgcccagagttcggccctgcccggagcgacgaggcggccgccgagttcgaacggttgtgggaccacgagcggccgcaggccgcgataggcgaagcgacgcaggcgggcctcggggttggcgcggcagaacgcgcgcaggttgagcgtggcgatcagcggaccgtggaccaccagcccggcatagccctcggcctcggtaacatagggccagtcgtagtggatgcgatggccattgaaggtaacggccgaatagcggaacagcagggtcggcgtcggcgtcaccgcttcgcgccaatggccggcgatcatcggctcgccgctgctggccttcggcgggttcggctcgcggtagacgatgtcctgctcttcgcgaatcgccaggcggccatcctgccggtactcgtgctggaccgtgacgaatagcagcgcgccggtgcggccctgcttttcctcgatgtgtgtgatggtcgacacccgggtcgcttcggccccggcaatcagcggctcgatgaattcgattcggccgccggcccacatgcggttgcggttgtcggccggcggcaggaagccgccgcgtgctggatggccgtcctcgcccagcgcgctctcgggtatcggctcctggaaaaaacaccactgccacagcggcggcaggggttcgccatgagccggggtgggctcgtcgagcgtcgcggcgatccgcatcagcaggttgcgactgagctggtcgtggacttcttcggcgcggccgatccaggcggttacatctgtcgtcatcgcgggctccggcttgaacgttcggtctagcatgcgatgtcgcagcgcgttcgggaatttgcatttaccgagaccagcgttcggttatcctgaacgcatttgccggaccgcctgcatgcacttcgatctttccgacctgcgcctgttcatccatatcgccgaatcgcccagcctgacccagggcgcacgccgcgcacacctgtctccggcggcggccagcgccagggtcaaggcgctcgaaggacagctcggcagccgtttgctctaccgcgacagccgcggcgtggcgctgacaccggccggggagaagctgctgcaacacgcgcggctgatcatgcgccaggtggactatctcaagggcgaattcaccgaatacagcaccgactcgaccgggcatatccgcatcttcgccaataccaccgcggtcaccgaattccttcccgaagtgctggccgggttcctcgcgcagcggccaggagtcacggtggacctgcaggaacgtttgagccgggacatcgtgcgcggcgtactcgacggcagtaccgacatgggcatcattgccgggccggtgcaagccgagggtctgcaggcgcttcatttcagcaccgaccgcttgctgctggccgtccccctcggccacccgctggcaacacagccacgcgttaccctgcgccagacgctgagctaccagcacatcggcctgcacgaaggcagcaccctgctcagctttcttcgcgaccaggtcgagaagttcggcgggaccctgtcgctgcggattcagctgtccagcttcgaagccgtatgccggatgatcgaagcgggtgtcgggatcggtatcattcccgagtccgccgcgcgccggcacagccgtaccatgcaactggcactggtggcgctggatgaaccctgggccgttcgcgaacgcagcatcctggttcgtgagctagatgccctgccgggcagcgttcgggccctgatcgccaccttgcggccgggacaaagcggctaatctgggccaagcttgcagagtcggctgggtgtggtctaccgactccgctgcgcggcgttgaccgaaagtagccgtcaggctgcaaacgcgatgatgttcgaagcctgcgccgggaaatacgcttcgttttgaatcctcggctaaaagtgctgcccaagctgcatgcaccgaggcacaccccatgggctcggcctcgggcttccttacacttgactgtgatcacggtggagcgctcctgaacggcgcactctgccaaaaatggacttacttgcttaaggttgtttgccatgacgtccttactagccccgatcagttcgctactggccggtgttgcctttcttctgctcggccacggactgctgaacacgctgctgacgctgcgtggcgtcgccgaggggtattcgaccggcctgatcggcctgctgatgtcgggctacttcgccggcttcctcatcggcacctggctggcgccgtcgctgatacgtcgcatcggccatatccgcaccttcgccttctacgcagcgctggcttcgatcgccgtgctgctgcacgtgatcatcgtcaatccgtgggtgtggctggtactgcgactgatgtacggcgtggcgctggtcacgctgtacatggtcatcgagagctggctcaacgcccaggtcagcggtgaaaaacgcggccaggtgttcgcgctgtacatggcagtcaaccttggctcgctggcggcggcccagcaactgctgagcctcgacagcccgatgaatttcacgctgttcgccttggcggcgatcctcatctgcgcggcgctgatgccgatcaccctgacacgccaggcacagccggcacagcccgacatgcccgccacggacctgctgcagctggcccgaatcgcgcctttgccgctaatggctgctggtatctcgggccttacgcttggcggtttctggggtctggcgccggtctacgcctcgcagagcggcttcgatgcgtccggcgttggtctgctgatgagcgtgaccatcctcggtggtgccgtgctgcagtggccgatcgggctgttttccgacaagcacgaccgccgcaaggtgctgctctgtgtcgtggccatcgccgcggtgctcggcgggctgatcaccccgctgacgtccgggcctttgctgttggggatgatgttcctctggggcggcctggcgttttcgatctactcgatcgccgtcgcgcagatggtcgaccagctgcacccggacgagattctgtccggctccagcggtctgctcctggccaacggcttcggcgccgccttcggcccggtggtagccgggggattgatgagcttcttcggtccgaaggcgctgccgctgttcttcgccgtcacccttgcattcctggcgatctattcgttctaccgttcgcgtcgggtcatcgacctgatgaccgagccgcacgggcatttcacgcccatcctgcgcaccagccacaccgtgctggagctgatgcccgataccccggaaggcgaggtcaaggcgagcgaaaccagcgattcgctggacgacgatgcgctcgatgacgacatcgtcgaaccgcgcaccggcaccggctaatgcagagcgcctcgcccggccgccgggcgctggcgggcttttgccggccaggctagaagtccaccttgccgcgcccggccttgatcgcgccgcgctttgactttccttccagacgccgcttcttcgagcccagcgtggggcgcgtcggacggcgtgccttttccaccttggcaacgctgcggatcagctcggccaggcgctccagagcatccgcgcggttctgctcctgagtgcggtactgctgggccttgatgacgatcaccccatccccggtgatccggctgtcgcgcagtgccaacagacgttccttgtaaaacgccggcaatgacgacgcgttgatatcgaagcgcaggtgcagcgcgctggacaccttgttgacgttctgcccgccggcgccctgcgcgcggatcgcggtcaactcgatctcgttgtcggggagctggacactgttggatatctcgagcatcggcccttctgcgtcaggaatgagcggtcattgtctacgaggcgagcagcgcggacacgtttttatatgatttcgagccacagcaggctggccggttcggctaccttggctcactggccaaccggcacagatggaagcccttatggattcgatcacccaggcgctgctcggcgccacggttcaggcgtccctgctgggccgctggcaaggacgcagggcgctgttgtatggcgccgtactcggcaccctgcccgacctcgacgtggtcatcgactacggcgatgccgtggcagagatgacctatcaccgtggcttcagccattcgctgtttacgctcagcctgctggcggtggcgctgacctggctggttcgacgcttacgccccgatcccggctacagcggccggcggctgctcctgaccctctggctggtgctgatcacccatgtgctgctcgacgccttcaccagctatggcacgcaactgctttggccgctcgcgacccctccggtggcctggtccagtgtgttcatcatcgacccgctctacagcttgccgctgctgctggcagtcctggccggcgccgtcttcgggctgaaaggacgccgtccacgctgggcgccgattgcgctgacgctgtcttcgctgtacctggcattcaccctggccggcaaacagatggcagagcatcgtgtggacgccgcgatggccgcagcgggtgtccaccccagccaggtcttcagtacgccgacgccgttcaacagcctgctgtggcgagtgatcgccctcgacggtgatcactactacgaggcgctggtgagctggttcgatgccgatccgcccgagctggtgcgcctgcctcgtcacccgtcgctggccggggcgctaaagaactcgccgcagcacgcgcggttgcgctggttcaccggcggcatgctgcgttacgacgaggtcgaccggcatctgctgatgaccgacctgcggcttggcatgacgggctaccatcccttccgcttcgccctggcagagcgagacggcggcgagtggcggttgataccggcagtcgagcgctggccggccgagcgcggcgacatgggcaagctcgagcagctctggcggcgcatctggacgcagcaacggccaatcccgctggcgcaatgggcgtccgaattgcagagccgctagcggcgacgatgctgccagcggcccagaccgtagagcatcgctcccaagcccatcagcaaagccgctcgcaaccaggtgccggcgctctgctgggagagcaggaccaggcaagagccgatggccaggtacggcaggatcgtcggggtgcgaaagtgtggcgcggccactttgtccttgcgcagcaccagtaccgccacgttggtgctcatgaacacgaagagcagcaacagcactacggtttcggcgagcgcacgcagcgtaccggtgacggtaagcgccatcgccagcaaggtggtcacgatgatcgccagccagggcgtgcgccgctccggcaatacccgcgtcagcgccgagggcagcaacccctcgtcggccatgccataggccaggcggctggacatgatcatggtcagcagcgccccgttggcgacggccaccaatgccaccgcagcgaacagccagtccggcaccgcgtagccggtcgcgcgtaccacgtccagcagcggagcagacgattcactaagcgcagccggagtgagcaccgcggtcgcggccatgcccacccccacgtagaccagccccgccgtcagcagggcaccgaacagcgcacgcgggtaattgcgccgtacgtccttgacctcttcggcgacgttggccgatacctcgaagccgacgaaggaatagaacgcgatcagtgccgcgcccagcacagcgatagctggcgatacgccgggcgcgaatgccaggacccgagcgggttcgccctgcccgctcagcagataacgggccgccagcaccacgacgaacagcaggccggacacctcgaccacggtcattaccgtattggccccgagcgactccttgatcccgcgggcgttgagcagcgcaaccacgcagagaaacaccagcgcggtcggcaccgccggggtatcgatgaaagcgctcaggtagtcgccggcgaacgccagggacagcccggctgcactggtcacacctgccgcgagcatgcagaagccgaccaggaaggacagcaacggcttgccgaacgcacgttcggcgaaaaccgccgcgccacccgcccggggatacttggtgacgagttcggcataggacgccgcggtcagcatcgcgaaccccagcgcgaccagcagcggcacccagactgcgccacccgcctcgccggcgatcttgccaaccagggcatagacgcccgcgcccagcacgtcgccaaggatgaacagaaacagcgcgggcccgccgatggcctgacgcaggcgtgattcgcccgctgcgaacacggtggttttcatggatgggcgcccccacggcgggggcacttggcaacgagcgatgaggctttcaatcgagcatctccagaacaggcgaccgcagccgcttccctgttctagattgctggtatatcactggagttcagcgccagaaatgacaaagccccggccaggccggggcttgtctgcaccaccgagcgtggaactcaggtgcggaaacgcgccaccagcccctgcagctcgatgcccagacgcgccagttcggcactggcactggcggtctgctcgctgccgctggcactctgctcgccgatgtcgcgcacacgggtcacgctctcggagatgttctcggccaccgcgctctgctcctcggatgcggcggcgatctgctgattcatctgctcgatggtcgagaccgactcggtaatgcgtccgagcgctatccccgcctcgctggccaggtcgacggtacgttgagtcaggtcgcggctggtctgcatctgctcgaccgccttctgcgccacttgctgcaaattgccgatcaggctttcgatttcttccgtggaatcatgcgtgcggcgagccagcgcgcggacttcgtcggcgaccacggcgaagccgcggccttgctcgccggcgcgtgcagcttcgatcgcagcattgagcgccagcaggttggtctgttcggctacggcacgaatcacctccagcacgctgccgatacgaccgctctcggcgttcagctcttcgattgcctgggccgaatgctcgacctcgccggaaaggttgccgatctggccaatggcttcctgaaccaccaggtcgccttggcgcgcctgttgatcagcctgacgagcagcgagcgacgcttgctcggcgttttgcgccacttcctgcacggtcgcggccatctggtgcatcgcggtagcgacctgatcggtttcctcccgctgtttctgcacgccaatgctggtttgtgccgtcaccgcagagagttgctcggccgcagcggctatctggccgacaccgccgccgatacgcccgatcagaccgcgcaggctttcggtcatggcgtacatggcctgctgcaactggccgagctcatcacgccgggtcacggtttccgattggctcagatcgccatcggcaacccgctgagccagctgcacggtgtatcgcagcggcccgacgatcatgcgcgagatgacggtcgcggccgcgagaccgatcaccacggccagcacggtaatgatccccagcagcatataggcgctgctgcgttgggtttccattgctgcggtcgcatcggccatcatcttgcctgccgcatcgacgacgctttgcgcctggccaaccatctcctgttccagtgcaacacgggcaccgcgattgctgcggaactcgttgaatgcccgctggtaactggcgagcgcggcaagcgcgccatccatggtcgccttttgctcatcgtcgagccagtttttcaggctggtgccgatggtggtcacgtcttcgaaggactcgttccaggaatccaccgcggcctgggcgttgttgttgatgaagatgttttcgaaggtgcgcagatcgagaatctttttcgtcaggcctgacgcggattcggcaatggtcagcggatcgcttcccctcaggtgatcgccctgcaagcgcagtacccgcacggcgtcatacatgtccagctcgatgtattcgaactcctcgcgactcttctgcgccgtgtcgtccatgcgtgcgcgaagtgcctggccacgattgatcagcacgccgtactcatcgaactgtttggcataaacggcggcgctgccgcgaatctgctgcaccgcttgctgctgctgttcggagaggccgtccaacgcgtccagctcgcgattcagccgctcgagcgtgctgcgcaaggcctcggcggacgcctcgcttcgggtcagcgcgtagtcgcgctcctggccccgcgcctcgagaatcgcggcgttgactcgcgatagctggttcacctgataggaacgatcgaggatcgaatcgaccgtgtaaaagccggttccggcgacacccagcgtcaacagcaggacgagggcgaagccaagcagcaacttcttgcccatggacaggttggcgaatatatcgaggggctgcatcagaaaatccttaaaaagtatgcgcgctcatgaagtcggccgcttgccgcaaaagttgaatgccaaagcagcgcaatttaatcaggacttaatgtcaattagccatcttccagcccacattgaagcgcgccttcaatgctgttgaagatgcccgtagagcttggcgtagagcccgccgtcggcgatgagctgctggtgaccgccctgttcggcgatgcgcccgccgtcgaaaaccagcacacggtccgcctgtttcacggcggatagacggtgggcgatgatcagcgtcgttcgcccttgcaggaagcggttcaggccctggtgcagggcgtattcggtggcagcatccagggctgaggtcgcctcgtcgagaatcaccaccttgggctcggccagcaccatacgcgccaccgccagacgttgtcgctgcccaccggacaggcgaacgccagaacggccgacgatactgtcgagccccgccggcagctggcggatggtctcagccagctgggcgatttccagcgcatgccagcacgccgcatcgtcgcgctcgcgccccatcagcaggttggcgcgcaccgtatcgttgaacagcgcgggatgctgcaataccacggcgacgttatcgcggacggtcggcaagccgatgtcacgcatgtcgattccagcaaagcgtatgtttccagcctgaggctgatacaggcccagcagcaattgcaccagggtgctcttgccaccaccgctggcgccgacgatagcgaccttctcccccgctgcgatagtcagatccagcccttccagcaccggttcgtcctggtaagcgaaacgcaacccctggacctcgatgtcgacggtgtcgtgcccagcgaaggggtcctggccgccggcatgctgcggctcgtccgcgcgtgcgagcaactggttgatgcggctgagcgcaccacccgcggcgtagaaggcgtactgcagattgagcaactgctccaccggaccgatcatgaaccataggtagctgaacactgccagcatctgcccgatcgacaggtccgagaacagcacggtgagcatcgccgcggcgcggaagatgtcgatgccgaactggaacagcagaccactggcacggttggaggcgtcggttttccattgcgaggcaacggcgtagtcacgcacttcgcgcgcacgcagcccgaggcgcccgagaaaaaagccttggcgatttcccgcacgcacttcctgaatggcgtccagagtttcggtgagcgcctgggtgaacagcgaggtactgtcgttttccagcttcttcaggtgcttgacgcgtttacccaactgcaccgtggcgtagatcaccagcggattgaacagcaggatcagcagcgccagttgccaatgcatccacagcagaatcgccgccgtgccagcgatcgaaagtacagcgaccagcagccggctaagggtctcgccgatgaatttgtcgatggtttcgagatcggtgaccagatgcgcggccactgtcccgccgcccaggctctcgtattcactcagggcgatgcgcttgagccgctcgatcaggcggatacggatgcggtagaccagatccttggacaactgggcgaacagacgcgcctgcagcacattgaaaaccagcgcacaggcgcgcagcagcaaggtcgcgcagagcatcaggccgatgtagccggccgccgtttgccagccaatgggcagaacagtgtccatcacccgtaatgcggtatcgccctgccccagcaacacttcatcgaccagcaacggcagcagcaacggaatcggcacgctgcacagcgtcgccagaaccgcgaccagattggcgaggatcagcgccttgcgatggtgcaacgcgaggcggcgaatctccgcccaactgagccggtcaggcatgggcattgtgttccagccaccgctccagcaggggcgacagtgactcgagcggttgaaacccgttggtgaccaaggccagctgaccgccgtgctcggccagcaaggttgggaagccggcgatccccagattgcgcgcccagtcgaaatccgctgcggtggcatcgcgcacggcctgcgaatcgaagcggtcggcgaattcgatgcgcggaatgcccgccagctcggcgagcctcaccagctccggtgcgagcgtgacgtcgcacccttcgacatagaacgcccgctggatcagaccggcaaggtcccaggccgacttcggatcgaggctacgcgccgccaccagcgcccggcacgccggctcggtgtcatagaccaggccttccggcagacccgcctcgaaattgaacggctggccgctcgcctcgtgcacggcgtgccagtaggagtgggtgcgttcgcgtgctgccgcatccatcgcggtgcgctcctggcgcagcccgccgaccaccagatcggccccgacacccttgttgctcgcctgctcgatcaacgcctgcaccaccggcgcgaagccccagcaccaggaacacatcgggtccatcacatagatcagtcggctacgcatcgaaggctccggttctgtcgtgtggagcgcgaactgcgcgccatcatctggccaagcggcgtcgcttacgcaccctgcttgcggtagttgtagccgatggggtgcggctggttacgcttgagcgccaattcgatctgcttttgccgctcacgcgcactgtggcgggtcttctcgctgaggttgtcccagcaatgcgggcagctgatgccaggagcgtagtgctccgactggcgatcctccagcgagatcggcgtgcggcaggcatggcactggtcgaagtcgccctcggtcaggtcatggcgcacggtcacgcggttgtcgaagacgaagcagtcaccgcgccaacgggtctcttcctgcggcacttcttcgaggtatttgaggatgccgcccttgaggtgatacacctcctcgaagccctcgccgagcatgtagctggaggccttttcgcagcgaatgccgccggtgcagaacatcgcgaccttcttgtgcttggtcgggtcgtaatgcgccttgatgtagtcggggaattcacggaaggatttggtctgcggatcgatcgcgccttcgaaggtgccgatggccacttcatagtcgttacgggtgtcgatcagcagcacctcggggtcggcgatcagcgcgttccagtccttcggctcgacataggtgccaacccgctggttggggtccacgccctccacgcccaaggtgacgatttccttcttcagcttgaccttggtgcggtagaagggttgctcgtcgcaataggattccttgtggtcgatgtcagccaggcgcacatcggtgcgaaaccaggcgagcaaggcatcgatgccttcgcggctgccggaaaccgtgccattgatgccttcttcggcgagcagcaaagtccccttgatgccattggcattgagggtttcgagcaggggctcacgcaaggcgacgtagtccggcagggagacgaacttgtacagcgccgcgacgacgatgttctgggtcatgcgggtatatccctccagtggtcacccaacaggccgttgaaaaactacctgcgttggcaatccagcgttgaaaagcccctcggaatgctcatttacacctgtaaactccgcgtcctcgggccttttcgccccgtcttgcctgcctcgcctacgtttttcaacggcctgtcgaagggcggaccgggaatgcgaaaacgacaacgccggcgtgagccggcgcggcgcgcattctatcaacaaacgagtggcatgcttcaagcgtcagccaggcggttcgctcggcccttatttgtgaccaccggcgcagaccggcgaatccggcgcggcgccctgcttcgtccactcctcgggggtgtaggtgtgtagcgcgagcgcatggatctgcggcatcagatcggccatggcggcgtacaccttctggtgccgcttgaccgcgttgagaccgtcaaactgctcactgacgatcaccgccttgtagtgggtttcctggccgcggctgtgcatgtggctttcatccagcacctgcagatgcacgggctgcagcgcggcctgcagggtgttttcgatcgagaatagtttggacatggcgggcaggctctctcaaggcttcttctgagtgtcgagttcggctgtcatctcagccagtagtttgttcacctgaggcacggcgctttccagcttggcctgggtcacttgagccgagcgggcgttgagctgtggcagctgcttgagcatcttctggcccagttcggattcgtagaactcgttcagtcgagtgagctccggctcgctgaacgtatcggtgtacagcgctaccagatcgggcttgacccgctcccagccgatcgctttgtcgagtgcggcatcggccttcgattggtaacgctccagcagggcccgcttgctctccggcgcctgggtctgttcgaagcgctcggcaaacatgtgctgtacctgggcgtacaccggtacggagaggcgatcggcgttgaccagctccagaaagcgctcggcctgggccgcgtggctggcgctgtcggcgctcgcctggcccgcaagcagcgccatcgaaaggacgctgcacagaccgacggtacgaaaaatatgcatggggtaatccttgccgaacgatgatgggtctcagtggacacattctgcgcgcggagttccaatcgctcaaggaacagcccgcctggctgattgaaccagtgccttcggcaggcgacctaacaggaagacccaaatcgatggagcatggtatgacccgcaccgaaaccgacagccttggcccagttgaagtaccggaacaggcttactggggcgcgcagacccagcgctcgttgagcaacttcgccattggcgagcagcgtatgccactggccgtgtgccacgccctggcgctgatcaagaaggcggcggcgcgggtcaacgaccgcatcggtgacctgccgccagacatcgcgcggctgatcgaacaggccgccgacgaagtacttcacggccagcatgacgatcagtttccgttggtggtctggcagaccggtagcggcacccagaccaacatgaacgtcaacgaagtgatcgctggccgcgccaacgagctggccggcggcacccgtggcggcaagagcccggtgcaccccaacgaccatgtcaatcgtgcgcagagctccaacgactgcttcccgacggccatgcatatcgccatcgcgcgcgccgttcatcacgacctgttgccggctatcgccgagctttccggcggcatcgccgagcaggccgcccgccacggccagttggtcaagaccgggcgcacccacatgatggacgcgacgccggtcaccttcggccaggagctgtcggcgttcgtcgcgcagctcgacatcgccgaacaggcgattcgccacgcgctgcccgcggtattcgaactggcccagggcggcaccgcggtcggcaccgggctcaacgcaccgcacgggttcgccgaggcgatcgctgccgaactggcggccctgtccggcctgcccttcgtcacggcgccgaacaagttcgccgcgctgtccgggcatgaaccgctggtagcgctttccggcgcgctgaaaacgctggcgaccgcgctgatgaagatcgccaacgacttgcgcatgctgggctccgggccgcgcggcggcctcgccgaggtgcgtttgcctgccaacgaaccgggcagttcgatcatgccgggcaaggttaatccgacccagtgcgaggcgctgtccatgctcgcctgccaagtgatgggcaacgacgtcaccgtcggcttcgcggcgagtcaggggcacctgcagctcaacgtgttcaaaccggtgatcgtgcacaacatgctggagtcgattcgattgctggccgatggctgccgcaacttcaatacgcactgcatcgtcggcctggagccggacgccgcacggatggccgatcacctggagcgcggattgatgctggtgactgcgctcaacccgcatatcggctacgacaaggcggcggaaatcgccaagaaggcctacggcgaaggcaccaccttgcgcgaagccgcgctggaacttggttatctgacagatgaagaattcgatcagtgggtcaggcctgaaaccatgctggagtccagccgcagctgattgcccaagagatgcgcgtgggagcggtcttgaccgcgaatgggattgcaccagagcctgttcgttcgcggtcgagaccgctcccacgagccgattcacgcagcgcaggcgtagggccgatgcgcctcgccgagatgcttcagcccgccgctgcgagaagggttgaaccgacgccttcaaccccctgctcgcctcccgccgtcaacgcaccgcttcgaacaggcccgaagcgcccatgccgccgccgacgcacatggtcaccacgccgtaacgcaggttgcggcgctgcagctcgcggatcaggtggccagcggtgcgcgaaccggtcatgccgaacgggtggccgatggaaatcgagccgccgttgacattgaacttctcgttgtcgatttccagcgtgtcgcggcagtacaggcactgcgaggcgaaggcttcgttgagttcccagaggtcgatgtcgctgacttgcaggccacgcgccttgagcagacgcggcaccgagaagaccgggccgatgcccatttcttccggttcgcagccagccacggtgaagccacggaagaacgcgcggggcttgaggccgagttcgagcgccttgtccaggctcatcaccagggtcatcgaggcgccgtcggagagctgcgaggcgttaccagcggtgaccgagccgtcttcggcgaatacgggcttgagtcccgacaggctttcgagcgtggtatccgggcggttgcagtcgtcgcgatcgaccacaccttcgtgctcggtacgctcgccggtgttcttgtcttcggtgtagtagcggacgttcatcggcacgatttcgtcctggaacaacccttcggcctgggcgcgcgcggtgcgctgctggctctgcagggaataaatgtcctgctgctcgcgggtcacgttgtagcggcgtgccaccagctcggcggtctgccccatggtgtgatagatgcccgggacccgctcctggatgatcggattgtacaggttgtcggtgttcttgctcttagccgtcagggtgatggattcgactccgccggcgacgatgacgtcgctgcagccggaggcgatctggttggccgcgatggcgatcgcttgcaggcccgaggagcagaagcgattgagcgtcatgcccgcgcattgagtgcccaggttcgacagcaccgcgacgttgcggccgatgttgtagccctgtgcgccctcgttcgaaccggcgccgacgatgcagtcctcgaccagtttggggtccaggttgttgcgcgacagcagcgcattgacgcagtgggccgccatgtcatcgggccgggtcatgttgaacttgccgcggaaggacttggccaggccggtccgtacgctgtcgacgatcactacttcacgcatggcatacctcgaatggttgggcgggtcgcgacgacggcggccggcctgttgacgatggcccgagcatagttccagccatttaccgaaggcgacgaccattcagcggggatatggtcgaccatcgtgcgccccgctcgccgccgctcagccgattgcgtcctccagcgcctggttgagggtgcgcaacactttcacccgcgcgaatcgcttgtcgttggcttccaccagtgtccagggcgcgatctcggtgctggtccggtcgaccatgtccgccaccgcattcccgtagtcatcccatttatcgcgattgcgccaatcctcttcggtgatcttgaagcgcttgtgcggcgtatcctcccgctccttgaaccgttcgagctgggtgtccttgtcgatcgacagccagaacttgaccaccaccacgcccgcatccaccaactgctcttcgaactcgtttatctcggtgtaggcgcgcagccattcgtccggcgtacagaaaccctcgacccgctcgaccagcacccggccgtaccaggagcggtcgaagatggtgaactggccacgtgcaggcacgttgcgccagaagcgccagagccagggctgcgcgcgctcgtcctcgctcggcgcggcgatctgcacggtccgatacaaacgaggatccagcgcaccggtgacccgtcggatcgcactgcccttaccggccgcgtcatggccctcgaacagcgccagtacgccgcgcttgcgtagccgcgggtcgcgcagcagctgcgacagccgcgcctgttcctccgccagttgcgccttgtagtcgtccttgtcgagcttctgctccaggtcgaggctgctgagcaggctcaaccgatcggcactcagctcgacgggggccgtgtgcggctgggaaggctggctatcgaccgcatcgagtgcggcattcaacccttcgagcagcaagcggccggccgtgaggctgcggtaacgctcgtcgtaaccctcgatcacgtaccaaggcgcgaagtcgcggctgctgcggcgcagaatgagctcgccatatcggacgaacttgtcataggtcttcgattgctgccaatccagcggactgatgcgccaactgtgcagcgggtcgtccttgagcgactcgagacgcgcgagcatgcggtccttggacaggtggaaccagaacttgaagatgagcatgccctcggcgcaaagcattcgctcgaagcgctgcgatcggtcgatcgccaactccagttcggttttcttgatccggccatgcacgcgatcctcgagcatcttgctgtaccagttgccaaagaagatgccggtctgtcccttgggtggcagacgccgccagtaacgccaggccggtggatgcgcgagttcctcgtcggtcggcacgtcgaaactgtcgacgcggatcagacgcgggtccatccattcgttcagcagcttgatcgtctcgcctttgcccgcaccctcgatgccattgatcagaatgagcaccgggaaacgggcctgctcgcgcagacggtactgcgctgccagcagcgcctcgcgaagcacgggtacggcttcgttgtaggtttgcttgtcgatggtatggccgatttccgcggattcgaacatggcgtactccagaacgtggcttcgcttaaccctagcaggcggcaggccacaggcgtgaacggcagccatgcgatgcaggtcgttacccgcgcgattcaggcaggccgaactgatgcgacaaagcgcacccgcagctggtttcccgcggctgctagaatcgccgccttctcgcgtcaggatgccttccatgcccatccaccccacccacggttttcagcctgccgaactcgactgggacgccaatggccagccccagtcccgccagtacggcgacgtctatttctcccgcgtctcgggcatggccgaaaccgaacacgtcttcctacggccgaacggcctggcggagcgtttcgccgcgctgcaagccggcgagcgcctggtcatcggcgagacgggattcggtaccgggctgaattttctctgcgcctgggcgttgttcgaacgcagcgctcccgctggtgcgcaactgcatttcgtcagtgtcgagaagcatccgctatcacgagccgatctcacgcgtgcgctcgcgctgtggccggacctgcaaacgtacgccgcgcagttgctcgaacagtacgtcgcggtgaaccccggattccagcagctgcgtttcggccgcgtagtgctgacgttgctggtgggcgatgcgctggactgcctgagcacgctcgatgcgcaagtcgacgcctggttcctggacggtttcgcaccggcgaagaatccggagatgtggcagccggagctcttcgaacaattggcacgcctgtccaggcctggcaccaccctcgccaccttcaccagcgccggaagcgtacgccgggcgctgctggcggcgggcttcgaggtcaagcgcatcccgggcttcgggcagaaatgggagagcctctgcggccagctcatcacctctgtgaaaccggcttgcgcaccctggttcgctcgcccgcatttgaagcccgcgcaacgcaaagccctggtgatcggcgcggggctggccggttgtgccagtgcggcgagcctggctgcacgcggctggcaggtgacgctcctcgaacgacatgacgacatcgcccaggaagggtccggcaacccgcaaggtgtgctctatctgaaactatcggcgcacgggaccgcactctcccaactggtggtcagcagcttcggctacacccgccggctgctgcgacatctgcaacgcggcaaggactgggacgcctgcggcgtgttgcagctcgccttcgacgagaaggaagcggcacgacacacagcgctcgccgaggccttcgctcccagcctgttgcacgccgtaacgcaagctgaggccgagcagctggctggcgtcgcattgcatcacggtggcctgtactaccccgacgccggttgggcccacccaccggcgctgtgtcgctggttgatcgcgcacccggccatcgaactgctccgtcaacggcaacccgtcgagctgcgccgcgtcgatggcggctggcaggcgttgcaggaaggccaagtggtcgccgaagctccagtggtagtccttgccggtgcagccgacgctgcccgtttcgatcagagtggctggctgccgctcaagcgcatccgcggccagatcaccggcctgcaggccaccgagcgaagcgccgccctgcgcaccgtgctttgcgccaaaggctatgtcgcgccttcgcgcgacggcctgcatacgttgggcgcgagcttcaatttcgccgagatcgatcccgcgccgagcgacgcggagcatcgctcgaacctggacatgctcgaggaaatatcagccgacctgttcgagcgcttgcacgccggcgaacagccactcgatggcctgcacgggcgcgtggcgtttcgctgcaccagccccgactacctgccgatcgtcggtccgctggccgatcccgccgccttcgccgatgcctacgcggtacttggcaaggatgcccggcaagtgcccgacgtcccctgtacctggctggatgggttgtacgtcaacaccgctcacggatcgcgcgggctgatcaccgctccgctgtcaggcgaactgctggctgcctggctcgatgacgagccgctgcccgtgccgcgcccgattgccgaggcctgccacccgagtcgttttctgctgcgcaaactcgtccgccgaaccgattgaatcgcagggcgatcgacctggcgcgcgccggccatgtcgaccgcctgcggcccaccctttagccacgccggaacggctcgtcccagaatggccgatgggcttcggtgtcgatatcggcgcggctcagcccgaggtccttgagcatttcgtcactcaacgcagccagttgccggcgttgccggtacaacgcatgccagcggcgtacctgctgccagaacccgtgcacggcctggccgaacgatgcgctgcggctcgcagccagagtgcctgttttcattagctcgacatgacttttcatgatccacctccgagtgagatggcatcagtgtccggccggcgttatgatcaatccaacgaatgttactgatagctcgcatctcggagattgatgaatggccaactatcccagtatcgatgccgagttgctgcgcagcttcgttgcgattgccgattacggcggcttcacgcgcgcggccgatgccgtcaatcgcacccagtcggcgatcagcatgcagatgaaacggctcgaggaggatgtgctgcagcgcgccctgttcgagcgcgagggccggcaggttcggctgactgccgagggtcaggtgctgctcggctacgcccggcgaatcctcaagttgcatggcgaggtattgaccaccttccgcgaaccacacatggtcggctccgtgcgcatcggcacgccggacgattatgtaatgcgctttctgcccggcatcctttcgcgcttcgctcaagcgtacccgctggtgcaggtggaactgcactgcgagccttcgttccagttgctgcaacggcgcgatcttgacctgagcatcgtcacccgtgagccgggtgcggagatcggccagttgctgcggcgcgaacgagtggtctgggccgaagctgccggcttcaacgcccatgagcagcggccgattcccctggcggtgttcaatagcgaatgcttctgccgtgcctgggcctgcaacgccctggacagtctgggcacgcctttccgaatcgcctacaccagccctagcctgtcggcgttgatggcggtggtcggtgccggtctggccgtcaccgcccagatgcagagcctgctgccgccggacatgcgccaactggggccggccgaagggtttcccgaacttccggtaagcagcatcgtgctgttgcgcaacgatcgcagccagtcgcaggtcagcgaaacgctggccgaacacatcgtcgaggggttccgcctgtagtcgccacgcggcggataagccgaactaccggccctaatcgatcggaccacaaagcgaagccgcgcgcagcagtgcggcggcgatgccgtgctgctcccattcgggcagcgcggtgaagcgctcgacgaactctggcggtagcagcgagggtgcctgcttttgcaacgccctgccctcaggcgtcagcagcaaccattgccgacgtcgatcctgatcgtcccgctggcgcagcaacagacctcgctcggcaagccggtcgagctgccccgacagggtcgcggcggtcaggctgacacgcttgctcagcgcactggccgtcagttgcccttcgttctccaccacctgcaggatcatcaactgcaccgggctcagcccaccgtaacgggcgagccgcttggcgtggacttcggcatcctgctgcaggcgccgaagggcctggaacaaggacagctccagcgccgaggcggccagccgattagtttcacccgaaattgttttattagtcataagccacaatttgatagcaatcacggtttgacatgaaagcatttgtttgtttctctgtaaaacccgactgacctggcaggacgcgatgcgaccggcgccggaaggccccgatctgccgctcgtgcagcggcccagagcggtgcgcgccggtctgaaaagctgaacttcgcgatccgcgcgtcagtcacactccccaacggctaaaccggtaaggatcctatgtgtggcatagctggcgaacttcgcttcgataatcaaccggccgatctggccgccgttgaacgcatcacccaacacctcatctcccgcggtcccgacgcttgtggtttcaacagtcagggacccgtcgctctgggccatcgacgcctgaagatcatggatttgtgcgaggcctctggtcagccgatgatcgattcggcgctgggtctgtcgatggtcttcaacggcgccatctacaactatccggaactgcgcgcggaactcgaagccctgggctacagcttcttctccgaaggcgacaccgaggtgctgctcaagggtttccacgcctggggcgaggccttgttgccacgactcaacggcatgtttgccttcgccatctggcagcgcgatacgcaggaattgttcatcgcccgggaccgccttggcatcaagcccttgtacctgtccaagaccggtgaccgcctgcgtttcgcctcggccctgcccgccttgctcaagggcggcgacatcgccggtgtgctgaacccggtggcgctgaaccactacatgagcttccatgcggtggtgccggcaccggacaccctgatcgccggcatcgaaaagctaccgcctggaaccttcatgcgcgtcgacgccacgggcaaatccagccagcagcgctggtggacgctcgaattcggcgccagggaagacgagcaaaactacagcttcgaggattggcaggagcgcacgctggcgacccttcgccagtcggttgcgatgcgtcagcgtgcggctgtcgacgtcggcgtgctgctgtccggcggcgtcgactccagtctgctggtcggcctgcttcgcgaagcgggcgcggcggacaacctgctgaccttctctatcggtttcgaggatgccggcggtgagcgcggcgatgagttcaagtattccgacctcatcgccgagcactaccagacgcgccaccaccagttgcgcatccaggagaaggagattctggagcggcttcctgcagccttccaggcaatgagcgagccgatggtcagccacgactgcatcgccttctacctgctgtcgcgtgaagtctccaaacactgcaaggtggtccagagcggccagggcgcggacgagctgttcgccggctatcactggtatccgcaggtcgacggagcacaggaccctgccgcggcctatctggcggcgttccgtgatcgcagctacgaggaatatgccgagaccatgcagcagcaatgggtcaagggcgatttctccggcgacttcgtacggcagcacttcgcgcagccaggcgccgaggcggcggtcgacaaggcactcaggatcgatagcaccgtgatgctcgttgacgacccggtcaaacgcgtcgacaacatgaccatggcctgggggctggaggcacgagtgccgttcctcgaccacaacgtggcggaactgtcggcgcgcattccggccaagtacaagctgcccgagggaggcaaatacgtcctcaaggaggccgcccgcaaggtgatcccggcagcggtgatcgatcggccaaaaggctattttcccgtgcccggcctcaagcatttgcagggcgataccctcaactgggtgcgcgaactgctgactgatccgagccaggatcgcggcctgtacaacccggcgatgctggaaaaactgttcagcgatccggagggccaactgacgccgctacgtggttcgaaactgtggcagctggcggcagtcaacctatggttgagcgagcaaggcctatgagcattcgatcgtgacagtgcctgttccatcgcgggcgcgtgcgttccgtctgttcgccgcgccgacatgaccagctccaaggaaaactccatgcagaagtctcaagcttacggacagcgattgttgcgcggccagacacctacctacgagcggctgcaggcacgcctcgccgaagatggcaaggaagagccgcagggtccggtgacgctgcattgcggctggggccgcatcctgatcggtcacacctactccgaccccgcggacctcgccgccgacctgcttcacgagcaagccggcgagcgggatatcgcgctctacgtcgccgccccacaccaggtgctcgcctacgccccgcagcagttgttcctcgatccgtcggacaccatgcgcatctggttcaccgactaccgcccggcacgccggagctttcgcggcttcggtattcgtcgcgcgcaaagcgaagccgactggaaggctatcaactgcctgtatcaatcgcgcggcatgttgccggtcaaccccgagctgtgcacgccgcgggaaaaaggcgggccggtttactggctggccgaagacgacgattccgggcagatcatcggcagcgtcatgggcatcaatcaccacagagccttcaatgacccggaaaacggctccagcctgtggtgcctggcggtcgcgccgagctgtacccgcccgggcgtcggcgaggcgctggtccgccatctgatcgagcagtacatgggccgcgggctggcttatcttgacctgtcggtactgcacgataacaagcaggccaaggcgctctacgccaagctgggctttcgcgatctgcagacctttacggtcaagcgcaagaacaccatcaaccagtcactgtttctcggcccggggcccgaagccgagctgaacccctacgccaggatcatcgtcgacgaggcacggcggcgcggcatcgagatcagcatcgacgatgccgaggccggtctgtttacccttacccatggcggccgcaaggtgcgctgccgggagtcgctgtcggacctgacgtccgccgtgagcatgacgttgtgccaggacaagagcctgacccaccgcacgctggcgcgggccgggctgaagttgccggcgcagcgcctggccggctcgcccgaagacaatgcagcctttctgcaggaacacggcagcctggtggtcaagccggtcgatggtgaacagggccatggcgtatcggtggatctgcgcagcccagaggccttggaagaagccatcgtccaggcacgtcagttcgaccaacgcgtgctgctcgaaagctaccatccggggctcgatctgcgcatcgtggtgatcggttacgaggtcgtggccgcggccatccgccgaccggccgaggtggtcggtgacggcagccacagcattcggcagttgatcgaaacccagagccgtcgccgccaggccgcaaccggcggcgagagccgaatcccgctggacagggaaacccagcgctgcatcgaggatgccggcttcgattacgacacggtactgccacgtggggagcatctggcggtccgccgcacggcgaacctgcatacgggcgggatgctcgacgacgtcaccgatcgcctgcacccggaactcgtcgacgccgccattcgagccgctcgcgcactggaaataccggtggtgggcctggacctgctggtgccaggagcggaccagccggactacgtgttcatcgaagccaacgagcgcgtgggcctcgccaaccatcatccacagccgacagcggaacggttcatcgacctgctgttcccgctcagccacaacagccactagctggcgctgtccgaaggtggccatcgtcaccttcggacagccttaccgcggcatcgctcgcattcattcatcgcatggcggcagccatccaagtgcccctaaggaatgatcatgactgcaaagctacctgaacctgatctcaactatctgcaacgcgtgttgctggaaaccctggcgattcccagccccaccggtttcaccgacaccatcgtgcgttacgtggccgagcgcctcagcgaactgggcatccctttcgagctgacccgacgcggcaccatccgcgcaacgctgaagggacgccaggacagccctgatcgcgccatcgccgcgcatctggacaccatcggtgccagcgtccgtgaaatccatgaaaccggtcggctgggcctgtcgcccgttggctgctggtcgagccgctttgccgaaggcagccgcgtcagcgtgttcaccgatcacggtgtgatacgcggcagcgtgctgccgctgctcgcctcggggcatgccttcaacacggcggtcgacgagatgccgatcagctgggaccacgtcgagctgcgcctggatgcccataccacctgccgcgccgacagcattgcattaggcatccacgtcggcgacttcgtcgccttcgatccaatgccggaattcaccgacagcggccatatcagcgcccgccacctggacgacaaggccggcgtagctgcgctgctgaccgccttgaaagcggtggtggaaagcggcctcgaattgccgatcgactgccatccgctgttcaccatcaccgaagaaaccggctcgggtgcagcgggcgcgctgccatgggatgtcagcgagttcgtcggcatcgacatcgcgccaagtgccaagggccaggaatccaacgagcatgccgtcaccgtcgcgatgcaggactctggcgggccgtatgatttccacctctcccgccacctgctcaaactggcggaaaaccatgacattccggtgcgccgggacctgttccgctactaccacagcgatgcccagtcggcgatcgccgccgggcacgatatccgtaccgcactactggcgttcggctgcgatgcgacccacggctacgagcgaacccatatagacagcctcgcggccatgagtcgcctggtcagcgaatacctgctcagcccgccggtcttcgccagcgatgcacacacagggcagggatcgctggaaagcttcagccatcaactcgagcacgaaacccagatggagaacgacacgcgcgtaccgccagtcgattcgataatcgacagacgctccgacgacacagccgattgaatttcgggtttcatgatctgccgccaacttgaggcatttgccgattgcgaggcggccttgatccgggcaaagtcgcaagtcactgaaatatatgaattgcctggttaaactgggcattcggcgaagctggcttgccattcgcgtcactgaaactgtgcatccagggggctgacggcattgcctggcccccgggacgttgcgcacgactccgggtctcaacatgctgccgcgcctttgcctggccctcttactctgttgtgtagctggtccgctctgggcattctcgccagtgccggtgactacgcatgattttcgccagtccctgggcagctggacctatttcctccgggatccggccgccgagctgaacgccgaagaagtgcttgccctgccggaaaagaccttcgaaccggtcatcgccaagcacgccaacaagggcaagaacaacgatgtctggtggttccgggtcgagctggacaaccagctgagcgacccggttggcggtttcgtcgagatcaactatccgttgctcgaccacatcgagctgtacgtgcgtcgcccggacggcagcgtcagccggcaacagtccggcgacgaacgtccattcaaagagcgctcggtcaaggtcagcaacttctggtttccggtcgacctagagcccggcgtctcgacgctattgctgcgggtacaaagcaccagcaccctgtatgtaccgctgtacttcggcacctatgggtcaagcgccgccgcggtcgaggacacgatgggctttgccggcgccttctacggcgtgctgttcgcgatgttctgctacaacttcttcctgttcctctcgctgcgcgaaccggcctatttctggtacctgatctataacctcaacgtcgggctgttcgcgctcagcttcgacgggcgactggtcaaatggctgaacgatgacggaggtgtcgtcgccctgggcatctatgcgctgatgctcagtcactgcctgatctccatccagttcagccggcatttcctgcatacccgcgagcactttccacggctcgatttcgcattgcgcgtagcgttcctggtctcgttcgcggcgctgttgtccgggctggtcctcgacctgcagacctggagcgtcctggccagtgtcatggtcatcatctcgtccatcggcctgttgctgaccggcgcattcgtctggcgccgcggggtgcgttacggtctgtactacaccctcgcctggggcgtgttgctggtgaccttcgccatcgtcacggcgggctcgctgggcttcaacctgctcggtctctacggctcctcgatcgtcaaggtcggtatcgccttcgaattgatcacgctgtccatcggccttgccgaccggatcaacctcctcaaggaggaagggtttcgctcgcggcaggccgccgcccgcgcggagagcgaaaatcaggccaaaagccgctttctggcaaagatgagtcatgaaatccgaacgccgctcaacggcgttctcggcatgctgcagctgttgcgcgaaacgccgctggatcgcaatcagcgtttctatctcgacaccatttccagctccagcgcctcgttgatgtcggtgatcaacgacattctcgactacgcacgcatcggcgctggaaaactcgttctggaagacatcgaatacgatctcgaggcgctgctttcggaaaccgtcagcctgttcaccgcccaagcgctggaaaagcagctgcgcttgcacgtcagcctcgctcccggcgtgccgcgacgggtacggggcgaccccacccggctcaagcagatcctgctgaacctgatcagcaacgcattgaaattcaccgagcatggctacgtcatgctcgaagttaccagtcagggccaagcggatgctcgaacgctggagttctcggtgaccgacagcggcatcggcatgcgtcccgaagttctcgctcagttgttcgtgtccttctctcagggcgactccagcaccacgcgccggtatggtggcagcgggttggggctggtcatcagcaaggagctggtggaaatgatgggcggccagatcgtcgtgcaaagcgcaccagggcaaggtagccgcttcagtttcgccacaccgctgcatgaagcggggggcaaccatgatccgctcgccgcgctgctggaaagacgcacggcggtgatcgcctcccaggatctgcgcgccctcgatgcgatggcgggcctgttgatgcgctggggaatgcgcgtggtgcgctgtgaggagccgcaacggctgcctcgctatctggatgaccacagcgccccaccgttattggtgatcatggcgccgtggcccggacaacccgaagattggctggcaccgctgcgcaaccagctcgagccgaatcagcgtgtcttgctcctctacccaccgcagagcgggcacgctatcgctgaaaccgatctgcgactggtccagttgcccttaccgcttctgctcgccccgctgcgcgatgccctgcatcggctctatcagccgatgaacaggacgctacccgacgctccggcacccgagtccggcgctgtgacgtcgcgttcacgcatcctcatcgctgaagacaaccccgtcagccagatggtggtttccagcctgcttcgcaaacgaggctacgaggtaacaatcgcggagaatggccgtcgcgccgtggcagcctaccgtgaaaatccctcggccatacaggcgatcctgatggactgcgaaatgccggaagtgaacggcttcgaggcgagccgtcaaattcgctgcctggaagccgaacgcgggctggcaccggtgccgatcatcgcgctgacggcgcacgtgctcgatggccatcgccaacagggcagcgacgcgggaatgaatgacttcattggcaagccgctggacaccgagcagctgtatgcttgcctggatcgtcacctgcacgcgacgacggtcgtcgaacctgaccagcccacctgactcgaaaccatgctcatcccttacgaccagctagaacccgacacgctcacgcgcctcatcgaggatttcgtcacccgcgacggcactgacaacggcgacgagacgcccttgcagacccgcgtcgaacgggtgcgtcaggcattgagcagaggtaccgcggtgatcgtcttcgatgccgaccatcagcaatgccagctggcgctcaggcgcgacgtgccgaaggaatggctggaggattgaggcttaccccagcacgccgccgtctcgttcccaggcgcaacgcatgcgcagatcgcgctgatgcgggctgtgcgagccgctgtcggtctcccagcgaaaggtatgcgtcccgctgagttcggtttccagatgcaccaccgcgctggtccagtagagctcgctgagcagcgcctcgaagttgcgtacccacaaggcccattcatattcgatcgcccggtagctggcgccgaagtggatcacctgggtctggtagaggccatccccggaacagcaggaaaacatctcgcggccaatgaacggccagccctcgccttgcggcaagttgtccaaagcacggcgattgagttcgcgacgccgccgaccctcttcagcgtcggccgatggccagtcacggatgctgccatagacgatggattccggctccacgcgaacactccactcgaaaggccgacatgttcaaccaaaaccggttggcgttccagcctcccggtgggcacggcgcgactgcgtgggatgcaaagtgatgccggtcacggtgatgctgttcaggtcccggtcgcagccgccggatcacgccgtggcgccagccgcagggcgaggaccgtcatgaccgccgccatgctcgccaggaccagaaacggccagcggtagtctcccgcgatatcgcgcccgagcccagtcagcaccggtgagaagcacgccaggcaatagccggtacagagcatcatcgccgtcagccggctgaccgccagcggtgtactggcctcgtacatgggcagcaccagcgacatcgagaaggtgccattgagcgcgatacccagcaccatgcagaccaccagcggctgcacctggggaacccaggcgataatcagcaggctggccgtcgccatcgcgccacaggcagccatcagcaggtgtcgcttcccgaagcgctgcgccagccagggcatggcgaaggcgctcggcaaaccgatcaacatgaagccactgaagaaggtgttgctctgtaacaggctgaagccggcttcgtgataacgcgccaccagccaggtcgccagcgcatagaacaatcccgcctgcagggcgaagtagatgctcaccagccaggcgcgcggctcgcgccatggcaaaccggcccgccgttcgacggcggcctccggctggttcggcaatcgccaccagagcatcaccgccaggatcgccgggatcgaccagatcgccagtcccatggtccagcgctctcccaacagctgcgtcgcgggcgccgtcaataccacgccaatggtgccgccaacagccatgctcaacgagtagaaggcggcggtcttgccaatgcggtcgaggaaatagcgcttgatgaagcccgacagcaacggcccggccacggcgatgccggcgccgaccatcgccgccgtgccgatcaggatcactggatcgtcgccgagcaggcgcaacatcagcgccagcccgataagccccaggcagaggctgatggtccgctccaacccgaaccgcacggccagccgcggtgccagcggtgccagcaaacccatcagcagcaccggcagcgccgtggtcaggctgatcaggcttcggctgagattcagctcatgcgcgatgcgttcgatcaatggggcgaaggaggtgattccggggcgaagattgatggccgcgagcaccagagccagcatgagcagccagcgagatgggtttttcacagtgaatccatgggtcggtctgaggtgaacaggcaaccctactcccggcccaggatcacggcaagcaaaacggacctattggtcagcttttgctcttgttgcgcttcttctctgccagcaccgccatctcatcgtagatggcctgcggattctgctgcttgatcttccaggctgcgcgcccttcgtcatgcggcaggatcatgaaaacgccttcggtaacctgccgatagatgtagtcggcgatatccgccgcggtgatcggcgaagcttccaacagcttgctgatctgcgccttcatgttcggtgtcggtccgcggtaggaatccatcaggttcgtctgaaagaacgatgggcagaccacgtggacacccacctcctgctgcttcagttcgaccagcaggctttccgacagcgcgacaacacccgccttggcgacgttgtagttgctcatgcccggcgcctgcatcaacgcggccatggaggcgatgttgatgatcttgccgcggcttttctggagcaatggcaggaacgccttgcagcccttgaccacacccatcaggttgatcgcgatctgccagtcccaatcctccagcgagagctcttcgaagaagccaccggacgcaacaccggcgttgttgaccactacgtcgatcccgccgagtttgctttcgcaagcctgcgccagacctgtcagctggctgtagtcacgcacgtcacagcgctgggtgaagccatcaccgccggcttcgcggaccattttcagggtttccgcaaggccggcctcattgacatccgagagcgccaattgccaaccctctcgcgcccaacgcagcgcgatctcgcgaccgagaccggatccagcgccagtgaccatcatgcgattttgcatcgtgtgctgccttcttgttcgttgagttgcaacgagtctagcgaatgccgccgtgtgctccggcctctatcgaaatgctgaatgacaggcatatctcggacccgattgacggtgtccgaatggctttatcgacgtaaaaaagaaagggcagccaactggctgcccttccctttcgcggttccgttatcagtgggcgaccgcaccactggaacccagtccggtctgcgagcggacgaactgcgagaagaagcgctcgcgttcgagagctgccgatttcgacttgtcggtgaccgagaagaaccagatccccgcgaacgccacgaccatcgagaacagcgccgggtacttgtaggggaagatcgcctcggcgtagccgaacacatcgacccatacggtcgggctgatgatggtcaggaccagcgcggtggccaggcccagggcaccgccgatcagcgcgccgcgtgtgctcagccccttccagtacatcgagaggaacagcaccgggaaattgcagctggcggcgatcgagaaggccagaccgaccatgaaggcgatgttctgcttctcgaagatgatgcccagcaggatcgccactacacctagcgtcagcgtggtgatcttggtgacccgcatctcttcctcttccttggccttgcctttcttgatcacgcaggcgtacaggtcgtgggacaccgccgaggcgccggccaacgtcaggccagcgaccaccgccagaatggtggcgaaggcgaccgcggaaatgaagccgaggaacaggttgccaccgaccgcgttggccaggtggatcgcgaccatattggtgccgccgatgacggcgcctgcggcgtccttgaactgcgcgttggtgcttaccaacaggatcgcgccgaagccgatgatgaaggtcaggatgtagaagtaaccgatgaagccggtggcgtagaacacgctcttgcgcgcttccttggcgtcagcaacggtgaagaagcgcatcaggatgtgcggcaggccagcggtaccgaacatcagcgccaggcccagagaaatcgccgaaacagggtcggagaccagcccgccggggctcatgatggccgaacccttctcgtggatcttgaccgcttcggcgaacaggctgccgaagtcgaagttgaccgccttcatcaccatgatcgccatgaagctcgcgcccgacagcagcaggactgccttgatgatttgcacccaggttgttgccagcatgccgccgaacagcacgtacatgaccatcaggacgccgacgaggaccaccgcgacgtagtaatccaggccgaacagcagctggatcagtttgccggcaccgaccatctgcgcgatcagatagaaagccacgacgatcagcgaaccgaacgccgacagaatgcggatctgggtctgacccaggcggtaggacgccacgtcggaaaaggtgaacttgccaaggttgcgcaggcgttcagccatcaggaacaggatgaccggccagccgaccaggaagccgatcgagtagatcaggccgtcatagccgctggtgtataccagcgcggaaatacccaggaaagacgcggcggacatgaagtcgccggcaatcgccaggccgttctgaaagccggtgatgctacccccggcagtgtagtagtcggaggtcgaggtgttgcgcttggccgcccacttggtgatgcccatggtgaagccgatgaacgccacgaacatggcgatggcggtgtagttgatcgcctgtttctggacgtcgccggtcagcgcatcggccaggagcaagggcgagacaaccgtcagcgccactgccgtcaataaacgcagaatcattattgctgagcctcgttgaggatttcctgattgaggcgatcgaattcgccgttggcgcgctgcacgtagacgccggtcagaatgaacgccatgaagatcacaccgacgcccaccgggatcccccaggtggtgaccgtatcggccgcaagcggaatgccgaggatcttgggatcgaacgcgatcagcagaatgaacgcgagataggcgcccagcatgacggccgacagcagccatgcaaagcgaccacgtttggcaaccagctcctggaagcgagggtttgcatagatttgccggtaaacatcttcattgttttgcattgagggtctccacggtctcgcccctgatcagagcaggtggctactttagggcccggcaggccgaacaccactcgaccatggtcttgtttttatttactggagccaccgttttagacgcctcggataatcgagaccgagcaataggccaagcctatgtggcggatcaagcacagcgattgtcctccgcgccacgacggcgcgagactggcccccacagagaataattctcgaccgcatacggagttcgccatgctcaagaccgtgacctttaccctgatgcatttctgcatcgccttcacggtgacctatgccttgaccggcagcgctgccgcgggcggtcttgtggcggccatcgagccgctgtgcaactctttgggcttctacctgcacgagcgagtctggcaacgcctggaaaaacgccagcgtaggggcgacgtgatcccgtctcacgcgtggttgcaccaccacgcctgacttgcgaaggagcatgatcggtacccgtcgagtgcaactggatgccagctcgtcgccaatcctgacgcaaccagacggcttaagcgtggtctatgaaggtgcgctgaacttggctcggtcgctcgaccgcaagtcacagcgcacgcaggaaggcagaaacgctcaccctggaggagcaatgcgcagtaccagcaccagccgaacgccagccgcagcacaggcgtaccgccacgtccatgcagcgccccgcagcgcataccgctcacccggttcgcagcggtgcctggcacaacccggatccagcgacagcactagccgtttggccaggcggcaggttcgtgtcctctgccagcatcgatggctacacgccccgcacatacggttcgccgatctccatgcttgccccaggagcaccctctagatgcgaatgctgctgtgcctgacagcactgctgacgctgatcgtaacgcccgcccacgcggccgatatcagcgtcgagcagtacggctatccactgagcaacccgttcgaggcgacgatcgccacgacgcctgccgagttgcgcgccgaagtgcccagcgacgaggacattgatcaggccgactacagtttgcgactgcgcccggagcgcgaattcatcctgcccgagaacttctgggcggttaagcgcctgacctaccgcctggccaagcaacctggcccggccccgctgatgttcatcatctccggcaccggtgccagctattcggcggacaagaccgaatcgctcaaacgactgttctacggcgctggctaccacgtggtccagctgtcttctccgaccagcttcgatttcatcgcggcggcctcgcgctacgccacgccgggctacagcccggacgacgccaaggacctctaccgcgtcatgcaagcggttcgcgcccagcagcacgacttgcccgtgaccgagttcaatctgatcggttacagcctgggtgcgctcgatgctgccttcgtcagcaagctggacgagacgcgacaaagcttcaacttcaagcgggtcctgatgatcaacccgccggtcaatctctacacctcgatcaagaacctcgacaaactggtgcagacgcgagtcgaggcgatcgacagcacaaccactttctaccaagtcatcctggaaaaactgacccgttactaccgccagaaaggcgcgatcaacctggacgaggcgatgctcttcgacttccagcggtctgccttgcgattgactgacgaacagatggcgatgctgatcggttcggtattccgcttctcggcggccgatatcgtctttacctcggacctgatcaaccgtcgcggccttatcgtcccgccgaattacccgatcgacgaaggcaccagcctcgaacccttctttcgccgttcgctgctctgcgatttcgattgctacatcaccgaacagctgattcccatgtggcgtgcgcagcaggatggcggcagcctggcgcagttggtgcaacaggtcagcctctacgcgctggaggactatctgcagagcagcccgaagatcgccgtcatgcacaacgccgacgacatcattcttggccctggcgacctgggtttcctgcgccgtaccttcggtgatcgcatgaccctctaccctcgcggtggccattgcggcaacctcaattaccgggtcaacgcccgagacatgctggagttcttccgtggctagacgtcatctgcttgcgctgctaatgctcatcagcggcgtggccagcgctcagacgcctcccgccgatgaggacggtttcaagcagccgctgcgcaacctcgagttcaaccccggcctggatcagcgtgaattcgaacgcgccaccttcgacgcgctggacatctatgacccctgggagtcgctgaatagacgcatgtactacttcaattaccgcctggatcagtgggtgatgctgccggcggtgcgcggctaccgctacgttacgccgagcttcgtgcgcaccggggtcagcaacttcttcaacaacctgggcgaaattcccacgctgttcaatagcgtcgcccagttgaagggcaagcgcgccatgaccaccactgcacgactgctgttcaacaccatccttggcgtcggcggcgtatgggatccggccacgcgaatgggcctgcctcgctacaaggaggatttcggccagaccctgggcttctacggcgtgccccatggcccctatctgatcctgccggcactcggcccgtccaatctgcgcgatgcaaccggtcaggtcgcggacttcggggtggaacgccaggtcgactatttcagctatgccgaagccagcggcggtgagtttggcctcaccgcgttgcgcctgatcgaccttcgctataccacgccgttacgctacggccagctcaactcgccgttcgaatatgaaaaggtgcgctacgtctacacccgcgcccgggagctgcaaatcgatgagtgatcgatccgttcgatagaaacgttagagatttcccatccatgcatcgaggcgctgccggtagtcttcttccgatcagcgactcggagcattgccatgaccctgcgacagattcagcacatcagcaccggccgcgccacctcggacggtgccggcgtacgcctgacccggcttttcggtggcgcaacaccggagcggttcgatcccttcctgatgctggacgagtttggctcgacccaaccggacgattacatcgccggcttcccagcgcacccgcaccgcggtttcgagacgatcacctacatgctcgaaggccgcatgcgccatgaggaccacctgggtaacgttggcttgctcgagagtggcggcgtgcaatggatgacggctgcgcgtggcgtcatccatagtgaaatgcccgaacagcagcaaggcgcgatgcgtggtttccagctgtggctgaacctgccggccaagctcaagatgagcgacccggactatcgggactacgcagccgaggagatcccccgagcgacactgcccaatggcatcgaggcggtcgtcattgcggggcgactgaccgccgacggcgtcgacctgccaggagctgtgcaacgggccgagaccgagccacagctgttcgatctgcaccttcccggcggctgccacctcgagccgcagttggccgacggacaccggctgatgctctacgtctacgaaggcgagataagcgtttccggcaaaaccctgcaccgaaaccagctcgccgtgctgtcggaacggggtcagctgcgcctggaggcgctgaccgatgcccgcgtgctactgctggccggtcgcccgctcggtgagccaatcgttcagtacggcccgttcgtcatgaacagccgggaagagatcgagcaggcgctgcgcgacttccgtgacggcgtcctcacggactgaccggtttcttcggcagtttgcggtacaggttcggctcgccttccggccgcgtcttgaagcggcgatgagcccacaagtactgctccgggtgctgccggaccgcctcttcgacccaatcgttgatgcgccggcagtcggtttcttcgctctcgccggggaaatccgccaatggcggatggatgaccagccgatagccgctgccatcgtccagacgctcctgggtatagggaatcacccgcgccttgcccaaccgcgcgaacttggtggtcgccgtgacggttgccgcgttgatgccgaaccaggggacgaacaggctctgcttgcggccataatcctgatccggggcataccagatcgctcgcccggcacgcagcaccttgagcatggcccgtacgtcctcacgctcgatggcggtggcgtcgaggttgtgccgctcgcgaccgcgacgctgaacgaagtcgaataccgggttcttgtgctcgcggtacatgccatcgatggtatgacactggctcagcagcgccgcaccgatttccagcgtggtgaagtgcagcgccatgaggatcacgccctgcccttcggcctgcgcctgctgcaaatgctccagcccctcgatgcgcgccaggcgctgcagtcgagccttgggccaccaccagctcatcgccatctcgaaaaaagcgatgccggacgaggcgaagttctcccgaagcagtcgctcacgcgccttttcgttcagctccgggaaacacaactgcaggttgcgccgcgcgatgtgccgcctcgatcgtgccaaacggtacatcagcgcccccagcccgcgtccgagcagcagtagaatgcgatacggcagctggatgaccagccacagcaaacccaggccaagccagagcagccagaaacgcggatgaaggaaggacgcacgaaaacgaggacgatccattgaaaagcccgaaccgataaaagcgcgcattctagcgacaaatcgcccagcgatgcggtcgcgtctcgatacacggcagccatgcgctcggccaggcgagacttgcagccaacggtttgccccgctataagtcctcgccatttaccctagcaggcagaccatgagccaagccgatcctctcgaccaatcccccgtgttccagctcaagggcagcatgctcgccatcaccgtgctggagctggcacagaacgacctggaacgtctcgatcgacagctggccgtcaaggtcgagcaagcaccggatttcttcaacaacacgccactcgttctggcattggacaaattgcccgccgacagcgatctggatctgccagccctcattgcgctatgccgcaagcatggcctgcgtaccctggccctgcgcgccggcgaccctcagatcatcgaagccgccggcgttctggatctaccggtcctgccgccgtctggcgccaaggagcgcaagctggacctcgccagcaaggcaccagccgaaccggccaaacccgccgaaccgctctaccgccccacccgcgtcgtcaccacaccgatccggggtggccagcaggtttacgccaaggacggagacctgatcgtgctggcggcggtcagcccgggagcggaacttctcgccgatgggaacatccatgtctacggtccgttgcggggacgtgcccttgccgggataaagggtgataccaacgcacgcatcttctgccagcaactcgctgccgaaatggtctccatcgccggccgttacaaggtcgccgaagatctgcgtcgcgacccgctgtggaccgaagccgtacaactgaagctatccggcgacgtgttgaacatcacccgcctttaacggatactgccgcgaattttcaagcaccaaaacgggcctcccaatgccgaaccggcggagggtcccgccttccatatttagggtgaatcaccttggccaagatcctcgtagtcacttccggcaagggtggcgtcggtaaaaccactaccagcgccgccatcggtaccggcctcgctctgcgcggccacaagaccgtcatcgtcgacttcgacgttggtctgcgcaacctcgacctgatcatgggctgcgagcgtcgcgtggtgtatgacttcgtcaacgtcatccagggcgacgctacccttacccaggccctgatcaaggacaagcgcctcgagaatctctacgtactggccgcgagccagacccgtgacaaggacgcgctgaccctcgaaggcgtcggcaaggtcatcgacgaactggccaagaccttcgagttcgtgatttgcgactccccggccggcatcgaaaagggcgcgcacctggccatgtacttcgccgacgaggcgatcgtcgtgaccaatcctgaagtgtcttcggttcgcgactccgaccgcatgctgggcctgctggccagcaagtcccgccgtgccgaaaatggtgaagacccgatcaaggaacacctgctgctgacccgctacaaccccgagcgcgtggtcaaaggcgagatgctgggtgtcgaagacgtcgaagaaatcctgtcgatccgcctgctgggtgtgattccggagtctcaggcggtcctgaaggcctccaaccagggcgtgccggtcattctcgacgaccagagcgacgccggtcaggcgtacagcgacgcggtcgatcggctgctgggcaaggaagtgaatcatcgcttcctagacgtgaaaaagcagggcttcctgcaacgactgttcggaggccgcgaatgaaccttctcgacttctttcgtgagcgcaagaagaaggaaacgccagccaacatcgccaaggaacgtctgcagatcatcgttgctcacgagcgcggccagcggactcagccggactacctgcctgctctgcaaaaggagctggtcgaggtgatccgcaagtatgtgaacatcgacagcgatcaggttcaggtcgccctggaagaccagggtagctgctcgatcctcgagctgaacatcaccctgccggatcgttgaacgaccgggcagcggcccgctcgcctcgctcggcacaatcatcggcgacttcggtcgccgattgcgtttgcggaatcccaagatgcctctgagcaacatccagatcgtccaccaggacgccgccctgctggtaatcgataaacccaccctgctgctatcggtgcccggtcgcgccgatgacaacaaggattgcctggtcacccggctgcaggaaaacggctaccccgaggcgcgtatcgttcatcgcctggactgggagacttccggcctcatcgtgctcgcacgcgacgctgatagtcaccgcgaactgtcacggcagttccatgatcgtgaaaccgaaaaggcctataccgcgttgtgctggggcgaacccgagcaggacagcggcagcattgatctgccgttgcgttacgacccaccgaccaagccgcggcacgtcgtcgatcacgagcaaggcaaacacgccctgacgtactggcgggtgatcgagcgttgcggtcactacagccgcgtcgaactgacccctatcaccgggcgctcgcatcagttgcgcgtacacatgctgtcgatcggtcacccgctgcttggcgatcggctctatgcgcatgaacaggcattggtcgcatacgaccgtctctgcctgcacgccagcatgctggccctgacccacccgcacagcggcgagcgcctgcgcttcgagtgtccagcaccgttctgatgcgagattttcttgaagcaacgcggggagcccctgagcacccaagcctgcagccgcaacggccaatgggatagactttcaagccttgcagtcaggagctcgtcatgcgcgaagaactcaaccagggtttgatcgattacctcaaggcctccccaacgccgtttcatgctacccgcagcctcgcacggagccttcaagccgctggctacgaagccttggacgagagcgcgacgtggcataccgagcccggcggccgctactacgtgacccgtaacgactccgcgatcgtggcgttccagctcggcaacaaatcggtcatcgagcacggcatgcgcatggtcggcgcccataccgacagtccctgcctgcgggtcaagccgcaacccgaactgcaacgccagggcttctggcaactgggtgtcgaggtctatggcggtgcactgctggcgccctggttcgatcgagacctctccctggccgggcgcgtgacctatagccgtgacggccgtatcgaaagccaactgatcgatttcaagctgccgatcgcggtcgtcccgagcctagccatccacctgaaccgggaggccaatcagggctgggcaatcaacccacagaacgagctgccgccgatcctggcacaggttgccagcgaagaccggccagacttccgtgccttgctcgccgaccagctcagccgcgaacacgggctggtggccgatgtggttctggacttcgagctgagcttctacgacacccagagtgcggcggtcatcggcctgaacggggactttatcgccggcgcgcgcctggacaatctgctgtcgtgctacgccggattgcaggccctgttgcgggccggcccgcaggaaacctgcgtactggtctgcaccgatcatgaagaagtcggctcgatgtccatgtgtggcgccgacgggcctttcctcgaacaggtgttgcgccgcgtactgcccgagggcgaggcgttccagcgcagcatcaatcgctcgctgctgatatcggcggacaacgcgcacgcggttcaccccaactacgccgacaagcatgacggcaatcacgggcccaagctcaacgccggcccggtcatcaaggtcaacagcaaccagcgctatgccaccagcagcgaaaccgcggggttcttccgccatctgtgcctggagaacgaggtatcggtgcaaagcttcgttacccgcagcgacatgggctgcggctcgacgatcggccccatcacggccagccagctcggcgtgcgcaccgtcgacatcggccttccgacttttggcatgcattcgatccgcgaactggccggcagccaggacctcacgcatctggtcaaggtgcttggcgccttctattcgagcgccgagctgccctgaagcattcgaggccgcccgcattcgtttgcgggcaggcccggtgcccccttgatcagcgaaccgacgcctgccgtgcgatacccttgcgccgagcccagcggctatacagcctgggctacacgcagcgacaacggcatatcgcgaccatgatcgcagcagcgcagaggcatcgaggtcgcaacaagcaatccgttgatgccttgcaatgcctcaaggcagcctccatagtggttccacctgcgccgctcaaccggtacccgctgcagtgcaggccgtcgataaatttctgctccaggccacatcgcgatactcccgtccacacgtaccgcttgccgattcggtaaggtgtgctgcggggctcgccctgccgccctggcgcgaaatgtgtcgcggcatgcaagccgcaagctaccgccggggcgttatttttccgccgggcagccccgtcccgacacctgatttgatggcctactatgcgttactacccagcctcgcgccgcccctccgacatgaaacgatcattgaccgcgggcgtcgttgccctgctgctaggcctgcaggcggctatcgccacggccaaacctgccgatggacacgactgggactatctgcagcccgatcgtgaccaagtgattgccagcctcaacgtggtcgaactgctcaagcgacaccactacaacaagccgccgctcaatgatgctcgctcggccaagatcttcgacagctacatcaagatgctcgacccgtcgcgcagctacttcaccgccggcgatctggccgagttcgaagcctggcgcaacgagttcgatgacttcctgaaaaatggcaatctcgagccaggcttcgcgatctacaaggtccatctggagcggttgcagagcaggctccaatatgcgctgagcctgctggaaaaaggcgtggacagtttcgatttcacgctcgacgaagagctgctggtcgaccgggagaacgccgcgtggccgaagaatgagcaggagctcgatgatctctggcgcaagcgcgtcaaggatgaagtgctgcgattgaaaatcgcgggcaaggagccgaaggccatccaagagctgcttaccaagcgctacaagaaccagctgtcacggcttgagcaaacccgcggagaggacgtcttccagacgtatatcaacgcattcgcccagtcctacgacccacacacccagtacctgtcgcccgacaacgcggagaacttcgatatcaacatgagcctttccctggaggggatcggtgccgtgctgcagagcgacaacgaatacgtgaaggtggtacgcctggtgcccgcaggcccggccgagaaaagcaaacagatcgctcccgccgacaagatcgtcggcgtaggccaggacgacgacgaaatggtcgacgtcattggctggcggctcgacgaggtagtcaagcttatccgcgggcccaaaggctcggttgtgcgcctcgaggtcatccctgccagcaacgcacccaacgatcaaagcagcaaggtggtggccatcactcgcgaggccgtgaagctcgaagaacaggcagccaagaagtcgatactcaacctcgaacaggacggccacagctataagcttggcgttatcgaggtgccggcgttctatctcgatttcaaggccctgcgcgcgggtgacaaggaatacaaaagcaccacccgggacgtcaagaaactgctgacggagctgaagcaggagaaggtcgacggggttgttatcgacctgcgtaacaatggcggtggttcgcttcaggaagccaccgagctgaccggactcttcatagaccagggcccgacggttctggtgcgcaatagcgacggccgcgtcgacgtgcttgccgacgagcatcagggcgcgttttacaagggcccgctgacggtgctggtcaaccgcctgtccgcatcggcctccgagatcttcgccggcgccatgcaggattatcatcgcgcgctgatcgtcggcggccagaccttcggcaaaggcaccgtacagaccgtgcaaccgctcaaccatggtgaactcaaactcaccctggcgaagttttatcgagtctctgggcagagcacacagcatcagggtgtgattccggacgtttcctaccccgctgaagtggataccaaggaaatcggcgagagtgcgctacccgaagcgatgccttgggacagcattcgcgccgccatcaacccaggcgcgaacccgttcaagcctttcctggcagagctcaaggcccgtcacgaggcacgaaccgatcagaaccctgatttcgtctttacccgcgaccgcctcgcattgacccaggaactcacccacgagacgaccatcagtctcaacgaagagaagcgtcgtgcccagcaggagcgtatcgaaaagcgccaactggaactggagaacacgctgcgcaaggccaagggcgaagagccgctggccaaattggaacgcgatgacgaaacgactccgcatctcgaagacgagaagctcaaacccgaggatgacgcctatctcgccgaaagcggtcgaatcttgctcgactacctgggactacaaaaggccgtggcgaaaaaccagtccgccagtcagtagatcccgcatgtcatcaaaatgacatcattgcgtcgtgaaatacgaagggccgccgttttgtgcggcccttcgcacattccacggccatcacgggatcaacatgaccgtcaccgagcagttgagcacgctggacaacatcctcgctcacggcgacatcaccagcctcttccaaccgatcgtatcgctttcacagcgacgtgttctcggctacgaagcgctgacacgcggcccctccaacaccgcgctgcactcccccatcaacctactcgcggctgcccggcatgcaggtcggctcaatgagctggagatgacctgtcgcgaaaacgcgtgccaccgctatagccagcagcagttgcagggaaagctgttcctcaacgtatcgccggaaaccttgctcgatgccacccacagaccgggatataccttggaattgctgcgaaagtaccgtatcccggcggacagggtggtcatcgaactgacggagcaaacgccgaccgacgacttcgagttgctcgatgctgcgttgcgtcattaccgagacatgggcttctcgatcgcactcgacgatctcggcgccggctactcgggtttgcgcatgtggtccgagttgcgccccgattacgtcaagatcgaccgctacttcatcgatggcattcaccgggatgcggtcaagcgtgagttcgtcgaatcgatcatgaagattgcgagggcttcgcgggcgcaggtcatcgccgaaggtatcgagctgagcgaggagctcagggtgctctccgagatgggcatagatctggttcagggatatttgctcggccgtccggaagaagaccccagccccgaggccgctgtgattctgccaagccatggcaaccgcaacgacgcatcgctggaggagcaggcggacctgtccgcgctggtattgaaacagtccgcagtcgccgtctcgcgcccgacgggagacgtcctggagctgttccgtctgcaggcgaatctgaattctgtcgcagtgctcgatgcaaacgacacaccggtgggcatcgttcatcgaagcctgttgtccgacgccttgctcaaacccttcgcaaccgacttgctggcgcgaaaacccatcagcaggctgatgagcgaagacttcctagcggtcgagctgggccagtcgctgcaacaggtcagccgtcttctgaccagccgagcccggcaacgaatcgatgaagatttcattatcaccgtcaatggccgctaccacggtttggggcgggtaatcgacgtactcaagctgatcacggaaatgaagatccaacaggcacgccacgccaatccgctgactctgctaccgggaaacgtaccgatccaacaatgcctctcccgcctgttacgacagggccaggaggctgtgatctgctacgtcgatatcgaccatttcaaaccgttcaacgacctttacggctatgccaagggcgatgagattctgttatgtctggcgcattgcctcgatcagcaggtcgacccgagctgcgacttcgtcggtcacatcggcggtgatgattttttgctggtcatgaagtccacagaatggtcgacgagaatcagcgagctattcgtcgcattcgagcaacgctgccggtcgttctaccgaaatgaccatcttgcagagggttgtttcgttgccgaaggccgacaaggtggccagcagcgctaccctctgctctcgctttcggtgggcgccgtccatctaaagccgggcgccaatgctcagctcgacgcgtcaggcctggccggactcgcctcgcaggccaagcgccgcgccaagcaggaggccgggtacagtctctatacgatcgaagcggagcaatcttcggccgggcttcagagtcctgctctgtccgcgctggccttgtaatactcggcttgctggcgatccggaggcaggccatggccgccggcagcataaagctgagccagacgggttgccgctagcggatgcccagcgtcggcggcgatcttccaccaccgcgccgcctgaataccatccggcccgtgcgtcgcatcctcgctgagactgatgacgcccatctgataggcggccttggcatcgccacgctcggccgccaggcctagcagccgaataccctcccgcctggcgccgtagccttggccgcggaaaagcagaatgtggccgtagaagctctgggccttgggatcaccgatagccgccatgcgggcgaactgaccctccatccagcgccatagcttcggctgttgtacagcccgccggacccccaacagcttgcgcgcgaccccataaccaacccgcgctcgtaccttgagcagcattaaggtgcctccggataatcgaactcaaaaacccgagcgacttcgccagcatgccaggaggcagcagcggtgccgtccgccggaccggagaaccgtccaagccgagcagcacattcgaagaacccggtgcgtggcaatcggctggcaccctgactgatcaccaaagcgctgcgcagtggccgatcggcacgtgcgtccagtgcggccaaatgttccaaggcggcagtcagggtctgcatcgctggcggcggcagctgcaaccgctcgaccaacgcgcggtacgtcaccagatgccgttggcgccgagcgtcgctcaattcatccagcagcgcctgccagtgcgggcgactgatacgaatcgacgaagcagtacctttcaaatctcctgcgcccatccatcgatctccatcgcacgcgccagcgaccggcgtatcgcctcgcccgggtctcggtcaccgctttcgataaggtccagataggaagggctgatacccaccgcgcgtgccaatgcgtccagcgccatgcctcgggcctctcgcatcgcacgcagctcgctgaatctgggtaaagcggccgaggcctccggtgctgtcgtcgctgccggaccttgcccgcacgcgctcagcagcgcctgatactcatcccaaggcagcacggcatattctggtacgccgtcacgcatgatgacctggacactcatccgctaccccgctcgctcgttgttccgtaaaagcgaatcttaacagtccgcaagcagttttttagcgtaagcgcccgcacttaagagtgaatccggcgcaattcgccaaccgccccaaaggattaatccaaaaatcctagctaggactgcgccgtgctggactgacatcgtccgccatgggttcatcagcggagggtaatcgagcaatgcccgcctgcacatcggccgtttggctgtctcgccaggcctggaatgcctgcagttcaccggaccacttgcgcatgacccagcccagcaccgccagatcgtcaacgaaaccgaggccgggaatccaatcgggaatggcgtccattggcgacaggaaatacaacaatccagccaccgcggcgaccagggctggtttgctgatggatcggtactcgccccgccaccaggccacacacagcgcttgcagaacgcctagatcttcccgcaggcctttgagcagcccgccacgagcagagcgcttgcgagcaaccgccaggagcaccacaggtaaccttcccttggcgagcacccgctgcgccataggaaggtatttgaagaacgtccaaggagctttcatcgaaaatcctcccaaagccgcatgacataagcgcttgacgcttatccacagaagctgtggataaccttgtgaacagattctggatgactgctccaaacgcccggccggcgcggcctacaaacagatcgatgggtttttgctcatcgcaaataaacccttttaaatcagcaacttagatatagacagaaattacctgaaagttgatcgccgaatcgctcggttacgcttttgagaatgtgcataaccgtaacatgtcaacgcttttttaaggcaatttcggctttaaaaggactagacaaagccggctgctggttctaataaagacaacagccagccactggccgttcagccgataacgcaggcttcaggtgggcaatttgcgaaccgtaccaacacgccttggcccgtcaggcttgccagcagaaataaaaaaaagccggtcgagcgaccggcttcctggagcgtgattcggctggcttagttcaagctcagtttcgcgcggttcttgtccagagtcgccgcaccgatgcctttgacttccagcagatcatcaaccgagctgaacgggccatgcgcctcacggtacgcgacgatcgccttagccttcgctgcgccgatgcctttcaactcgcgagtcagggtttccgcatcggccgtgttgagattgattgccgtcgattgagccacaacagctttggctggttcaacgggctcggtttttttcgccgcgaaactgcctaccgaaatgcttgtgagcagtgcgaagagtgttgcgcagagaacagacttgatcattttcacatccctttgagtgtcggataagcgacgcggtactccatgcgccgcgagaacactttaagccgcgaggaccacgagtcaaatccgagccaccattctgtgacccactccgcgtcacgccgagaatcagcgcatgacgttgaaaagactcaagccggcgatcttcacgtaactttgttgggcggcttcgagcactacggtctgcattgatagccgagacaaggcttcggcgtaatcgagctcgcgcagctcggcctgaacccccttgttgaccagcgtgacgtcctggttgtcggtctgggtgctctcgatcacgttcagccgcgcaccgatgtttccccgagcctgatcgacgctgaccatgccgtggtcgaggttggtcagggcgacagcgaccgcgtcgcggaccccggcgttgtcagtcgttggatcttccagagacttgcgcaggttggcgatggtgtcgaggatgccctgtttttgctgtatttcgccggatgccgagagtttcggagtgacatttaccacttcaccaccgaccgccgccccgtccaactgtagcgtcacacctcgaaacaccaaggcatcgcttcgggttggtttgtcgtccattttcaagccagcgccgtccgctagcggcgtggctgcgggcacaccgctattgtccagctcatagatgtcgtaggtgccatcggcgttgaattggagctgaacaccattggcaggaaaaccattcgccccggaaaaggcgacttcatcgctaacgactggtgctgaaacagcaagcgtcgaacctgccggaaacgcagcgacgggctggcgttcgaacctcccggcattggtaatgccctcgaaaatggatttaccgttatcgctgatcgggatgctcagggagcttgcgatctgcagtttccgctgcccctcgtcgccctggtagctgtagctgccgtccgctgccctgacaaagggttgggttttgccctggaaacccgcaaagaggtactcgccacgtgcgttgcgggtgttcatcagcgaaagcagctcatcctcacgctcgccaagctccgccgcgatggccttgcggtcctgcggatcaagcgcaccgttgccggcattgaccgccagctctcgcacacgttgcaggacagtgttcaccgagttcagagtgacctcttcctgcgtcaggctgtttttcgcagcggtcaggttcgagtcgtattgggtcaggacgttctgctgctgctccagttgcagcagccgcaccgatgcgaccgggtcgtcggccggcgtaaggatgcgattgcccgtgctgatctgctcctgggtacgcgtggcattggagtagttgcgctggatgccggtcacgccgttattgaatgcttgcaaggtcgagatgcgcatggccgggcctattacctgaaggtgctgatcaatgtatcgaacatggagcgtgcaacttgaatgatctgagccgaagcgttgtagtactgctcgaacttgatcaaattcgccgcttcctcatcgaggttcaccgccgagagcgagtcccggttgtcggtggcctgcttgaggatggcactcgtcgcatcgctgtccattcgcgcctgggccgtcaacgtaccaacccgctcgaccagctcgccgtagccatcggtgaagctgaacccggtacccgcaacggcggagtccacaccgacggtctgtttcgtctgtagatccacgagtttcaatgcattgcggttgtcggagacgccgccctgattgaaggtcaacgaaaagctgtcgctggccttgggccgtccgctagcgctgaaatcgaactggtaggtcgccccagacgcagccgtgtaagccaaccgaacggcattgctcgtaccgctctggagcgtcggcgcctgcggattgccactgccgtcgaccaacggatcgccatttgcgtccacatacgcccatccactgggcagggaagccgcatcggtcagcgtgtagctgccatcggcgttgacggtagctgtgaggctcaacccgctgccgaaggccgccttgagttcatcgaggtcaatcggcgacggcgccgagaccatgtctggctgactgatggcaccggtgccagcgttctgcaggttgttgcgcgcacttgcaaccgcggcgaaggcgagctggtcagcctgatctagggttacgttgatatcagccgcgccacgacgagtcggctgcagggtgaacttgtcgccgacagcaggtagcggactgcccagcgcgatctggaacccctgatcacgcccttgattatcggtgatggtcaacggaccgccgggcgcgccggacacgttcatcacctggctgtcgctgagccgacggatcttgtaatcgaccccatcgtattccatgaggtagtcgctggtggtcagcgcgctggtgttggtgacgttcagaagcggctgtgcattggagctattgcccgcgaacgcagtgaccctgagtttcgccagtgccggggtgttgtagtcaccgaacagtgccttgccgacctgccccttcagatccagcccctgccccaactgggtgttgacctgatcgcttaccgacagcgcaaggcggcccagcgagttcatcgtcgaatccagtacttcgctgcgatagcggatcaacccacccagctcaccgccggtgatctgcgaagtaatgccctgccgcgagctgccactaacaaactggatctcatggcgattgggatcgccctgtccgggaacgacttccagacgactgacggtgctacccactaccagcggctgtccggtacccaccgagatattgaaactgttgtcgtcttgcggcgttacggtgacgccgatataggtcgacagctgacgcaccgcttcatcacgtgcatccagcaggtcgttgggctgctgaccgttggccgatgccgtggcgatggcattgttgaggctaccgatgctgcccgcaaggcggttgatctggtcggtcaccgccgccatctgcttgttggtgaaattgttctgctcgctcagccggtccgccaccgtgttgaagcgacgggcgagcccttcggcttcggccagcaccaactgacgcgccgggatattggctggatcttctgcagccgtctgcatcgcggaaaagaatttctgcaatgacggcgtgatgccggtcgtgctgcctgccagcagggagtcgagctggtcgatctggcttttataggcctgcacgtcactgctcagcgacgtgctgctacgcagctggctggtcaggaactcgctatagctgcgccggatttccaccagcgtcgtgcccgagccgacatagccggcaccgctgaactgcggaacacgggtcgcctgagaggcatcctgccggctgaagcccggcgtgttgacgttgctgatgttgtgaccggtaatggacagctggctcttgctggcgctcagaccggacaggccaatattcagtaagtcagccatgattaacccctagtccgcatggcaggcgccgtaccggcgtcagcaatagtctgataggcctgcaccttgcgggcgatctgattgattttgcgcgcatactgcggatcggtcgcataaccggcccgctgcagctcattgacgaagcgctcggagttgcctgatgcgctggcaacctggatggcgggcttgtagcgctcgttgttttccagcatctgcacgtagtcattgaagctgtgctcgaacgagtcataagcccggaatccggcgacctgcttggtcgccttgccatcgacatactcggtcgtggtgaccttcgccgatgcgccgtcccaacccgtggccttgataccgaacaggttatggctgttggtaccgtccttctgcttgatgatcgacttgccccagccggtctcgagcgcagcttgcgcgacgaggaagcggggctcgacgccaagacgcttggccgccttttccgccattggcagcatggttgcgatgaactcggccggtgagctgaagcgcgtcttgccgggcgcgctcgcgtcaacgccgttgatcgtcagaggcgcatccttgggcgcagcgaaggtggtcgccggtttccagtcgaggttgaccagcggttgcgcctcgcctttcaggttgatctgttcaaccggagctgccggctcgctttgcgcatacgtgcgctcggcaagccgccccggcaaggccaggcggcgctggttgagcaactgaacatcgttgcgggcagggtcgacgggcgcaatcttggcgttggggttagccgaccacttcgcgccctcggtctgtgcgacctgagcaaacggattcggcttttcgctgggcttctgctgcttggccaactggcgaaccaggacatcggcaagcccgatgccaccgccttccttggacaaggtgacggagagctgctggtcgtgcatgtcctggtattgcttgctggcctggctgttgaacggattgtcctgggacatgacctcggtcgccgagcgcatcgacttgagcatctcgttcatgaacagggactcgaattcctgcgcaactttgcgcacgttttcttcgctgtcgcggtccttgcccaccttgagctgattcaaccgattcaggtcggagtagctgccgctatcaggcgtctgccgactcacaccaagacgattttccatgtcttcttcctcagatcacgatcaggtctgcttgcagcgcaccggcctgtttgagcgcttcgaggatggccatcagatcgctgggcgcagccccgacctggttcacggcccgtacgatttcatcaagcgtggttcccggcccgaacttgaacatcggcttggcttcctgttccgccttgaccttggaattgggcacgaccaccgtctgcccgtccgatagcgggttcggctggctcacctgcggatcttcggaaatggttacggtcaggctgccatgcgtcacggccgccggttgcacacgaacgttctggccgataacgatggtgccggtacgcgagttgatgatcaccttggccaccgcctgaccaacgtcgacctcaagattctccagaatcgacaggtagtccacgcgctggctcggatccagcggcgcggtgatgctgatcgaaccaccgtcgagcgcctgggccacgccggggccaagcagctcgttgatgtggtcgacaatgttcttggccgtggtgaaatccggacggttgagattcatcgtcagggtgttgccctggttgaaggcgctcggcactggccgctcgacggtcgctccaccgggaatacggccggccgagggaatattgacggtgatgcgcgaaccgtcggcaccgccggcatcgaagccgccgacgacgaggttgccctgagcgatggcatacacgttgccgtcgatccccttgagcggcgccatcagcaggctgccgccgcgcaggctcttggcgttaccgatcgacgacaccgtgatgtcgatcgtctggcccggcttggcgaacggtggaagttcggcatggatcgacaccgccgcaacgttcttcagctggacgttgccgccggccggaaccttgatgccgaactgcgccatcatgttgttgaaggtctgcacggtaaacggcgtctgcgtggtctggtcgccgctgccattgaggccgaccaccaggccgtaaccgatcagctggttgctgcgcaccccctgaatggtcgcgatgtccttgagccgctcggcctgggccggaacagccgccaggcacaacacggcaaccacgagtgagctgaacagtttcattgcgcgcacctgcttagaacggccacaacgggctgatgaagaagcgatccagccaaccgggctggctggcatcggcgaacgcaccggtgccggaataggtgatacgggcatcggcgatacgggtcgacggcacggtgttgtcggttgcgatatcgtccgaacgcaccagaccggcgatgcgaaccagctcgtcgccggtgttgagcgtcatccacttctcgccgcgaatcgccaggatgccgttgggcagcacgtccgaaacggtcacggtgatcgaaccggacaggctgttgctctgccctgcctgcccggagcctgcggtgtcgcgcgaggcctcgtattcggcgccgagactcatgttgttgccggtcagcggatttgccatcgaaacggcaccgccgaacagcgagccaaggccgatgttggcgttgctgtccttggaaatcttcgagttggagttcttgctcgcttgcgtcttctcgttgagcgtgacggtgatgatgtccccgacccgatacgccttgcgatcgtcgtacagattggtttcgaagccggcctgataaatcgccccgttgttctgcgcagctggcaacggcgtgcgcggcagcacgggcgagtagtacggatcgttgggcttgggcgcaggcgccatgcagccggacaaaatcacggcgggcatcagcggaaggacagacaacaagcggcgcatattcacctcaatccagcggctgacagctattacagctgctgggtaacgaaagacagcatctggtcggccgtggagatgactttcgagttcatctcgtaggcgcgctgcgtggtgatcatgttcaccagctcttcgacgacgctgacgttggagttttccagtgtgttctgcagcacggtacccagtccgttgaggcctggcgtgctgacctgcggcgcgccgctggcagcggtttccaggaacaggttgctgcccattgcctgcaggccggccgggttgacgaagtccgcggtctggatattgccgatgatctgcggcgccgggttgcccagggtggtgacggaaaccgtgccatcctcgcccacggtgaaggtctgggtttctggaggcacgacgatggccggttccagtgcgtagccgttggaggtcacgatctggccgtcagcgttcaagtgaaagctaccgtcgcgtgagtaggacacggtgccgtccggcaacaggacctggaagaagccgcgcccgttgatcgccatgtcgagcggctgctcggtggtctgcaggctaccagcggtgaactgtttctgcgtaccgacgatgcgtacacccgtacccaattgcaggccggacggcagttcgctgtcctggctggattggccgcccggctggcggcggatctggtacagcagatcctgaaactcggcccggtctttcttgaagcccgtagtggatacgttggccaggttgttggaaatggtggtcaggttcatgtcctgcgcggacagacctgtcttgcttacccacagtgctggaagcatgtcgttctcctatggcgccggaatctgggcgcgccgcctagtttgattagctgatctgcaagactcgggccgcagcggcaccatcttcttctgcggtgcgcatcatcttcacgtgaagctcgaattggcgggacagtgcgagcatcgaggtcatctccgcgaccgcattgacgttgctcgcctcgaggaagccggacgtcacgcgcaccgcggcatccgcctcgacgggctggccgtctttcatccggatcagaccgtcggtgcccttctgcagctgtttcgggtccgggttcaccagcttcaggcgatccactgtcaccacgacgttcggatcttcacccagcgcgcgaatgctgatcgacccgtcggcaccgatctcgaccttctcttccggcggcacggcaatcggcccggcgttgccgagtaccggcaaaccgtcgccggttctgagcatgccgagcgtatcgatgttcaggctgcccgtacgggcataggcttcgctgccatcaggggcctgtacggcgatccaaccgtcaccctcgacggcgacgtccaggtcccgccctgtttcctgcaaagtcccggagctgaagtcggtaccggggcgctcactcatggcatagacacgcgccggaaagctgtcgccgaagacctgcatcgagcgcgcctgctcaaagtcgcgacggaagcccgtagtcgagatgtttgccaggttgttggcatgtgcctgctgggcacgagagttttggctcgcccccgtcattgccacatagagcatcttgtccatggaacctccgtaacacacaaattgacgcaaactggatcgttacagagcagttcagcaagacgcatgccaaacgaagaaggcgaagataagtcattgattagatgaggatttatttcaataaaaaaggccccgaagggcctgcaaaacctggggcggcaatttcccgccgcctcgctgcgattgacgtcgtttatcgcagattgatgatcgtctgggtaatggcgctctcggtttcgatggtcttggcgttcgcctggtagttgcgctgcgccacgatgaggttcaccagctgatcggaaagctcgacgttagagtcttcaagcgctccggcctgcagcgaacccagggtaccgctgccaggcgggttgcgcaccggctcgcccgattcgaacgactggacccactgcgtcttgccgaccggcgtcaggccctggacgttggcaaagttggccagaatgatctgcccctgcaccttggattggccgttggtgtaccgagcgaagatctcacctgattcgctgatctcaagaccggccagttcgccagtggtgtaaccgtcctgagcgacgctgttaacggcaaaggcgctggcgtattgagtcgaaccacgcatgtcgaccgagacgtccaacccggcggcgggcgcagcgttgttcaacgaccagctaccatcggtgttgtggacggcaggctgccaaccagcgatcgccgtgctgccgctcgcaggcgtcagcaaactgccagacggactgaactcgagcgtggtcgtgttaggtgccgtgctattgaccggatccgaagggttacgtccgtcgataagcacgttcatctgccaggtgttggccgtgccgctcttgacgaaatattgcgtcatgacgtgggcattaccctgctcgtcatagatattggtcgaggtcgacgagttgtaactcaatggatcagccggatcgaacggggtattgatcggctgggtattggtcgagttgaggttgaaaccctgtgtgaccttggtcgtggccttgggctcctggctggccgtctggatcttcagatcgctgacctgccccgtctggatattgccgttggcgtcgaccgaatagccctgcaggtggtaaccgaagttgtcgaccagattgccttgcttgtcggtaccgaaatagcccgcacgggtgtagctcagcgcgccgttgttgctgacctggaaaaaaccgttgccgttgatcgccaaatccagcgcgttctgcgtgtagttgatgttgccctggttgaactgctgcgacacgttcgccagcagcacgccacttccctgcgggttcttgccggtgccgagcacggatgaggcgtacacgtcggcaaactctgcccgtgattgcttgaaccctgccgttccggcgttggcaatgttgttacccgtgacgttgaggtctttgctggcggcacgcatgccgctgaggccgatattgaacgacatgaattgctcctgttaccggatcggaccggcggttactgaccgatgacctggacttgcgacagcgcgatgctgccgaccccggccaggttgagcatcagctcaccgccgttctgtccgagagtgacgctgtctacgttggcgggcagcagggtgtataggcccttggtctcgccttggtaggtggcttgtgcttcaaacttgtacgtaccaggcggcaaggtcttgccgctcgagtccttgccgtcccacatgaacgagacgttgccagcctcctgctgacccatgttgatccggttgacgacggtgccggcgctgtcatagacgttgaccgagacattgctgctggaagtgggcaaaaccaggctggccttgaacgtctcactggtatccacaaccgccttgtcgctcggcacgatgaccttgcgacccaccagggaagacgcctgcagggcctgggacgactgatacccggacagcatcgtctccatgctcgaattcagcttctctacgccttcgacggtgctgaactgcgccagctgagcgatgaactcgccgttttcctgtggctcgagcgggttctggttattcaactgggtgaccagcaattcgagaaactcgtttttgcccagatccttgctcttcgcttcgcgatccttgatctggtactggtcgagtaccgaaccggtaccgccgacgctgcctgtcgtgctcatggctatctctcgttagggttactgaccgagggtcagaactttctgcagcatggtcttggctgtgttcatcagctcagcgttggtctgaaacgaacggctggcggaaatcatgtcggccatctcttcgacgacattgacgttcgggtaatagacgtagccttcggcgttcgccgcaggatgattcggctcgtaacgcgcctgcagctcgctctgatcctcgactacgcccagtacctgaacaccaacgcccgcctggccctgttcggcgaacagcgactgatcaggttgcccattggcctgctgcaacatggtcgcgaacacgggatgacgggcacgataggtctggtcgacgctggacgacaccgtctcggcgttggcgatgttgctggaaatggtgttcagacgagtgctctgcgcgctcatgccgctgccggcaatattgaatacgtttccaagggacatagtggtcgctcctgttaatcgccacgcagggcgcccatcaggcccctgaacttactgttgagcaaggtgaagcttgcctggaaatcaatggcattctcggcgtaggcggcttgctcgacctgcgcgtcgacggtgttctgatccagcgatgcatgtgcaggcgtacgaaagcgcaacccgggatcggcaatctccatcccttcggcagcgatgtgcttgctactggtcagcgccacaccgaattcgccgcggttcttgctgctctgggcggcaagcacggaactgaaatcgaggtcacgcgctttgtagttgggcgtgtcggcgttagcgatgttgttggccagcacctcggcacgctgggcgcggaaaccgagagctttctcgtgaataccgagcgctttgtcgaaactgatgctcatgatctggacctctgccggatacaagtctgcttggcaaagcatgagcaaacaccgtgccatttaagcaaggtgctgatatataggcgtttttactgatcagaacgatcgagaggcgtcaaaagcggcaatgcttttcccttttgctttgccgctctggaccggtcaccgacagaattctgccgcgcccggcctggagctggtcactttgctttgtagataatgcccgggctgcattgcaccatctggtagagctcaggaaggccgttcagcgcctccgatgcgccgagaaacagataccccccgggcttcagcgtggcgtgaatacgcttgaggatgtccttctttacgtccgcggaaaaatagatcagcacgttccggcagaacaccacgtcgaacttgcccagcacggcgtagctatctagcaagttctgtacgcgaaactcgacacgactacggatgcccggcttgaccacccaacgcccgggcgtcttggcatcgaaatagcgctgcaggcgatcgctcgacagcccgcgcgcgatcgccaggctgtcgtactcggccgccttgctcgccgccagcatcgcgccggacagctcagtggcgacaatttgcacagccggctttggctggctgggactgtttcgctcgtactcgtcgatagtcatcgacagcgaataaggctcctgccccgaagagcaggccgccgaccagatacgcagtcgctgcccgaccgctgacttgagcagctccggcaggacccggttcttcatcacctcgaacggataggtatcacgaaaccagagcgtttcgttggtcgtcatcgcatcgacgacctgctccctgaggccgctgcgaggctgtgcctggatctttctgaccaggtcgcccagggtcttgagaccctgctgctccatcaacttgttcagcctgctcgacacgagatattgcttgttgttgcccagcaatatgccgcaggttttctcgaggaacactcggaactgatcgaaatccggatcgcctgacactaataatgcccaccagtcgtattgagaggacgaggcctcattttttatccgttgtccggattcgctctatcacgcggttggccagatcgtcggcctgaaactttgcaagaaaatcgtccgcaccgacacgcttgaccatgctctggttgaacacgccggagagggaagtatgcagcagaatgtgcatgtcacgcatgacgggatcctgacgcacttcggttgttaatgtatagccatccatttccggcatctcgatgtcggaaatcatcatgacgaactccttggatggcgttttaccttccgccaccaggccgcgcagataattcagcgcctggcgcccatcgttctgggcgaccacttcgatccccagattctgtagacaacgaataatctgctttcgcgcgacggacgagtcgtcgacgatcagtacgcgactggtggaggccttgctgctggtctcttcatcggcaataccgaccgagagctgctcggatacaggcgcgacctcggccagcaccttctcgacgtcgatgatctccaccatctgtccgtccacgtgagtcacggcagtcaggtagtgatcatgcccgacacccttgggcggcggcagaatggcctcccagttcatattgacgatccgctccaccgagcgtactagaaacccgagtaccttggtgttgtactccacgatgatggcgaagctgttcggcaggtcgccaagtgcttgtttgcccgtggcgagcgaaagatccaggatcgaaagcgtattgccgcggatattcgcaacaccacgaaccaccggactggaccgaggcatgacggtcaatcgagggcactgcaacacctccttgaccttgaatacgttgatgccgtagagctgcttcccgtccaaccggaacaacagcagttccaaacgattctgtcccaccagctgtgtgcgctggttaaccgaatccaatataccggccatgccagtttcctctcgcttgcgaaatggtagtcggatcatgaaaccggcctgacggcacgcgccttgcttgggccatgacatgagcgaacaaatgacttatttccggcatccctgcaaggcgatctgccatgcgatccttttaccggccttgtgtgggctgagcccgtttgctgactcggcaggcgtgacacgacctgaacagcttatcgacgcgacccgcgactttcttgagcgcgaggtggatgactatttgcagcgtagccaaatcgaggcccgctacgaaatcgaggtcaaccggctcgatccccgcctgcgtctggcgtcctgtgacgagccgctttcggccaagctggaaagcccggcgcagccagtcggtcgcgcaaccatccgggtcagttgcgaagggtcctcgccctggtccgttttcgtacctgcacagattcatttgttccgcgaggtcatcgtcgcccggcgcccgctggctcgtgaaagcgtcatcaagcaggccgatgtcaccctcgccgaacgcgatgtgggcttgctgaaccaagggtatatgaccgcgtacgatcaagtgctgggcaacaaggtgactcgcagcgccctacccgaccaggtgttaccgccgacatacatctccgcggccgaagtggtacgcaaaggggatcaagtcgtaatcagcgcgaaaaattccacgataaatgtgagaatgcccggcgaagccttgtccgatggcgcactcggcagccagatccgggtcaaaaaccaacgatccgggcggacgatcaaggcccgggtcacggggcccggccaggtggaagtcgcgatgtaagcgcatggaacgcgacaacgcagccatcggccgaaaaaaagctaaagttttctatggatttgccgaaaagcaggcaagcgtcctgacttattcgaggtttcgatcatggctatcgatttcaatcggcccaacagcgccgtcaattcacccagtaatgggcgcagcagcagcgtccagaacaccgaacgcccgaccgctcaacaagcgcctgcggacaccacgaagagcaccaacagcgcagcggtagctggcgaaagcgtccagctcagcccgcaggcgcagcgcttgcagcaaacggcacagcagctgagccgtgaacctgcggtcgaccaagagcgcgtggcgcagatcaaacaggccattgctgacggcagctaccaagtagacagccagcgcgtggcgtccaagctactcgcttttgaaaaccaacgctgattctttgccaacggatgtgtagccaggcgtcggcgcgttagaggccactatgcaagatactgaagtgcttcggcagctcactgacgatatcggcattgccgagaagcttcttgagctcaccaatgccgaataccaggcgctcgctgagcgtaacctcgccgagcttgaacaactgctcactcagaaacagacgctgctagcgttgctcggccagcacggcactctgcgcagccagacacttgcgaatgctcagttgagtgccgaccggaatggtttggcggtatttgccgcgcgctcatcgcaaggcgaacaaattcttgcccgagcagatcagctagacgaacttctcgaggcctgccgaagcgccaacgagcgtaacggaaagctcattcgcgccaatcagagcgccgtcggaagcatgttgcgcgtattgcagggaagtaatcagactcccgatctctacgaccgcaaaggcgcggccgccagaaccgccagccaccgcccactcagccaggcctgaggcgtacgcggccagtgacatcaaaatgctatcatgcggttgacgtcgttatatgccggagagcagagataagtgtccagtcgctttgctgaagatgaaggcccgcagcctccccagaccctgaagaccgcagcggaagtcctggcgaacctgcgcgttctgctggacaaccacattccgctcgtggtgcgctttaccgagcgcaaccagcgataccaaacctacctggtcgagataaaccgcgagaaaggctggatcgcgctagacgaactcatccccaccgacggtgagcgattcatggcgtccggcgaatcctttcagatcgaaggctattacgaaggcgtgcgcatcgcctggaagaacagccaccccgtgcacctgggcgaactggacgatgcgcgctgctattgggccccactgcccgaccagatcctctaccatcaacgccgcaacgcttatcgcgcccagctgataggccagactgttgccgtcgaactcggcggaaagacaatcaggcagcccctcgagggcaaagtgctggatatgtccgccaccggttgcaagctcagctttcaaggcgacgtacaaagcggcttgcaagcaggccgggtttacgagcagctatcggcaaaactgccgttcggcaccatcacaaccgcagccgaactgcggcacgttatcttcgacgaaaagctcgacacgacattttgcggcatgcggtttcaccgcatcagcggactgacgcagcggcagatcgaacgattcgtttatcagctgcagcgtgaagcacgacgagaccaggcaagcgatcgtttcagctgacgcacattgcaatggcaagcgggaccattgcgctatcccctctcatcgcccggcaagctcgccgaaacgcgaaaactcttttagagggctcgcctggccgtgcgccagtagtaggttcgactggtcatgcagagaaagaactggcgtcccaggcgaggttcgaactcacaaccttccccttaggagggggatgctctatccaattgagctactgggacaaatcaggcggcagcatgttaacgaggcttggcctgtttgtcatgccgcttcggtctatgggactgcacatccagaccacacgacacgcaacagcctttgcattttgcacgacaactaaataggccatcaggcaaagcgcacgaacgctccgcacctaagcgacataactcattgatttttaagggtttttcaccaatcaaaagctggcatgacgaatgcttaagtctcccgacaaccatgcgaaggagacgctcatgttacgcccagcctacctgttcagcaccgtggccctcgccgcaatagcctcacagctgccggacgacatgattgccacaacctcccccgctgcgctgtcagcgccttcccaacaggtcgtggttcaaccgctgcaggttcgagcgcagaccatcagtggcgaagtaagcagaccagcacaatccaaacgctgggtattttgacaccgagcgtagtgaccgtactttctagcggaggaaaacatgtctatctatggttacctgttcgtgatgctgagcgctgcctgcggcgttctgagtttcggtacgaatctgacggaaacatgggaagcggccgccaagtgcggagcagcactattcgggattcttttcctggtctcgctggtgctaggtcggcggataaaattcgaccctatccttcgctgagcgcgatttttcaggtgaagatcggcggcagttcacagtaaaggctatttgccaccacgcaatgctttactcggtcttttatcgccgtataattggcgccattaagccgtctggtatctttttcacgggtcgtggaacagcatgtgctgtttggtgtctgaccggtgactagaacggcaataagccaccatcgcccacctgactaaccggtttaatatgcgccctatgaagcaggcagtttactccagccgcacggctgacaaattcgtggttcggctaccagacggaatgcgtgagcgtatcgccgaggttgcgcgcaatcaccatcgcagcatgaactcggaaatcattgctcgcctggagcagagcctgcttcaggaaggtgcgctcgatgacgattcgaccatgcgcctggatagcccggaactgacgctgcacgagcgtgaattgctgcagcgcttccgtcagcttgcgcaccgccagcagaatgcgctgatcgcgctgatcgcgcaggatacggaagctgcaaaagaagaagactgacgcctgcccgagcgcttgctgacagcaccaacgcctcgacctagtcggggcgttcgtcgttaaccgggctgtgtgaacacgcctgcagacctagcgcccccaaggcgccctcgcaaccctaaccgcggctacgatgcctgcgcttctcggcgcaggcctgcacccttcggctggttccgcaacgcgcttagccaacgaaactcagcaaaatcccggcggcgaccgctgagccgatcaccccggccacgttcggccccattgcatgcatgagcaggaaattatgcggattggcctctaaaccaaccttgttcgaaacgcgggccgccatgggcacggccgatacgcccgccgatccaatcaagggattgatcttgttcgagctgaacatgttcatcaccttcgccatgagcacacctgcagcggtaccgcagcagaaggcgaccatgcccagcaaaaggatacccagcgtcttcagctgcagaaacgcctctgccgatagcttcgagccgacggtaagacccagcgcgatggtgacgatattgatcagcgcattgcgcgaagtgtcggccaaacgatctaccacaccgcactcacgcagcagattgccaaaggcaaacatgccaaccaagggggctgcgtccggcaatagcatgccaatcatcagagcgagcatgagcgggaatacgattttttccgcttggctcacatggcgcagctgagtcatgacgatggcgcgttcttctttggtcgtcagggcacgcatgattggcggctgaatcagcggaaccaacgccatgtacgagtacgctgccacggcgatgggaccgagcagatgcggcgcaagctttgcggtcacgaagatggacgtcgggccgtcggcaccaccgatgattgcgatcgaagccgcctcgcgcaacgtgaattccattccaggaatccccatcgcggccagccccaaagctccgagcaaggtggcgaaaataccgaattgcgccgcagcgccgagcaacaacgtcttcgggttggccagcatcggaccgaaatccgtcatggcgcccacgcccatgaaaatcagcagcgggaacacgctggttggcaagccgacttcgtagaacaggtgcaggatgccagccccctccgccatgttggctacgggaatgttggccagcagaccaccgaacccgatcgggatcagcagcaagggttcgaaccctttgcgaatggccaggaagatgagcgccagacacaccacgatcatgaacaactgaccgagctcgagatgatacaaacccgtgctctgccagagcttgagcaacttatccatgccgctctccttaagcgatggtcagcaggctgtcgcccaccgacaccgcatcaccgaccttgacacccaccgccgatacggtgcctgccttaaatgcacggatttcggtttccatcttcatcgcttcgagaatgataaccagatcaccctcctgcacgagctgaccaggctgcacgagcactttgaagatgttgcccgccagcggcgccggttgtgactcgcccgtaccggcggccggcgtggcaaccgcatccgacgcagcgccgaccggcttgagtccttctatatccccaccctcgttgacctgcacgacaaacgacttgccgtttacctcgacggtgtagatctcggcagcacccggctcgcggggcgccggcgcatcaccgctcgggaccggctcgaaggcatcgggattgccgcgattctccagaaacttgagcccaatctggggaaacagggcgtaggtcaggacatcatcgatctcgtcctgggccagtttgatatttttctcctgtgccagccctttcagctcgaccgtcagtttgtccaactccggctgcaggagatcggcggggcgacaggtgatgacgctggcaccatcgagcacgcgctgctggagctcagcattgaagggtgccggcgcggagccatactcacccttgagaatgccggcggtttccttggtgatcgatttgtaccgctccccggtaaggacgttgatcaccgcttgagtaccgacaatctgcgaggtcggggttaccagcgggatgaagccaaggtcttctcggacacgagggatttcggccagtacctgatcgaacttgtcgagggcgccctgctccttcagttgggcttccatattggtcagcatgccgcctggcacctgcgccaccaggatgcgcgaatcgacccccttcagcgtcccttcgaacttcgcgtatttcatgcgcacctcgcggaaatacgctgcgacttcttccagcagctctaaatcgagtccggtgtcgcgctctgtgccttggaaaatcgccactaccgattcggtcggcgagtgaccataggtcatcgacagcgacgaaatggcggtgtcgacattatcgatgcccgcctcgaccgccttgagaatggctgctgtggaaaggcccgccgtggcatgacactgcatatgcacggggatcgacaggctcgctttaagacgtgagaccagctcgtacgcccgataaggcgtcaggatgccggccatatccttgatcgccaccgagtcggcacccatgtcttcgatctgcttggccagatcgacccacatatccaggctatgtacggggctcgtcgtgtaggagatggtgccctgggcatgcttgccctggcgtttgacggcacgcagcgcggtttccaggttgcgcggatcattcatcgcatcgaacacccggaacacatcaactccgttgatggcggcgcgctcgacgaacttctcgaccacgtcatcggcatagtgccggtagcccaacaggttctggccgcgcagcaacatttgctggcgggtattgggcatcgctttcttcagttcgcggatgcgctcccatgggtcttcaccaagatagcgaatgcacgcatcgaaggtcgcgccaccccaggattcgaccgaccagaagcctacccgatcgagttttccggcgatcggcaacatgtcctcgagacggacgcgggtagcaagaatggattgatgcgcatcacgaagcaccacatcggtaatgccgagcggctgttttgctgaagtcatgaggaggaactccctgttctatcaaccgcgacgcgcgcggtgctgatgaattgcagcctgaatggctgcgaataggtcggcatccatgtcagccgtggcggtagcagtggaaggcgttacggtggcagggggcgtcgaaccgctgtcgaagcgaccgatcaagaaggacatcaggcgaatgcaaacaatcaacaaaacgaggaagacgaagacggaacctaggccgaacagcataagttcgacgccttcgagcagaagttcgctgggagtcatcgcaattccttttctttcagcagctcgggccgcctgttatttgcaccggttcagggcttcgccagagcgaaacccgcgaacagtagcccgaatgcgcggcgcaaggcaaacgccaagcagccgcagcctgagggggtcagagcaggaaaagcgtcgccaatcccaggaaaatgaagaatcctccactgtcggtcacggccgtgatcatgacgctggagcccagcgcaggatcccgccccattcgcgccagcgtcaccgggatcaacacgcccatcagggccgccagcagcaggttcagcgtcattgcagcggtcatcacgatgcctaacgaccagctgccatacagccagtacaccacgatgccgatcacgcccccccatatcaggccattgagcatgccgacgcccgcctccttgcgtagcagacgggaactattgccggtgccgagctgatccagcgccattgcccgaacaatcatggtgatggtctggttacccgaattaccgccgatacccgcgacaatcggcatcaacgcggccagcgccaccagcttctcgatcgatccgtcgaacagaccaatcactcgggaggcgataaaagccgtgacgaggttgacggccagccaggcccaacggttgcgcagtgacttccagaccgacgcgaagatatcttcttcctcgcgcaaaccagccatgttgagtacttcgctctcgctttcctcgcggatcaggtcgaccatctcatcgatggtcagtcgcccgatgagcttgccgcttttatccaccaccggggtcgaaaccaggtcgtagcgctcgaaggcctgcgccgcctcgtaggcgtcctcgtccgggtggaaggtgacagggtcgctggccatcacctcggagacatgccgttccggatcgttgaccagcaagcgcttgatcggcagtacgcccttgagcacgccgtcgtagtcgacaacaaacagcttgtcggtatgccccggtaattctttcaggcgccgcaggtagcgcaacacaacctcgagactcacatcctcgcggatcgtgaccatctcgaaatccatcagtgcgccgacctgatcctcctcgtacgacagcgccgagcgaacacgctcacgctgctgcgcatcgagggtctccatcagttcgtgaacgacgtcgcggggaagctcggcagcaagatcagcgagctcgtcggcgtccatttccttggcggcggcaagcagctcgtgatcgtccatatcggcgatcagggtttcgcgaacggcgtcggagacttccagcagaatgtcgccgtcgcggtctgacttgaccaactgccagaccgtcaggcgatcgtcgagcggcaaggcttcgagaatatgagcgatatccgcggggtggagcgcctcgagcttgcgctgcagttcgacaaggttctggcgatgcaccagattgtcgattatttcctgctgctggccttcctgcgcttgccgatgcgccagatcctccacgagcctgtggcgctgaagcaaatctacgacttgcgccagacgctcctggagactttcctgcggcttctttgcttctacttcagtcatggcgcactccaccccagcggtcggcgcgcgccaggggatcaatcattcgatacgtgattggcaaacgaaagttttgttcgactactgggcaaatccatgaatgggatccacaagccctgagggcggatcacgcgataataccaccgcagccgctgagccaacccatgaaatgcagctaatacaactgcttgcgccactgccacgatgaaaccgcggcttcattgtcgacgcattcacgttacgagaagacacggctgcgggctaagaaaatcttggctaggctgcttcgaccattcgtcaaggaggacgaccatgaacaagctactcattgcgagcagctgcgccctgctgctcaccgccactccgacattcgccgcaagcgtctatcgctgcactgacgaaaccggcaacgtcagcttcacccgacaggggtgcccgccaaatcacacagcgcttaaccaggacgtgacgaatccgacgccgagctccaaccgcgtaatccctctggccaggccaagagagcgaggtacacgcaagagcgcggctacagagctcactgttgtaggggtgcaagacgatggctgcggcaaccacctcaccggcagcgccaaacgcaatgccatggtgcggcagcagattctcccgggaatgacccgcgccgatatcgaaagcacttttggaacgcccgatgccgtcaccagcctcaacggacagatgcagtatcgctacagcaccgacaagggcaggacgcgaaccatcagtttcgatgagcacggttgcgttcgcggaaagcgctgaattgatgaacgaaaaaagggcctgcatcgctgcaggccctttttggtttggcgcactcaggaggattcgaacctccgaccgctcggttcgtagccgagtactctatccagctgagctatgagtgcatatggcgcttgataaaccagatcaccgctggttacagccacgaatcacctttcgacgactcgcttaaaatggcgcactcaggaggattcgaacctccgaccgctcggttcgtagccgagtactctatccagctgagctatgagtgcactgagggtgcgcattataagtttgtgaatttgccggtcaagctctttaattcagtgaatctcacaaaccaaagcgctgaaaccaaccacaaccttaactatgcaaaatggcggagagggggggattcgaacccccgacacccttttgagatgtactcccttagcaggggagcgccttcggccactcggccacctctccgcaacacggggcgcatgatacccatcttcgccccgcttgcaaagccaaaaatcacataaatattaatggcttggttcttgatctttttctttctggatccgttgatagatctcctcacggtgcacagctacctctttgggagcattcaccccaatgcgcacttgatttcctttgacacccagcacggtgacagtcacatcgtcacccaccatcagggtctctccgacccggcgagtcagaatcagcattcctttctccttaaaaacggattcatttcagtaaacagtctgcaaagataaaaacggataatgctccgtgaaacatcggccctagagcctttcaccagctattgaccagtaagaacgactctaaagttcctttttcttacatctaaaacgacggaaggcgcgaatagctcgcaaatccgctgatcactcgcccttgccggcgggagcatccagctcaaaagccgtatgcagagcccttaccgccagctccagatacttctcctcgatcaccaccgaaaccttgatttcggaagtggagatcatctgaatgttgatgttttccttcgccagcgcctcgaacatccggctggcgacaccggcatgcgagcgcatgccaacgccaactatagacaccttggcgatgtccacatcaccaatgacttccctggctcccatgtcgcgggcgatgccctccagaacctgcaacgcgttatggtagtcgttccggtggacagtgaaggtgaaatccgtggtgttatcgtgcgcaacgttctgcacgatcatatcgacctcgacattcgccgcactgatcgggccgagaatcttgaaggccaccccgggcgtatccggcacaccacgaatggtcagcttggcttcgtcacgattgaaagcgatgccggaaatgatgggctgttccatggattcctcttcatcaagggtaatgagggttccaggaccctcttgaaaactgtgcagcacgcgcaaaggcacgctgtatttgccggcgaactccacggcacgaatctgcagcaccttggagccgagactcgccatctcgagcatttcctcaaaggtgatcttgtccagccgctgagccttggccaccacccgaggatcggtcgtgtacacgccgtcgacgtcggtatagatctggcattcatcggccttcagcgcagcggctagcgccacgccagtggtgtccgagccgccacggccgagcgtggtgatgttgccggccgcatccacaccctggaaacccgcgaccacgaccacgcggccagccttgagctccttgtggatctgctgcgagtcgatctggaggatgcgcgccttggtgtgagcactgtcggtgagaatgcgaacctgactgccggtataagacaccgccggcacgccgatcttggtgagcgccatcgccagcagcgcgatggtgacctgctcgccggtcgaaaccatcacgtccagctcacgcgccagcggctgctcgctgatctgcttggccaggtcgatgagtcgattggtttcaccgctcatggccgaaaccacgacgacgatgtcatcgcccttgtcccggaatttcttgaccttcgccgccacctgttcgatgcgctcgacggagcccaccgaggtacctccaaacttctgtacgatcaaagccatctcatagccgcctaagcccgtcacgggcgctcattaaacaaacaacccaagcaccatgcctggaccgagcaggcgaactgcccggcccggggtgcctcatcgatacgcctgccacccgggggcgaagactgagcggcctgtcgccgtctcgttacgcgcgctgctcgacgaacgccgcaacaagggccagcgcctcgtcgagtcgcccgacgtcagtgccgccgccctgggccatgtccggacgaccgccgcccttgccacccaccaccgcagccgcttgtttcatcagatcaccggctttgaaacgtgcactgatatcctgtgtcacgccggataccagcacgaccttttcgtccagcacgccaccgagcaggatcacgccactgccgagcttgttcttcagctgatcgaccagtgcgagcaacgccttgccgtccagcccgtccacacgagccgacagcgtgttcacgcccttcacctcgacagcggagccagccagatcgttgccggcagcgctggccgccttggccttgagctgctcgagctccttttccagctggcgattgcgctccagcaccgctcccagcttgtccaacaggttgtcacgactgcccttgaccagcgcagccgcttccttcaactgattctcggcattgttcagataggccaacgcctgctcgccggtaaccgcctcgatacgtcgtacgcctgccgccacgccaccttcgctgacgatcttgaacagaccgatatcaccggtccgattgacgtgggtcccgccgcagagttcgaccgagaagccgtcgcccatggttagcacacgcacccgctcaccgtacttctcgccgaacagggccatcgcgcccttgctcttggccgtttcgatgtcggtttcctcgatacccaccgccgagttgcggcgtatctcggcgttgaccctgtcctccaacgccttcagctgctcgggcttgatcgcctcgaaatggctgaaatcgaaacgcagtcgctgactgtcgaccagcgagcctttctgagcgacatgctcgccgaggatctgccgcagagccgcgtgcagcaggtgcgtcgcggagtggttcagcgccgtcgcctgacgaaccgacgcatcgacgatcgcttcgacggcggtgccgacttccagattgccgctatcgaggatgccgtgatgcagaaacgcgccaccagccttgctggtgtcacgaacatcgaagcgcaggccttcggcggacaggtaaccgcaatcgccgatctgcccgccggattcggcatagaacggcgtctcgtcgagcacgactacgccttcctcgccggcggacaggttctgcactgccatgccttccttgaacagcgccagcaccttgccgcgcccggaagtcccgaggtagccggtaaagcgtgtgtcaccctctactttgaccaggctgttgtagtccatgccgaaggcactggccgaacgggcccgctcacgctgagcctccatctcgcgctcgaagccctcttcatccagggtcagttcgcgctcgcgagcgatgtcacccgtgagatcgatgggaaacccgtaggtgtcgtacagcttgaagatcacctcgccaggaatgacgctgccgctcaattcggccaggtcctgctcgaggatcttcagcccctgctcgagggtcttggcgaactgctcttcctcggtcttcagcacacgctcgatatgcgcctgctgggtacgcagttcggggaaggcatcgcccatctcggccaccagagcggctacgatccggtggaagaaactgcccttcgcgcccagcttgttaccgtgccggcaggcacggcgaatgatacggcgcagcacgtagccacgcccttcgttcgacggcgtcacgccatcggcaatcaggaaaccgcaggagcggatgtgatcggcaacgaccttgagcgaggcctggccgttattgctgcagccgattgcctgcgccgatgcattgagcaggctctggaacagatcgatctcgtagttcgaattcacatgttgcagtaccgcactgatgcgctccaggcccatgccggtatccacgctcggcgcaggcaggggatgcatcacgccgtccgcggtgcggttgaactgcatgaagacgttgttccagatttcgatatagcgatcaccatcttcctctggcgaaccgggtgggccgccccagatgtgatcgccgtggtcgaagaaaatctcggtgcaaggcccgcaggggccggtgtcacccattgcccagaaattatccgaggcatagggcgcgcccttgttgtcgccgatgcgcaccatgcgttcggcgggcacaccgacttccttggtccagatgtcataggcctcgtcatcactggcgtagacggtgacccagagcttctccttgggcaggttcagccacttctcggaagtcaggaactcccaggcgtagctgatcgcgtcacgcttgaaatagtcgccgaagctgaagttgccgagcatctcgaagaaggtatggtgccgcgccgtgtagccaacgttctccaggtcattgtgcttgccaccggcacgcacgcacttctggctggtggcggcgcgggtgtaggcgcgcttttccaggcccaggaagcagtccttgaactggttcatgccggcgttggtgaacaacagcgtcgggtcgttcgccgggatcagcgaactggaggccacacgcgtgtggcccttctcttcgaagaagcggaggaaggcttcacggatttctgcgcttttcatagattttcttccagaagacagcggccgagcggctgcaaagcggcacggcaggacgcaccgggcgccggttcgcagctatccaaacggatagccggcaaagggccgcattatatcggccctgcgccgcgcgcatagtggataaataagattgaatcaagctattcgacagcgattcgaacctatgtcctggcgaaggccgcgaagcgctccaggatcgtctcgacatgctcgggcagcacgtccagatgggtcacgattctcaaccgtggcgcggcggtgagcagaataccgcgctcggcgcagaacgccttcagcgaggccgcgcggtcaccgatctgcacgtagaccatattcgtctgcacgggctcgaccacataccccaaagcctccagcccttccgcgatcgcacgggcgcgctggtgatcttccgccaaccgcgccacgtggtgctccagcgcgtacagcccggccgccgccagcacgccggcctggcgcatgccaccgccgaccatcttgcgcagccgccgcgctcgattgatgaatgacgggtcaccacaaaggaccgacccaacgggcgcacccagccctttggacagacataccgataccgaatcgaagtgacggccgatggcctctgcgctacagcccagcttcaccgcggcattgaacaggcgcgcaccgtcgagatgcagcgccaggccgcgctcacgggtgaacgcccgggccctcgccaggtagtcgagcggcaggacctttccctgcatggtgttttccagcgccagcaagcgtgtgcgggcgaaatggaagtcgtccggcttgatcgctgcggcaacgcgctccagatcgagcgagccgtcagcctccatttctaccggctgcggttggatcgagcccaatatggcaccgccaccgccttcgtacttgtagatgtgcgccagctggccagcgatgtattcgtcgccgcgcgcgcaatgcgccatcagcgccagcagattgctcatggtgccgctgggcacgaacaatccggcctgcaatcccagccgtgcagccaccgcctgctccagctggcggaccgtcgggtcttcaccgtagacatcgtcaccggtaggcgcactcagcatcgcgtcgcgcatgccggcggtgggctgggtgaccgtatcgctacgaaggtcgatgagcgtcatgaagactccttgcttggggcggcttacgcaacgcgcatcggcgccaataacggcatctagcgcagcaggcgggtatccagcactttcgacccaccgcccagcaaggtctcgctgatgtcgatgaagtctttcgttgtcaccttgtccaggcgcatcaggccgcgcgccacgtcatccagcgaatgacgactcttgctgcgctggcggatctcacggtcgagttcctgcagcaacagcaccgccctggccgtgacgggcccgctggaatgctctgtgcgcaggctgtcgaccttgcggctccatttggtcagatgctcgcgaacccgttgatagcgatcctcgctcatgccgccggcacgacgcatgagctcgatggcgtagtactcggccaagccttcgctgatccagtcgctgcgatcggcgtcgctgattcggctgaacacatgaaccaattcatggaccagcgagctggtgccattctcgctgaccaaaggacggtcggcatgcatgaagaacgagtttgggccggacaggccgcctcgccacattggatcgcccgcaccgacaaccagcagcttcttggggtcgcgcggaaacacgttctgcacttcaggccagacaaaggtcagcaacgtgagaatgtccattcgccgcagcccttcgcctaccggccctgcgacggtcacatccgtctcgcccagtttggcccgacggctgccaagactgccggccagaatccagccggtcggacgatcgaagaggcgttcggggttatcgatgcgaaagcggttcttaccgatacgtggccagcccgtctcgacccctttccagcccgccggcagctcgacgctgagtcgcgaaaccagcttgacgccatcgtgctggtccagacgaccgctgggcaccagatcgtcgccgcgaagcaaggcccattgatccgtcatgcgggcatcgaaacggccgctcttgcgttgatgactgaccttcaccttgtagctcagccgggccttgccggcagccggccgccagataccgcgcccaccctgctcctgccaagcgccttctgcgtccgtttggaagtcgctgtaccggccctcatcgcccagattgaagtccagatagcggacggcgctgccgtcctcgagcagcagttcgacttcggcgagatcccgctcgggcacgaatctgattacgaaatccagatcgactcgcttggcagcctggacgggcgcgacgaacagcagcaacagaacggcaagcagcggtaactgacggagggacatcgagcggctccagatgggcttcagtgctaagacgacagggccaaaggttgattcaaccggcccggaaaatcagatggtcttcccagtcttcatcgggaacgcttccctcggcgagcatccggccggactgcgaaatgcgttcggcatgcaccgcatccggatcaccgcagaccagatggtgccagaggggcaagtcccggccttcggccacgagtcgataggcacaggtactcggcagccatttgaactgcgcgccgtcggccggggtgagctgaacgcagtcgggcacgctcgccttgcggttcggatagtcgctgcaacggcagctgtgcagatcgagcagcttgcaggcgatacgggtgtaatagacgctgccgtcttcttcgtcctcgagtttttgcaggcagcacaacccgcagccatcgcagagcgactcccactcggctgagtccaactcggcgagggacttgcgtttccagaagggttcgacttttgccgccatgaaaagggtatctcgagaaaatggcgagtctagccattgccatgcgagcggccaagcacggcggcactctgcatggcgtggcgggctctcaggcgaccaatggcgccgactcagaccgggtcgttgcgccgcagcaactcttcgggcagatgctcgatatagtcgtcctcggggggcggcatctgcaggtgatagccctgtttctccagattgtcgagcacgaccgcgatgtcctcgcgcgccaacttgcgttcgggcgtaaggaccatgtcgaaggcatgcatcggggggccgaagacggcgagcagcgcttcgggcacacgcgccaacgcctcgctccgctcgacgtacagatacatctcgttcttgcgcgggcttctatagatggagcagatgcgtttcatgatttcgcttccagagcctgtagcagggcttgccccattcgttcgcggcgccaaccgcgcagcgagtcgggcagcgtataagggccatcggggtaaccgcttttaagcagggcttccagcaccttcttgcgcaccatcagttccggcgcgatgtccagcgcttgcgcctcgcgttgaccgaccgcacgcagcttcttcaacagtcccgacgcttcgagcggcaagggctccggcagcggttcaggccacgcctgctcaggcgtggaagccgcgctacggatcagttccagcaaggtttcgccatcctgccgcacggtacggggatgcatgtcgtcgatgcgcgccaaaccgaccaggtcggtcggctgggtgcgtgccagcggccatagactgtgttcgcgcaatacccgattacggggctgattgcgtgctctggcctcgcgctcgcgccacgctgtcagagcgcgcaacacggccagttgccgtggcttcaatcgccaggcctgcttgacctcccgataggcttcgtcgggatcggtttcacgctggagattcgcgaccagctcggcaccatcctccagtacccaggcgcgtttttcgtcggacagcttcggcagcagcgccgcgtagagctcggccagatgctgagcgtcctcggccgcgtagcgctcctgcatgtcgctcagcggacgctggagccaatcagaacgcgtttcccccttgggcagctcgatgttcaagacggcctgcaccagacgcgaatagcccatcgaaaaaccgatattcaggtaaccggcggcgagctgggtatcgaacaagggcgccggcaagctgccggtcaggcgccagagcacctccagatcctcgctacaggcatgcagaaccttcaccaccttctggtcttccagcaagccggcgaatccactccagtcggtgatcagcaatgggtcgatcagataggcgcaacgaccgtcaccgacctgcaacagcgcggcaatcgggtagaacgtgtcgacccgcatgaactccgtgtccaccgccacgtatggcaactggcgccactcggcacaaaggcgggccagatgcgcatcatccagcacccattgagtttcgatggccactaggccctccttgttgttcggcgttacgaccggcgtgcgggcgaataggcgcgcagtatatatcgcgcctcgccgttcgcagcgcattcatcggcagcgtcagcgacgcgtgataccgttgcggcatccaaaccgaacggagccttgccatggcgcttgctcaattgatcgataccactcgactgaacgcgcaactcgcgcacccgaacctgtgcatcatcgactgccgattcgccctcgatgacccccagtacggaaagcgcagctatgagcaggcacacatccccggggcggtctatctggacctggaagcggatttgtcaggtccggtcatccccggccagaccggccggcatccgttgccgcagccagaacagctggtccagcgcctgcgcgccgcaggcgtgagcaacgatagcgaagtggtgctttacgatgacggtcccggcgccttcgcggccagggcctggtggttgctggcctggctcggcaaacgcagcggggtgtacctgctggacggcggcctcaaggcctggtgtgccgccgggggccccatgagcagcgaaccggcggtcgtcgcgcccgggaccttcgaaggcacgccagacaacagcctgttgatcgatgcacgacagctactggcggacctgcaacagcccggcctgacgctgctcgatgcccgcgccctgccccgtttccttggcgagcaggagcccatcgatccggttgccggccacatccccggcgcccactgcgtgcccttcagcggcaacctgggcgaagacggccgcttcctttctccgcaaggccttgaagaacgtttcaggccgctcgttgcgaccgcatcagccgagcggctggtggcctactgcgggtccggcgtgaccgcctgccacaatcttttcgcgctttgcctggcaggtcatccgctggcgaaactgtacgccggctcgtggagcgaatggatcaccgatccccagcgacccgtggagcgatgacggatccgcacgaacctgtccatacggtcacaaaatgcctaatcggttttttgctgaatttcagcaagctttcgccgccgatcgtcgtccttttacgaaaaactgcactcttctcgttgcagcgaatcgaacattgttgatagggtccgagccgctttttcccctggagtacaacaatgaaaacaacatggttgaagaccgcgatcgcggtagccgtgggtgcgctttccactcaggccatggctgccggcttcgcactgaacgaacaaagcatcagcggtatgggcacctccttcgcgggccgctcctcttctgccgatgatgcttcgaccgttttcggcaaccctgcaggcatgtcgcgcctgaagcgtgagcaagtcaccttcggcgtcgccgccatcaatgccaagactgacatcaaggacgccagcggtgcggcaggcagcaacgacggcgacatggtgcctgcgatcggcgtcccgatgggctattgggttaaaccgctggacgagaaagtcaccttcggcctcggcgtctatgcgcccttcggtctggtgaccgactatgagagtggcttccagggtcgctacgaaggcgactacagcgaagtgcgcgtggtcaccatccagccaaccgtgagctaccgtttcaatgaccagctgaccgttggcctgggcgccacgatcaaccgcatcgacggccagctggaaagcgccgtgccgtcacgcgtcggcgcacccgacagccgcgtcaagatcaaaggcgacgatgttgcagctggcttcaacatcggtgtgctgtatgagttcagcccgtccactcgcatgggcctgacctaccactcaaaagtcgagtacgagctggaaggcgatacgaagatcagcggcaacgacccggtttacggcgcgatcggtgcctatggcaaatatgacgccagccttgacctgaccacaccggaaatggctgacctgtcgatcacccacgaactgaacgaccagtggactctctatgccggggccagctacacccgctggagccgtctggagtcgatcgtcgtacagaacgagggcgtgacccctggcccggcttcggccaacttcggcaccatctccgaagagcaggactggcatgacacctggtcctacgcattgggcgcggcctacaagctgaacaaggaatggaccctgcgcaccggtgtggccatggaccagagcccgaccaataacgtccaccgttcgccgcgcatcccgaccggcgaccgcacggctgtgagctttggcgtggcctggaatccctcggacgacgtcacggtcgatctcgcctactcctacctctgggaagaagacgccaagattcgccaggacagctacaacgccacctacgagaacagcgcgcatggcttcggcgctggcttgacctaccgcttctgatgcaccccgccccgaccgttcggtcggggcaccctaccctactgacccaaggctttctgcacggcctcgagcaactcgggatcgtcaggcttcaccttgctggaaaaataatcgactacctggccgttacgatcgaccacgtacttgtagaaattccagcgcggcgccccgcctgcctgctcggccagttccctgaacaacggcgtcgcatcgctaccgcggacgggctgcgtctgggtcatgggaaaggtgacgccataatccacgtagcaaaccttagccgtctcggcttcatcatccgactcctggaagaaatcatctgacggcacgccgagcacgaccagcccctcgtccttgtagcgctgatagagcgtctccagccccttgaattgcggtgcgaagccgcaaaagctcgccgtgttgaccaccaccaacgccttgcccttggcttcgcacaggtcgatggtgtctttcgagcgcagctttggcagctcatgctgcagcagcgctggacactcctgcgcatgcaccggaccggccaacgtggcgagcaccagcgaggcggcaatcagataacgcttcatatgaatgctccaagcgaggttggagccacgctactcccgagccggcaaaccggcaacgtcggatcgctgatgaagcagagcaccggtttttgccgagcttgggacagctaccggctcgctgaccaaaacagtttccttcgcggtcaagtccgatcccattagggagcaccgaagcggttttcgctatatacaaaactatacagcgcttgcagaatggctttcccgatctggagctagatcatgagcgatccacaccccctcggcccactgcgtatcgacggccaactctggttcaaccgtggcgagaaaggctatctcggtggcaagcgcatcgaactgctggagcagatcgatgcgaccggctccatcagccgagcggccaaggccatcggcttgagctacaaggccgcgtgggatgccttggatgcgatgaacaacctgtcggagcgccccttggtggtacgcgccgctggcggcgccaagggcggcggtacgcagctgacggatttcggccgtgagatgctccatgtctggcgccgtatgcagcatgaatacgaacgctttcttgcccaggtggcgcagggcatcgacgggttcgacgacttcgacaagttactccgggccattgccatgaaaaccagcgcacgcaatcagttccgcggccgaatcgcgcaggtcaccaggggcgcagtcaatggcagcgtcagcctcgatatcggtgagggcgtaacgatcaccgccaccctgaccaacgacgccatcgacgaactgcaactggcgcccggcagcaccgccatggcactgatcaaggccagcttcgtgctgctgtcgcccgatccaaccgtgaagatcagcgcgcgcaatcggctgggcggcaccatcagcagcctgacacccggtgcggtgaattgtgaggtcaagttgctgctaccgggcaaccgcaccctgggcgccatcatcaccaacgaaagcgccgaggagctgggattggcacttggaatgccttgcacggcgctgatcaaggcgtcgcacgtcatcatcgctgtggactgaggagaaccatgaatacccttcgcatgattgccacgctgctgaccgccgcactgctcccccttgccggcgatgcggccgaggtgcaggttgccgtcgcttcgaacttcaccaaaccgatgcaggacatcgccgaacgtttcgagcgggacaccgggcacaaggcggcgctcgcgtttggctcgacgggcaagctgtacgcacagatccgcaacggtgcgccgttcgacgtgctgctggcggcggacgacgcggtgccggccaaactggagcgtgaaggcctgggcgtgagcggcagccgctttccgtacgccatcggcaccctggtgctctggtcggcccgcctgggttatgtcgaggatcagaacgccctggccaaccagccatatcgacaccttgccgtcgccaacccgaaaacggccccctatggcgcggcggccatggcgacactggaaaagctcggcctgaccgagtcggcccggggtcgactggtccagggtgaaaacatcgcccagacgcatcagttcgtggccagcggtaatgccgaactcggcttcgtcgcgctttcccaggtggtggaaaacggtgcaataggccagggctcgggctggatagtcccgtcgacctaccatccacctattcgtcaggacgcccttttgttgctcaagggtcgcgacaacccagccgcgcaggcgctgctcgactacctcaagagcgacaaggcgggcgaggtgatcaaagcgtacggctacagcctgcaatgatgccgttggacgatatcggcctggctgcggttgtgctcacgctcaagctcgcaggcgtcaccacgctgctgttgctgctgattggcacccctatcgcctggtggctggcgcgaacccgctctcggctcaaggggccgatcagtgcggttgtggcgctaccgctggtgctgccgcccaccgtgctgggcttttacctgctggtcgccatgggccccaacggaccgattggccaactcacccagagtctggggttgggcacgctgccgttcaccttcgccgggctcgtcgtggcttcggtgttctattccatgccgttcgtggtgcagccgttgcacaacgccttcgaagccatcggtgaagcgccgctggaagccgctgcgacattgcgagccggcccactggacaccttcttcacggtcgtattgcctcttgcaagacccggcttcgtcacggccagcatcctgggctttgcccataccattggagaattcggcgtcgtgctgatgatcggcggcaacatcccggagaaaacgcgtgtgctgtcggtgcaaatctacgaccacgtcgaggccatggagtacgcacaagcgcactggctggccggaggcatgctggtgttctccttcgtagtgctgctggcgctgtatggaagccgatcttcgcaggggttacgcggatgaccgacaaaccagtcggcattcatgcacaacttcgaatgtcgcatcccggttttcagctggacgtggaattgacgctgcccggccgcggtatctctgccctgttcggcccttccggctcgggcaaaaccagctgtctgcgtagcctggcaggcctggaacacaaaaccgcagggcgcgttgaagtcaacggcgaatgctggcaggactcggctagcggccgcttcgtaccgccgcatcgacgcccgatcggctacgtattccaggacgccaacctgttcgcccatctgtcggtgaagggcaacctggaatacggcatgaagcgtgtcgcgcagggtcggcgccgtgtggtctgggcgcaggcgatcgaactgctcggcatcggccatttgctcgagcgcagccccgaccggctgtcgggcggagagcggcaacgggcggcgatcgcccgcgccttgctgaccagccccgaactgttattgctggacgagccactggcggccctggacttcaagcgcaagcaggagattctgccctatctggagcgcctgcatggcgaactggacatcccggtcatttatgtcagccacgcggcggatgaagtggcgcggctagccgattatctggtgctgctcgacgaagggcgggtggtcgctcaggggcgtttacaggaaaccttggcgcgcctcgatctgcccaccgcattcggtgaagatgccggcgtggtgatcgactcggtgattgccggacacgatccgagttaccacctgacgcgcctggcgtttcccggcggtgaagtcctggtggccaggcgtgacgaagcgatcggccggccgctacgctttcgggtgcatgcgcgcgacgtcagcctggcgctggaaaaagccgagggcaccagtatcagcaacctgctgcccgcgtgcgtcgagcaagtggtggcggcggacacaccggcccatgtgctggtgcgactgaatgcccagggcacgccactgctggcacgcatcacgcgccggtcggccgatcagctggccgtgcagccgggcacagccctgtgggcgcagatcaaggccgtcgccctgctcggctaggacgattcaaagtccgagcgccaacacaaccagcacagcgcattccaccagctccagcagtgcacccgcggtatcaccggtggtaccgccgatgcgtcgacacatcgcccgtcgcgacaaccagccgacgccgacggtcgcagcgagtgccagccagccgctcgagcccaaggccaggcaggcgaggacgacaccgccgagcgcgatacgactcgtatcgcgtggcatctgctcggccaaaacctgaccgagcccgcccggccgaacgtatggcgtcgtcagaaacaggcccagcaaggcactgcggccaagcaggggagccagcaacagcgctaatcgctgatcggtggccagcagtgtccagagcgcgacgaacttgagcaacagcagcaataccagtaccaccacggcgagcgggccgctgcgcggatccttcatgatcgtcagggtgcgctcacggtcgccgaagccgccgagccaggcatcggcactgtcggcgaggccatccaggtgcaacccgccggtcagcgcgacccagcccgtcagcagcagtgccgccagcaatggtgccgaggcgttttcgaagacggcgcctacgagccagagcatcgctcccagcaacaggcccaccaatgggtaatacagcagcgaacggcctaccgcctgcggctcgggcatgcggtcaaggcgcaccggcagactggtcagaaattgcagcgcgatcaggaacgactgcatgcctcctccatccagagcgtggcgtcgcggaagccgaccttcaagccgaacaggtcgccatgccgcacctcgacctgcagcagccgctcgcgtggcaatccgcgcgcctcggccagcagcaaccgcatcactccgccgtgagtcaccagcaacacccgctcgcctgcacaacggtcggtgagacgctcgagagcggtcaggacgcgcgcttcgaacgccaccagcggctcgcctcccggcggcgtgaaaccatagggatcgttccagaaccggcccagctcgacgctctgatcgaccatcagctcggctgccgttcgcccttcccagtcgccgaagtccagctcgcgaaagccgggctctatttccagttcgagcttctgacgctcggccagctcgcgcgcgaaccgtgcacagcgaacgagtggcgagctgacgattcgctgccatggaccgccgttcgagacggcctggcgtagttgctgccaacccgtagtggtcagctcatcatcgagacgaccacgaaagccgccgcccgcgacggtctcgccgtgacgcaacagatcaagccgcaggttcatggtcacgcccgctgaccgccgcctcggcaaaagtcgccatgccgccgtgcagctcgcaggccagccgcagcagcggcaccgccagcgctgcgccgctgccctctcccagccgcagaccaaggtcgagcaagggctgcgcgtcgagcgcatcgagcacggccagatgtccaggctcggccgagcgatgggcgaacagcagccaatcccggcaggcggggttcagccgtaccgcgcacaacgcggcgacactgcaaatgaagccatccaccaacgccacaatgccgtgttgggcgcaggtcagataggcacccgtgagcgccgcaagctcgaagccgcccacgcgctgcatccactccagcgtgccatgatcgccggcatgcaatgccaacgcgcgttcgatcacctcgcgcttgcgcgccacgccggcctcgtccagacccgttccaggacccgcgagccggcgaggttcgcaggccagcaacgcgcaggccaacgtggcggccgtggtcgtgttgccgatgcccatctcgccaccgatgaacagggcggactgctcgtcgtgcgcacgcaacacactgtcgcgcccagcccgcatggcctgctggcaggtatcggcgctcattgcagggccctcggcgaaattcgcggtacccgcgcctaacgccagatgccgcacaccgggcaacggtccgatcggtatggccgtgccaagatcgaccacttcaagcctggcgcccaactgacgggccagcacgcttattgccgcgccgccgttgacgaagttgcccagcatttgtccggttaccgactgtggaaacgcggagacaccttctgcgacgacaccatgatcgccggcgaaaaccgtgatccagaccggatccacgctcggccgcgcctggccacgcagggccgccagatgcggggccaacgcgtcaagacgccccaatgcgccgcccggcttggtcaactgagcgtcgcgctcggatgcagccaggcgcgccggttcatccagcgcgcggcaaggctccaaccaccactgttcgatcaaagcggttctcccttcaacgtcatcggcaagcccgccacggtaaacaccacgcgcccgcaacgctcggccagggcctgatgcagccagcccgcctcgtcgacataacgccggctcagctcacccagcggaaccacgcccagcccggtttcgttactgaccagcagtaccctgcccggcaacgcagccacgcagtcgagcagcgcatcccgctcggcagccaggcgcgccgtatcgtccaacatcaacaggttggtcaaccacagggtcaggcaatccaccagcaggcagcgatcaggtgccgcctgcgctcgcaacgccgcggccagggccagcggctcctctatcagcccccagccagccggccgacgcgcccggtgctgcgcgatacgagcgctcatttcaccgtccagcggctggctggtggcgatgtaggtgaccggcaggccgctttcgcctgccagccgctcggccagccggctcttgccggagcgggcgccgccgagaatcagttcgatcatgccgtggtcactccgggtcaaggccgcacaggcttttcagccgtgcggtgtccagatgcgcctcgaccatgtcggccagacgctcgatgtcgcgctcgcgcagtgcgtggtagtcgacccgctgcgcctcattcagcccggcccacccaagcagcgcctggcaggcctcgggggtttcgaacaatccatgaagataggtgccgagaacctgcccatcggcgctgaccgccccttccattcgcccgtcttccagctgaacggcggcgcgttccaacgccgggccttggctgatgccggcatggatttcgtagccctcgatcggggcatcaccaagcagaagatggccacggacgttgcgcaattgcttctgcgcggccagttcggtggtcagcgtcagcaggcccaacccttcgctctgtcccgcctcaccttcaatccccagcgggtcggcaatccgctcgccgagcatctgcaaaccgccgcagatgccgagcacttttccgccgtagcgcaggtgacggtggatggccgcatcccagccgttttcgcgcagccaggcgaggtcggcacgaacgcttttcgagccaggcaggatgatcaggtcggcacccgggatcgcctgccccggccccacgaaccgcagatccacctgcggatgcaggcgcaacgggtcgaaatcggtgtgattgctgatgcgcggcagcgccggcaccacgaccctgagggtgtgtgcggccttggcggattgacgcaggtcgatcgcatcctcggcttccagatggaagtccatcagatagggcagcacgccgagcaccggcttgccggtgcgtcgttcgagccagtccaggccgggctgcagcagcgcgatatcgccccgaaaccggttgatcacgaagcccttgactcgcgcctgctcgctggcgctgagcagctccagcgtgccgaccagatgggcgaagacgccgcccttgtcgatatcggcgatcaggataaccgggcagtccaccgcttcggcaaagcccatgttggcgatgtcgttggcacgcagattgacctcggccggcgacccggcgccctcgaccatcaccaccttatacgcctcactcaggcgccgatgggaggccagcaccgcttccatcgccacgcgcttgtagtcgtgataggccaccgcgtccatgttgctgaccgcatggccatggatgatgacctgcgcgccgacgtcactgttgggcttgagcaggatcggattcatgtcggtatgcggtgccagcccggccgcctgagcctgcaccgcctgggcgcggccgatctcgccgccgtctgccgtcaccgcactgttgagcgccatgttctgcggtttgaacggtgccaccgtcacctgctgccgacgcagccagcggcacagcgccgtgaccagggtgctcttgcctgcatccgatgtcgttccctgcaccatcagcgtgttcattggtcggccccccgatactctgtcagcgcgtccgccaagcgtgaccagcccgcctcgtctggcggaaggccgaaacgcaggctgggtggatattggaagcgtcgcagcaggatgcctcggcgggcgaacgacccgtagagctgctcggaataatcgctgacgacccactgaaacagaccacatccgccgactggcgccagcccgttcgcggtcaacaggtgcgccaggcgctgggtgtcgaccaggagccgctcgcgctgccggcgctgcccggcatgatcggccagcagtgaggcgccaacgtaccgagtcggtccggcgatcggccaaggaccgagctccgtgctcagcgccgccaacagctcgggctcggcgagcacgaagccgagccgcgcgccggccatggcgaagaacttgccgaacgaacgcaacacgatcagccctggcaggtgcgcatgcgccgccagactgcattcgggcgagagatcgatgaaggcttcgtcgaccaccagccagccgccacgcgccgccaagcacgcatgccaggccaacagttgctcggcggctagaaaacgcccggtgggattgttcggattgaccaccaccagcacgtcgaggccatccagcgcacgtggcacgctgccttcgctgaattcgctgagccgatgaccttcgcggcgccaggcctctgcgtgctcggcatagcatggcgaaacgatgccgacctgcgagatgcgtctcagcctgggaagcagctggatagccgcctgcgacccgggcaccggcagcagtgaggagacgccgtaataatcgcgcgcgacggcctccagctcgtcatcggcatccggcagacggttccacgcatcgtctggaatcgccggcagatcgaatccgtatggcgcgataccggtcgacaagtcgagccactgtgccaggggtatgtcgaaggcctgcgcggccgcccgtaatcgtccgccgtgctcaagcatccagccagcctcccagcagcaacgccagcaaccagaggccgacacccgcccagaccatgtccagcgcgcgctcgatatcacgcgcagtcggagcctcgccctcccccagcgtcggccgctcgtgcagctcaccgtgatagatcgccgggccgcccaacgacaggcccagcgcccccgccccggccgccatcaccggcccggcattggggctgtcccactgcggggcctggcgtcgccaacaagcccaggcccgacgcgtctggcctagcaccgcgtaggtcaaggcaacgagccgggcgggaaggtaattgagcaggtcgtcgattcgcgccgcggcccaaccgaagcgctcgaagcgtggattgcgatagccccacatcgcatccagggtattgctcaggcggtacagcaccacgccaggcgcaccggcgatggcgaaccagaacagcgcagcgaataccgcatcgctgccgttctccagagccgattcggtcgccgcgcgtgccaccccctgctcgtcaagcgagccggtatcccggctgacgatgaagccgacccgtcggcgcgcctcggccagatcgccctgacgcagggcgagcgctaccggaaccaggtgctcgccaaggctgcgcagccccagggcgatgtacagcagcaggacctcgacgacccagcccaccccgggcagcaggctcagcaaccaggcaagcgccgtcagcggtagcaccgccaggcaccaggccgtgacgccgtggctgcgccagccacggccatcgggaccattgaaatgcgcttcgaggcggtccgccaattgaccgaacagtaccagcggatgaccgcgacgcggctcgccaagcacgacgtccagcccgaccccggccaggcagctcagcgccacgctcattcgcctgctccccagccgttatggaacagcagctcgtgcagcggtcggggctgagtccagcccgtcagcgccagcatcggtgccgggtagaactcggcaaccggtcccagacagaccaccgcgaccggctgggcgccctcgggcatttccagaagtgcggccaatgcctgcggatcgaacagcgacacccagcccatgcccagcccttccgcacgggctgcaagccagaggttctgaatggcgcaggcggcagaagccaggtccatttcgggcatggtgcggcgaccgaagacgtggccttcgcgcccatccatcaaggccaccacgagcaattcggcgcactcacggatcccttccaccttcaactgcatgaattcgctgccccgctcgcccagctctccggcggtgcgctggcgctcctcgtccacctgctcggctatcgcctcgcgcaagtcgctccgggtgatacggatgaaccgccacggctgcatcagcccgacgctcggcgccatgtgcgcagcttcgagcagccgcccgagcagcgccggctcgatctctccggccacgaagtgacgcatgtcgcgccgttcggcgattgcccggtagacgccggcgcgctcggccgcggagaaggcgtgctcgctcatggccgaaacagcgcagcggctgcctccggcgccgagggtagataaaggtggatatagctggcggtcaaccggccctgccgatacaccggctcggcggtgcgcttgtaattggggcattgaccatgcgccagcggctgcagcgtcgtttcgagcgacgagtgatgataggtgtgcccgcgcagacgcccctccggcagctcaacctcctgcaacgccagcgccgtgaggcgtggctgcagcctggcctcgcctggcagcacaccgagcatcgcttcgcgagcgccggccttgtcggtgaggctgtcgagcagatagagcatgccgccgcactcggcgaggatcggcttaccggcagcatgatgtgcacgaatggcatcgccgatcggcaggttgcggctgagcgcctgcatgtgcagctccgggtaaccgccaggcagatacaggctgtccaccgacggtagccgcgcatagcgcagcggcgaaaagaacagcaactcggcgccaagcgcgcgcagcagatcgagattggcctggtaaatgaaggcgaacgccgggtcgcgcgccactccgatacgcacaccttgcaacaggggcggcagctcgatgtggtcagccggcatgaagcgaaccggggccgggagctcacaatcggcgctggcttgcagcgcatcggccaccgcgtcgagacggtcgtccagatcggccagctcctgcgcctgcaccaatcccaggtgacgactcggcagattggccgcctcgctacgcggcagtgcaccgaaccagccaatgtgcggcggcagacagtcgcgcagaatctcgccgtgacggctgctgcccacccggttggcaagcacccccgcgaacggcagatccgcttggtagctcgccaggccgtgggccaacgcgccgaatgtctgagccatggccgatccgtccaccaccgagaggatcgggatgccgaacttccgagccagatcggcagccgacggcactccgtcgaacaggcccatcacgccttcgatcaggatgagatcggcctcgccggcggcatcccatagcagttgccggctctgcgcctcgccgaccatccacaggtcgagctgatagaccggatggccactggcccgggcgagcaccatggggtccaggaagtcggggccgcatttgaatacccgcacccgcttgccctgacgcctgtgcaagcgcgccagtcccgccgtaacggttgtcttgccctggccggacgcgggtgcggcgatcaacagtgccgggcactggcgcggcgcgttcaccgtgctggcccgctttcggcgtagaccgattcaggtgccagaggacgctctacccatccaccgccagcaatggtggatgaacaaagcgtcatccaccctacgcagctccagatcgcaggcatcagaactcgacccctttctgcgcctttaccccggccttgaacgcatgtttgaccaggctcatttcggtgacggtatcggccgcctcgatcagcttgggcggcgcgcctcggccggtgaccaccacatgctgcagcatcggtcgcgattcgatatcggcgagcacgggatcgagatcgagatagccgtacttcaacgcgatgttcagctcgtccagcaccaccaatccgatctccggatcggcgagcaattcggcggctaccgcccaggcctcgcgcgccttggcgatgtcgcgctggcgatcttgggtttcccaggtaaacccctcgcccatcacgtgatagcgcacctcgtctgggaagcgacggaagaagttctcctcgccggtgctggccgcacccttgatgaactgcaccacgccgaccttcatcccatggccgagcgctcgcgcgaccatgccgaacgccgagctgctcttgcctttgccattaccggtatgcaccagcaacaggccatattcgtcctgcgcctcggcaatcttctcgtcgatgaccgccttcttacgctgcatccgcgccttgtggcgtgcgtcgcgctcgccggactcagtcatgcccgggcctcctcttcacgcttggcattccaggcgcgcaggccgacgaacagcaccgcggcggtaccgacatacagcgccaggttcgccaggtagcgtgggtaatagtggccaacccgctcggccagcagcgccaggctcggctccggataacgaccggagaaatagaggaagccgccgcctgagaacagataacaaacgaaggcacttgccatcacgcacaacgccagccgggcgaggctgctgggctggtcgcggtgccagccagcgtagaggcgaccgcccagccacaacgaaccgtacgccggaaccaacgcccagtaggctggcgacatgcaccagtcgctcacccccgcccattgaatggcggcgaagtccagcaacgaagcctcgagaaacagcactgcaaagatccacttcggcctcagcagcacgcccgcgaggaaaaacaccgcccaggacgcgctcggcaggttgacgctggcgaagtgctgaccgcgagtcatcgccatcagtgcaatcagggcgattccggccagcagttggtgtcgcggggcaagcttgatcattgcaagtctccttcgataggcgcgggcgagatgcccgcgcctcgggctcaaagcgcctggtagcgcacggtgagataggccgcctggcccggttggttgtaaccacgcgcggtctcgtaatcggcatccagcaggttggcgacacgagcctgcagtcgccactcggggctcatacggtattcaccacgcagatccaatgtggcgtagccggccagttcgttctggttagccagatcgtcatagcgttgcccctcggcatgcaggctggcgccgacgctgaacgcgccgaggcggcgatcaacgtcgaagttgaacaactgcttggcgcggcgtgtcagctcgttgccacggttggctccagcggagcgattttccggttccagcaggctgtaattggcgctccagtcccagcccatcaactgactttcaacgaccagctcgacgccacgaatgcgcgcctcctgcacgttcgccggtccgaaaatgctcgcgtcgtaggcgatcaggtcatcgatcaccgtgcgataggcgttgacggcccagtgcccccagccgtgctgtcccgcaaggccaatctcgaggctgcgagacgtctccgcctcgaggttcggattgccgtagtcggggtagtacagctcgttgaacgtgggggctttgaaggcactgccgtagctgatggagccgcgcagccagtcggtgaagccatagccgtagccgacgttgccggtgtcatgctgaccgaactgctcgttatcgtcgtggcgcagcgaaacctgccagtcgtgacgcccggcctgccccaggtactgagcgaagtagccgtcgttatcacgcgagtcctcggcgtacgtcgcggtactgtcgacttcgtcgtgctggtgatcgacgcccagcgtcagggtgtggccggccgccagctctatatcgttctgccagctgaggctgtcgcgtcggctgtcgaagcgtgagtaaaagcgcccatcctggtacgcatcggaatcgtcttcgctgcgcccggcctgcagggttacggtccaacgctcgaggggactgaagcgcgcacgggtaccgaacacgcgcgactcgccgtcggcattggcgccgaaacccgctgtgcgcttgctgttaacgctgtcgtaatcattatgggatttggcgcgcaggacattggcgtccagctccaggccgttgtcgaagcgataacccgcgctcaaggtggcggagaggttgcgatagccgtcggcgtcgctttcgtagccgctcgtctgtaccgacttggcgttgatgccgtccgtatcggaaccgctggcgcccaggctgtaccagccgcgaccatcgccgccggacacgccgatgctgccgctgtagctgtcgtgggtaccgtagcccgccgagaagaatggcttggcgccctccccttgcccctttcgcgtgaatatctggatcacgccaccgatggcttccgagccgtacaggctggagcgcggcccgcgcaccacttcgatacgctcgatcagctccagcggaaggtcttgcagcgctgccccaccgccggtcaccgagccgatcttgacgccatcgatgagcaccagcacatggtcggactcgctaccacgcatgaacagagaggtgttcttgcctggcccaccggagttggtcaaggagacgcccggcacctgcttgagcagttcgggcagcgatgcggcctggctccgttcgatccgctcgcggtcaaggacggtcacggccgcaaggctttgttcaaccgtctgcgcggtacgcgtcgcggtaacgatttgctgctggagcgccagcggtgcggcagccaacgggccgccaaacaggggaaaactgccaagcaacacacaggtcgctggcttgaaacgaggcttgtcaatcaaggttcaggtctccgtcgtgcccgccgcacgacaacagtgataagggcagacggagaatgcgaagggagtgcaggtgcaggcagccgcaccccgatcagcgcccgccgcactgccgtggaatgcgacaggccggtctccgggcttgcgagcggacgcgttgcagcgtcccgaaaccgcgccttcccatgcctgttggcacagtggctgtgagcggcttcttgtctcgcctaccgttgcgggggcagcgccggagtcttcgaaggaatggaccggcttccctgtttcacctctggcgtttagccagcggtacctgaagcagcgcggagggtagtcgaaggctctgcacagcgcaacctcgggcttcggccacctgccggaggtaacgctcgattgccactggctggcattttgccggaaccgtcaggcgcttctggccttcgaatgcaacaatgccctcatcccgttccagcctcgacgagaagacgcccgccccatgacgaccatcgtgcagatatccgacacccacttcggcactgagcaggcagccgtagtgcaagccatggaagatcacgtgcgggaacacaaggccgatctactgattttttccggcgatatcacccagcgggccagggccacgcaattcgccgccgcgcacgcgttcgtccagcggctgcacgaccacggcatcggcaacaccctggtgatcccgggcaatcacgacatcccgctgtataacgtcttcgcccgtttcctgatgccctaccgaaactaccgccggcatttcgggaacgacctggagccgacttatgagaacgatgaagcgctgatcatcggtctcaacaccacccatccacggcggcacaaagacgggttggtcaccgaggagcaggtagcggctgtgacgcagcgcctgaagcggaccgatccgcgcaagttgcgcatcgtggtagcgcatcagccgttcggtgcgatggttctgagcgatttgagcaacctgcagcacaacgccgacgacgcgctgcatcgatgggccgatgagggacttgatctggtgatgggtgggcacattcacctgccctatgtgctgccgttatccaggcagtatcccgggctgtcgcgcgagatatggatggtgcaggccggcaccacgctgtcgtcgagggttcgcggcacttcgccaaactcgttcaatcgcctgaagctgcacgcaggcgatgacaagacggcctgcgtcgagcggtgggacctgctggacggcgagttcgtcctcggctcgcacttcaatctgcactggtaagcgccgcagcccaccccaacgatcaatgggccgcggcgccttcccgcgaggctcagccgaacatgtcggcgaccgccaggccggtcaggtagacaccggcgaagccgagattgaacgcgatgaacaggtacaggctgtacttcatgtaactaccgaaggtcagccccggcaccttgctcatggccacgatacctgcggcggagccgatcaccagcaacgagccgccaaccccgaccgaataggtcaacaccatccattcggcgatacccattgcaagcccggacttgagcaatgcggccgtcagcggcacgttgtcgatcatcgaggacagaatgcccatcagatagttggccagcactgccggtacctgatcgtagatgcgcaccagcccgtcgagcacgtggatttccttgagcataccgaccaacaggaggatacccaggaagaacagcagggtttcgaactcgacctgacgcacgtattccaggatcggatcggtctcgatgtcatcactgaagaagcgcgccaccagaaacatgaccgagagtcctgtgaggaaggtcagcaccggagggatctggaagaagaagttgccggcgatggtgcacaggatggtgcccagaaagatcagcgcgatggcgatgtcgacccgacggacatcggtgcgatgactctgcaccagcacctgcccgctcatgcccaacgaaagcatggcggccagcagcatgaccgccagaaacgccggcagcgccagcagcagcaattgcagaatcttgaccttgcccgcaagaaagatcatcagcgttgtgacgtcgccggtgatcagcgccaccccacccgagttcaccgcgaagaccaccagggcggcgtacttgatggtcttttcggcgctgagcttgagcgaaagaatcagcgtgatcgagaccagggtcgcggtgatgttgtccgccagcgaggagaacacgaagcagaatgccgcggtcaggaacagcagcgctcgctcactgatccgtttgggcagtaccaggtagatcaggttttcgatcatccccttcttgttcaggtacgccacgaatgtcatggccgcgaccaggaaaatccagaggccggcgatctccgcaatgttctcgttgaggctcgtgagcacctgctcacgctcggcgccggcaggagaaaaaacgaacaacaatatccacgccagggtgccgaaaaacagcgtgaccttggctttgttcacatgggttatttcttcgaggacgacaccgagcagagcggccacggcgaagccgatcagcacgtactgaagtatttcaggcatgggaccccagatgcataagagggaacggttcgtgcgcggttagcgcacccgagaagttggggcggcgatcatagccaaagtgcgacaaaacgacacctgacggatgtcaaactcggtgtatttccagatatgccatctcgaatcaatggcgcggcacgaaccccgcaggcttgctggacagccactcgacgaaggtgcgcaggcgcggatcgctcagcaaggcatcgcgactgttgtagtggagcgccagttccttctcgctgaacaggcggtggatctggttatgacagggccggcaaacccacaaggtggcagtgatgcgcgcctcacgtccgaagcgcttgcgcacgtaggtcttgccatgcagggctttggggatcaggtgatggcgagtcagcggtgcctgacggaggcagagctcgcaggcttcaggctgatcgggaagtcgcatgatcggcgccattgaacgagcctcgagtcgcagtgccaaacgcaaccgccgccaaggctttccagccccattggccgcgacgaaccccgttccgggcccgcatcccgaccgagcacgggccgctacgggttgcgagcgaggcgctcgctgtcgagaacgcgcttggcactgaggtagtttttctgccagtaacggttggaaagactgtccaggcggacggttccgccggtcgatggcgcatggacgaaacgcccttcgcccacatagatgcccgcatggctgacacggcgcccaccactggtggcgaagaacaccagatcccctgctttcagcgcatcgcgcttgaccgcctgagcgtgcatggcgttcatctcacgcgtggtccgtggtagcgcgacgccggccgctcctcggtagacataaccgatcaaaccactgcaatcgaagccgccgtcaggcgtattgccgccatagcgataaggcgtgccgaccaaccccaaggcggtgaacagcacttcttcggcggttccgggatattgctgcgtcggctggggtgcgatgaccgtcggctcgaccggcgtccgactggaacaggcggataccaggaaggcagccaccaagacggtcagaaatcgggccagaagaagcatgacagagcggtccaggcaaatgagccatcactctgccggcatgcgtttgcggatgcaagcccggcgcaccgctctttcagcgatcagtgatgagtgggaaccgcgttggaatcgtgcgccagcgccagaacgcgcttggcctgcatgaagctgctgcgccagtacttgtcgtccaggctatcgacgcgcacgcctccgctgcggcggctggccgagtggatgaactgatcgttgccgatgtagataccggcgtggctgacccggccgcggccgcgattgttgaagaacaccacatcgcctggctcgagatcgctgcgcgcgactttcggtgcatcaagattgatcatttcgcgagtcgagcgcggcaggtcgattccagcttccttgcggaacaggaagcccacgaaaccgctacagtcgaagcccgtcttggtcgagctgccgccgtagcgatacggcgttccgaccagcttgaagccgagctccagcacgctgtcggccagcgctgggagttcgtagctttgttcgtcggcgagctcacgcagctgttgttcggtcggctcgttcgaatcggcttgcgcgtccgcgctggcttccgtcagctcagcggggaatctgaaagcgaagccctccgggacgatgggagcttcgctctgctctggctgactggcacaagccgccagcaacaaaacgagcgatacaggcaaaagtgatgagaggcttcttcgcataacacgggacgtctggaaatcgaagtggcggaactatgcctgctgtcgtatcgatgagcaaattcaatcgcgaaaaatgtgacgaatgaggtgtggcaaaacgtccgcggcagccgcggctatatgtacatcgaccaaaagcgacagctcgctggcgctcgggtcgatctgagccgtaaaaccgccgctgtttcgcacatgcagcaagggctcgacgatataggcaaaactggcggacgtgccgaccgcaaccaccgcatcgaaacctgtctgcagctcgctctgcaaacgcctcaacgccagcgccggcagcatttcctcgaacagcacgacgggcggtcgaagcacgccgctgcatcgcgagcactgtggtgggagcgacttcaacaggtgctccgccagctcggcactttcctctccgcagctcatgcagaacagcggtgcaagcgtgccgtggatctcgatcagtcgttgcggcgggcttccggccgcgcggtgatagccgtcaacgttctgggtcagcacccagcagccaggctttctattctgcaactcggcaatcgccaggtgaccggcattgggctttcctgccaggcaggcgcgaccgatctcggcgaggtatttccagcacaagcccgggttgagctcgagcatgggcccggacagcgctgcctcgattggcaagccgtcttccgtgtgcccgttgtagagcccaccgacgcctcgataggtgggcagcccggagtcggcggaaagcccggcaccggtaataaaaaggatgcgctcggcctgtcgtagcgcttcggccgctcgctgcaccgcatcgctcatctttgcatctcccgtctcggcatgtttcccgcgctgctggcgtgaagcgacagctccctggccggagctaggcgatcaaggcttcgactcgcacgcagccgcctcaatggttgaccgtgaacgccagcatggccgacagctggcacatcggacggccgctctcgccatgccactggttgaatacggcttgcactgcagcctgatcacgctggctgctgggtatcttgtcgatgacctcctgcgccttgagggcggcgacgacatcgttgctcgggataaacgtatccttgccggccatgcgcagcaaacgcggcgccgagagcccgccgagctggctaccccgcttggcgaggtagcgccacaggccgacaatgtccgtcactggccagtcggcgatgaggttgccgaagctgccatgctccttcgccacgtcgaggacgaactgcgcgttgcgcggcacgctcttgagcttgcccaggtggcggatgatgcgcgcgtcctgcatcagccgctcgatgtgctcgccacccatgagcaccagcttctccggatcgaagcggaaaaacacctcctcgaaggcgggccatttggcgtccaccaggctgtgcttgagcccagcccggaagattcgaaggctgatcagcgagaggtagcgatcgtccgacacgctgcgcaattcatcggcactgcgcggttgcggcaggcgcgcttcgagcgcggcggccgagccgaagcggttgagacagtattcgtgcagccatttgtagtcgtgcatggtgggtatccggtggcgacggcagcggcacagggtgccggtgacgagccggcctcgcaagtccgccaccatcggagcggctccgtctgaacagcagcggctggaggagttggcataggccggtcccggcgaaatgcgccggctggtggcgccccatggcacgcgccgcatttgtccgacaccaacgcagacggtggacaagctccgcgttgtccacgctacgagcaggacgttattcgcgtgcccgcccgcctccacgctgcggcgacctaaagtcagccgcgcagctgctgcgccgtcttgcgcagcatgtgctccgtcgccgcccagcccaggcagccatcggtgatcgatacgccatagcgcaattcagcggcgagcggctggcagccgtcgaacaggtggctctccagcatgacgccacgcaggctcatgtcaccagccaggcgctgttcgatgaccgattggagcaccgcgggctggcgcagcgggttcttgccgctgttggcatggctgcaatcgaccatgatgcgcgaggcgatgccctgcttctccaatgtgcgacgagcagcagcgacactggccgcgtcgtagttgggtgcgccgtggccgccgcgcagcaccagaagggtgtccggattgccgcgcgtctgcagcagtgccggatggccgagatcgtcgatgccgaagtgctggtgcggatgttccgctgaacgcatggcatcgcaggcgacacccaggccaccgtcggtgccgttcttgaagcccaccggcagatccagcccgctgaccagctcacgatggatctgcgattcgctggtgcgcgcaccgatcgccgcccagccgagcagatcgtcgaaatacccggccgccagcggctgcagcagttcggtcgcgatcggcaggccggcctggagaatgtccagcatcaggcggcgcgacaggtgcagcccctcggccatgttgccgctgccgtccaggtgcgggtcgtacatcagccctttccagccgaccgtggttcgcggtttttccacgtaggcacgcatcaccagcagcagctgatcgctgacttcgggcgcaagtgtggccaaacgttcggcgtactcgagcgcggcggcaggatcgtgcagggaacagggcccgatgacgacgagaaggcgtggatcgcgtccgtcgagcacagcgcggatggcgttgcggtcgtcatggatacgtgcggcaagcgcgtcactcaagggcagacgttgccgcaatacggcggggctgggcagcggctgcgcgctgcggcgggtggaaatggtttcggcggaaaaggccggggtgtggttggcaatggcggtggcggatgcattcatgatctggcggttccttctgccggcgcgggtggtccgcggcggcgctagtcgggtgttcgttcgcgtgatgtccgtttggcgtcgaagcggctaaatcgccagtcatagcggtaataacggtcggtgcggtaggtggtcatggcgtattcctcgttgcgttgggccaatgaatggccaaaaaaacaaaacccccggtcgggtggccgaccgggggttcgaaaactgctctggtggcgaccctgcttgctagggcgcctgtggggtatcaggcgcgcctgtggctaaaccaatacccaaagtaataaccagcggtcgcaacctgctgcgcacccgcaatcgcggcgcgagtggcaccggcgtttgcgtgagagaggaaggcgaggctgggggacatcgtgagctcctgaatggcgattaccttactgcggcaagcgccaggcggcaagctcaagggccatgcggtgagctgaagcggctcgtggcagcggtctcgaccgctaataaaccgggctccggtacaaacccattcgcggtcaagaccgctcccacctgcggttctgcccttggcggaccagctaggctcaatcgtgggcttcagcccgccaacccggctcagcggaccagccgctacgtcagcgctgcgccttacaacgccattacatcgagaaaacgaggcgtggcgctgtcgtcgatgcgcagactggtgaagtcgaacagattgcggtcggccagctgcgacggcaccacgttctgcagggcgcggaacatgatttcgacgcggcccggcgatttgcgctcccattcctgcagcatttccttgaccacctgccgctgcaggttctcctgcgagccgcagaggttgcacgggatgatcggaaattccttcatctgcgaataggcttcgatatccgcctcgctgcagtaggccagcggccggatcaccacgttgcggccatcatcggacaacagcttgggcggcatggccttgagcgtgccgccgtagaacatgttgagaaagaaggtctcgaggatgtcgtcgcgatgatgacccagcgccatcttcgtcgcaccgatctcgtcggcgaaggtatagagcgtgccacggcgcaggcgcgagcacagcgagcaggtcgtcttgccttcggggatcttctccttgaccaccgaataggtgtccttttcgacgatgtggtactcgacgccgattgattcgaggtaggccggcaacacatgctcggggaaccccggctgcttctggtccatgttgaccgcgacgatctcgaacttgatgggcgcgaccttctgcagatacagcagcacatcgagcatggtgtagctgtccttgccgccagacaggcagaccatgaccttgtcgccgtcctcgatcatgttgaaatcggtgactgcctcgccggcaaggcggcgcaggcgcttctgcagtttgttctggttgaccgaaaggttgcccatgtctggtgtccgggtgagatgcgaaaggcgcgcattttacgcgcaaagcacgtcgcgccccaccccatcgatccggcactttgcactgctggccctgtgctaggcttgccgccatgaacgaagacctcgaaccgcagatggacctggccgagcagatattcgtattgctgcgagaacagccggagggctgcagcgaataccagctgatccagcagctcaaggcccgtcacagcactcacatccccaacctgccattactcgacaagctggtgctgtatcgcacccattttctggtgttcaacgcactctaccgtttgcgcgatcagctctggggcgaggccagccacagcctgcagatttctcctctgtgcatacgactgcaaccctccgtgcccggcgccgccggcatcgtcgaaaatgatccactgcgtgactattacctggacatgagcaacctgcgcgacaccgacgaagcggaggtggaacgcctgctggccagtttctggtcgaggatgcgcggcgacgacccggagacgagcggcggctgggaccctgagcaaaagcgcgcggccctcgagttgttcgagctggataaggaggccgcgtcactgagcctgcacaccatcaaacgccgttatcggcagctggtcagcatccaccatcctgatcgcggtggcagcaccgctcggctgcagtcaatcaatctggcgatggaaatactgcaacgctattaccgctagcacgatagcttccaaacgctctaaccaacgccggtgcgccgtatcgccgagttcctatactgcgacttaaggtcgcacgcccgtccaactgacggcacgccaggcgaagcgaccctccaaaactgaggagacgctggcatgatcaatcacgtttggggactctttgctcaccctggccaggaatggcaggaaatcaccggagaagaacgcaaggtcggccacctgcacctcggagaggtgatggtactggcggcaatacccgccatatcggcattcattggcaccacccaggtcggttggagcatcggcggtggcgaagcggtgaaactcaccgaaggcagcgccatgcaactcaccctgctgtcgtacctcgcgatgctcgcgggcgtcggggtcatgggagccttcattcactggatgtcgcgtacctacgatgccagccccaccttggtgcaatgcatcgttttcgcggcctatacggctacgccgctgttcgttggtggtctggctgcgctctatccacacatctggctgggcatgatcgtcggtacggcagcgatctgttacaccacctatctgctctatgtcggcctgccgacgttcatgaacatcccatccgacgagggcttcctgttctccagctcgatactggcggtcggcctggtcgtgctggtcgccatcctcgcgctgtcggtgatcatgtggggcatgggcgtcggcccgatctacgttcgctgaacctgccctcctcttcatcccgccggcgtgatagctcacgccggttttttttccaacggcatcgtcatttgacgtatcgccacttcgccgtccgcaacctgacaaggcatgggcgtagcgtcacgcccgccaaccaacggttatggttttgaatccctgtcgagcgtgagcgtctatatcagcaacaacagcgctcaagcatcggcatcaggaggctccatgaccccagaattcatcagcttgttcacccggccggatcgcgcctgggaaaccattcgccagaaagaggacgcccacagcctgcactacctgatgcacctgctgtcgctggcgctgattcccagcgtatgcctgttcatcggagtcacttttgtgggttggagcctggtggatgcggagcgggtcaggctcgacttcgccagcgccttccagctgtgcctgctgctgtacgtcacgatcgtgatcggcacggtgatcatgggcttcttcgtacgctggatggcgcgcgcctttgaagtacggccgaacctgaatcagtgcatcggtttcatcgcatacgtgatcacaccgtttctggtcgccggcgtaaccggtctgtacccgaatcgctggttcgcggccatcgtcctgctgatcgccggcatctactccacctacttgctgttcactggcctgccggccttcatgcgccagcgcaactcgcagagctttctctatgccagttcgatctggggcgtcgccttactggtgctggttacggtgctggtcagcatgattctgttctggacgctttcgctcgaacccaactacgagcggaccgtgcagcagaatcagagctatgggacgcaggatgaacgtccgcaggaggagcccggcggtctctgaacggttgccagcctggcgtgttggggcataattccgggcttcttcggaggccctatgcccgaacaccttcacgcccgtatcgaggcctgctatcaacaggccgagaccttcttcaaccggcgcttcgaacgcccgcaggtcagcttcaagctacgcgggcagaaagccggcgtcgcacacctcaactccaatctgttgcggttcaacccgcagctgtaccgagaaaaccacgagcacttcctcaagcagaccgtagcgcacgaagtcgctcatctgatcgcgcatcagatgttcggcggtcggattcggccccatggcgaggaatggcagttgatcatgcgcggcgtctacgagctcgtgccggatcgctgccatacctatgaggtcagccgccgcccggtcagtcgctacatctaccgctgcgcctgtagcggtcaggatttccccttcacttcgcagcggcatgcgctggttcgtaaagggcgtcgttatttctgccgtagctgccgcgccacgctggtattcagcggcgagcaacggctcgaataatcggccgaatctatagagatctggcccgccaggcggcgagcacgaacagcgctgcgagtacggccatcagcggcagccagccggcatgttcccagacatagcccgcggcatatcccaccacgctcgaccccaggtagtaggcgcacagatacagcgctgaagcctgcgccttggcccccgaggcatgaatgccgacctgcccgctggcgaccgcatgcgcggcgaagaatcccagcgtaaacagcgccagaccgatgacgatagccaccagccagggcgtggaacacaaccccacccctaacagcatgagtccgacacccgcctggagaacggtccgcgccccgaatcgcggcaccagtcgcccagcccaaccggcgctgaaaatgcctgccaggtagacgacgaacagcaagccgatcaccgtcgaggaaaggtcgaacggcgcacctgccaggcggaagcctatgtagttgaacaaggcaacgaagccacccatcagcaggaacgcctgcaagaacagcgtgcgtaaaacgggatcgctcaaatgccgggcgaagttggccagcaaaccttgcagcgacaagggttgcgccttgaaatgccgtgacgccggcagcagccagacgaacaggcccagcgcgaccatcccgagaacggcgatcgcgcccagcgcgaactgccagccgccgatatcgctcagcaacccggacaacaagcgccccaacagcccaccgagcgccgtcccgccgatatacaagcccatcgccgccggcagcgattcaggatcgaactcctcgccgacataggccatcgccaatgccggcagcccgctgagtgcgagccccagcaaggcccgcagcacgagtaacagcgtccaggattccaccgctgcacaggccagaccaagcaggcaagccaaccccagagcgagccccatgaccggcttgcgcccccaactttccgccaggccgccagacaccaacaggcacaccgcaagggacaacgtggtcagcgacaaggccagactgctgttagccgccgacacggagaaatgcgaggccagaagcggcaacaacggctgcacgcaataaaggatggcgaaggtggcgaaaccggcacagaacaatgccagcgtcgcacgacggtaggcggacgttccgcgcctgagatgagtgccatcgaacgagtcagtcgacatgcgtttaccccaaagcccgtacctatcgtacggagcacaaaaagccgcgcagcctagcacaacacgacgtgcccggacgctcgctggcaagcggcccgccaccgagaccgccacacccgggccggaaatggcagctgagaacgaccacctggcggattgatcaccgaatccgccgtattgcttgagccagatcaatggaaatgcacgatttgcttataaccttaagtttagtagacgaatgactttgattaagccgtctgtgcttcctagactttcggcaacagtcggagagacaaggtgaacgcagtgcccgatgacaccgaccacatgccaggcaagcccgaagaaacgaggctgttcgtttttctgctggtcttcctgttccccattctgagcgtcgcgatagtggccggctatggcttcatcgtgtggttcagccagctgctgtttttcggcccgccaggcccgccaagctgataccaggcttttacacccgatcaaacaccccccttagcttgccttccttaatgcaggcggagccttactaaaaaaatgaaccacgacgctctgcatatcgccagcttgcttgtgcattgccgccctgagctgctggacgccgtgaaacgcaacctggtgctgctccctggaaccgaactgcatcaggaaagcccagcgggcaagctggtggtcgtcctggaagccgaacacgagagccttatcctcgacaccattcgcgacatccaacaactgcccggcgtgcttaacgctgccctgatttaccacgaactcctctcacccgaaggagagcctgaatgagcctcacacgacgtcaattcgccaaggccaacgccgcggccatcgcagccagtgtggcgggtctgccgatcgccaccagcgccagtaacctggtcaccgatccggaagcgaccgcgctcaagtggaacaaggcgccctgccggttctgtggcaccggctgtggcgtcatggtcgccacggccggcgatcgtgtcgtggccacccacggcgacgtgaaagccgaggtgaatcgcggcatcaactgcgtcaagggctacttcctctcgaagatcatgtacggcaccgatcgcctgacgcagccactgctgcgcatgaaggacgggcgttacgacaagcagggcgagttccagccagtgagctgggaccaggcgttcgacatcatggaggagaaatacaaggccgccctgaaagaaagcggcccgagtgcagtcggcatgttcggctccggccaatggaccgtctgggaaggttacgcggccaacaagctgatgaaggcgggctttcgctccaacaacctcgaccccaatgcccgccactgcatggcttctgccgcggtcggcttcatgcgcaccttcggcatggacgaacccatgggctgctacgacgatatcgaagcggccgatgccttcgtactctggggttcgaacatggctgaaatgcatccggtcctgtggacccgggtgaccgaccgccgcctgagcgcgccgcacgtcaaggtcgccgtcatgtcgaccttcgagcatcgcagcttcgacctggccgacatcccgatggtcttcaacccgcaaaccgacctggtgatcctcaactacatcgccaaccacatcattcagagcggcgcggtcaaccaggacttcgtcaagaaccacaccaagttcgccaagggcgcgaccaacatcggctatggcctgcgccccaccgacccgcgtgaactgaaggcggagaacgccgcggtcgccggcagctggaccgatatcagcttcgaggactatgccgaattcctcaagccctacacgttggagcacgcagctcacgagtcaggcgtgccggctgagcgcctgaaggcgctggccgaactctatgccgaccccaagaccaaggtgatgtcgttctggaccatgggcttcaaccagcacacccgcggtgtctgggcgaacaacatgatctacaacatccacctgctcaccggaaaaatcagcgaacccggcaatagcccgttctcgctgaccggccagccgtcggcgtgcggcaccgcgcgcgaagtcggaaccttctctcaccgtttaccagcggacatggtcgtcaccaatccgaagcaccgcgccgtggccgagaagatctggaaactgcccgaaggcaccattcaggaaaagcccggcttccatgccgtccagcagagccgtgagctaaaggacggcaacctcaaggtctactggacccaggtgaccaacaacatgcaggccggcccgaacatcatgcaggaagtgctgccgggctggcgcaaccccgagaccttcgtcatcgtttccgacgtctatcccaccgtctccgcgcaggccgccgacctgatcctgccggcggccatgtgggtggagaaggaaggcgcttacggcaatgccgaacgtcgcacccacgtgtggcatcagctggtttcgccgcccggcgaggcacgctcggacctgtggcagctgatggagttttccaagcgcttcaccaccgatgaggtgtggcccgctgagctgctggccaaggcgccggagctcaagggcaagacgctgttcgaagtcctgttcaagaatggtcaggtcgaccgcttccccacatccgatatcgaagagggttaccgcaaccaggaatccgaggaatacggattctacgtgcagaagggactgttcgaggaatacgcccagttcggccgcggccatggtcacgacctggcggacttcgaccgctatcaccaggaacgcggcctgcgctggccggtggtggatggcaaggaaacccgctggcgctaccgcgagggctatgacccttatgtcgccaagggcgccggcgtcgagttctatggttacccggacaagaaggcaatcatctttgcgctgccgtacgaagtgccggctgaggtaccggacgaggagtaccccttctggctcagcaccgggcgtgtattggagcattggcacaccggcagcatgacgcagcgcgtcgacgagctgtaccaggcggtccccgatgcgcttgtgtatatgcaccccgacgacgcgcgtgatctcaaagcgcgccgcggcagcgtggtgaaagtgatcagccgccgcggcgaaatgcaggcgcgcatcgaaacccgcggtcgcaacaagccaccgaagggcctgatcttcgtgcccttcttcgacgccaacaagctgatcaacaaggtcaccctcgacgctaccgacccgatctccaagcaaaccgactacaagaagtgcgccgtgaagatcgaagtggtcagcatcgcctgaggagagtcgccatgaaatttcgcttactgcctttgaccctcctcgcggtatttggcctggcggttgccgccgggcccgactacccgctggatgccccggccccggacggtcgtcgcccgggtggcaccctgacccaggagttcaccccaccgccactcaaggacgaagaaaacaaggacctgcggcgcgagcgcaactacccggagcaaccgcccaccattccgcacacgattcgcggctatcagatcgaccggaacagcaacaagtgcctgtcctgccacagccgcgccaacagcgcgcgtacccaggcgccgatgatcagcatcacgcatttttccgaccgtgatggccagacgctcggaaccgtcgcccctcgtcgctatttctgcacgcaatgccatgtcgtgcagcaggacgtgaagccgctggtgaagaacgacttcaagaatatcgacaagctgctctatcacgaaaacaagcagaacgaacagtgagggcgcccggatgaagtcgatactgtcgtttctcaagcgatactggacggtactgcgccgtcccagcgtgcactacagcctgggcgccctggcacttggcgggttcattgccggcatcattttctggggcggattcaacaccgccctggaagcgaccaacaccgaaaccttctgtatttcctgccacgaaatgcgcgacaacgtgtacatggagatcaaggacaccatccattacagcaatcgctcgggggtgcgggcgacctgtccggactgtcacgttccgcacaaatggaccgacaagatcgcacgcaagatgcaggcatcgaaggaggtctggggcaagatcttcggcaccatcaacacgcgcgagaagttcctcggcatgcgtcgcgaaatggccgagcgcgaatggcgtcgcttgaagtccaacgattcgctcgaatgccgcaactgccacaacttcgactacatggacttcaccaaacagtcccagcgtgcgtcgaagttccactccaccgccctggccaacggcgaagccacgtgcatcgactgccacaagggcatcgcccaccgcctgccggacatgcacggcgtgcccggctggtaatggcgcaaccggtccggtcgcgatgaccgggccggatgccatgaccgaaaccactttcgatcccagggagcgacggcagccttgtcagcgcatcgtgacgctcttccatcgcgaccgatgcttaccgcgccgcaaggtcagccgccagagaaaccggcacggtgaaccctgccccgccgtcactgccggttgcgcgcgggccgaactccggctatttatcgaagcacctcgatagcgtcgacaaggaaaccaccatgcgttactacctgctcggtacattgatggccatgagcgccgtcgcccatgctgaagtccagacccgcgaaatcccctataccgccgccgatggcaccgagatgatcggctactacgcctacgatgatgcgatcgaaggcaagcgccccggcgtggtagtcgtccatgagtggtggggcctcaacgactacgccaagagccgcgctcgtgaccttgccgaactgggctacagcgcactggccatcgatatgtacggcgagggcaaacataccgagcatcccaaggacgccatgagcttcatgaaggccgcgctgtccgatgccgaggccgccaagggccgtttcaatgccgggctggacctgctcaagcagcaagcgcagaccgataccgagaaacttgccgcggttggctactgcttcggcggcaaggtcgtgctggacatggcgcgccaaggcgccccgctcgacggtgtcgtcagcttccatggcgcactggccacccaaacccgcgccacccccggcagcgtaaaggcacgcgtgctggtcgaacatggcgccgccgacagcatggtcagcgctgacgacgtcgcggcgctgagcgccgaaatggtcaaggccggcgccgactaccggctcgtctccctgcccggcgccaagcacggcttcaccaaccccggcgccgacaaattccagaaacaaggcgtcgacgtggcgtacaaccagaccgccgacgaacgctcctggcaggatatgcagcgctttctagacgagaccttcgagtcggggcaataacgcaaccgcagcctcgttttctgcctgagtttttttggcttcaggcttcaggcttcaggcttcaggcttcaggtttggctctgcattcggcttcggcttcggttttgcctttggctttggctttgacgaagatcgccgtcatgcacaacgccgacgacgacgtctttgccattgtctttatctttgtctttggctttggctttggctttggctttggctgactttgactttgtctttccttcggcttcgactttggcttcgatcacccactcgcccgagatcagctcggactgccccctctcccctctggggagagggctggggtgagggggcagagttcgccacgccgccatcccttcagtccccatcgccttatccaataccgctacgctcgcacccagcactgccaccacgcccgaccgtgctagcatggtcacccagcgcaactccctctccaaaccaatcgatcgcgagtcatggccgaacacgatttccgctacaccctgctcaatcccggacacaccctcaccgaatgtcgcgccctggcaccgggccgttaccaggtcaccggcaacggcggcaacgttcgcgccggcgacgttctgatcgtcacgctcaagggcagccgcgagctctcccagcgcctgaccgtcgacaaggtccgccacctgatcaatccgcccgggcaatggatggctgtagcgactggccccgtattccgcgaactgtcgatcctcaactggcaggtcgattgcgacggctgcggcaaacaactggacttcgagttcgcggtagacgccgccaagggcgaagccgcgcgggccccggccgcggaagcgcggatcgcggaactcggctggaggaacgatgccggccgtcacctgtgccctgcctgccagagggagcaagcatgagagccctcttgatggtcggcttggccgcggcgtccgttacgggttgcgcggtcgagccactgacgctgcagaacgacgtcacctacatcgccgagtggatcggcgacgaacccgtggtcggacgtaacccggtctcgctgaccttcagcgaagaccgcgcgtacggcaacgccggctgcaatcactggttcgccagctaccagctcgacggccaaaagctgcgctttagcgaaatcggaagcacgcgcaagatgtgcgccgaacacatcatgaagcaggaacagcactttctcgaactgctctcgcagatcgagcgctgggatgtctccaagatcgaccaactgcgcttctggcccgcccagggtgctccactgcgcgtctggcccgaacagaactgattgcgccaaagcggggcaccgtctgcgcacgaagcaccttccacaggcgcgcacgccccgtttccaacccgacgccgcccggggcgcccttcataacgcgctattcttcgggcagccgaacctgaatcccgccaccgaaccccgcccgaaccgtgcctttcagccgctctaacccaccggagcggcgctcagctaggccgaagcgacgccgattccgacaatctccagaaactggcacgaccgatgcaatagctcagtcacaaccagtttcgggggccctggtacaggcaggctagggattcccctcttttacagccagaatgacaaaggggccgctcagcgagcggcccctttgtttatcgataaatctctcggcgaaagatcagcggtcgggcaccagcgtagccgccaaagctagcggtcgcgctggggtttgccgcgccgttacccaaccagtcgaagtacagccagccgggcacctgtggagtcacttgcagcgtgccggcattgccggtgcctggcgcactcagggtcagtaatctcacgccttgcgaggccgctccaatcgtgacgctcgtcttgccagccgtcagtctgccggttggattgtccagggtcgcctcgctgaccgcggtgcaattcacatcggccagcgcggtgtcggtgacgaaagccgttccgctccaacgttccaagtaaagcggcaggtttagcgggctaacctctggcccggacgcccccgtcaaccggtaacggcccaaaaccaccgatgcgccactcatgggaaactcgtagtcaatcggcgtgttggttgccgtggcgctggcgacgaagatcccgtctgaatccacaagcttggcgcgtggcgtgaacaccgaaacggttgcgtcgaattggcgatcatcgagccccggactggcggcccgcagataacgcagcgccaagtcgtcgggggccagaaaggttttcgccccgtcacccagaacgtcggagacgctaccgaaagccgaaccgctcgcttccagcctggccgccacgcaattggccttgttggcctccgatgagcaatcgagcgatgccggctgcccagcccccggccggcgggcatccaacgccacgcggccggtattggagaagtaggtgggcgcccagctgcttgcgaaacgccaaaactcctctcgatcgtaattggtggtcaaggtgccgctacggctcataccgctaatcgtcaggctaggcctgccggtaatactcagcggttgggcctggtaggtaatgccattgctgcaaacattacccaggctgccacttcccgccgcagccagataagcgggcgttattcgaccaacattggccgaaaggcctccagccaccgtttcgttatcgaggtaaccacccgctggcggggtaaccttcatgcggaacaccccaacctcggaaaacttcacctgctgtaccacctcggcgctggcagcgctgtatccggacgcacctggcaagtggtcataacttgtccgtccgtcgaggctggtattactggatgacaggctaagcgtacccgccgcaccgccgattggctggaccagctccgagctgatcgcgagattgctgtgccgaaagttgggagtggtcggattgccgacacacaagtcactgtcgccgctgtccgactcccaacccaccggccgaaagcgcaccgggaagccatcgcccgccgcgatgaaagccgggcacgttgcatcacccgccgcacaggtagtcgtcgtggcgtcgctccaggccgcgggtttgacacaaaacccgaccggcttgaccacgaactgcctcgcgccggacatgatcaaatcggcatccttattggccgcgctaccggtatagcgcacattaagctccaacttaccggcgtcgttgtaacggacattgatgggcgcctgcgcattgtcgttgaacttcaggcgcatcgtggtaggggcgctcgcattcgaggaaaccggggtgccgttgacctctaaagaccgaccggcgccggtattgggctcgatgtaggtcgaccataccgtcagatcacggtcgaccttttggaacgccggcacacagcgttgcgtagtctggtccttacggacggcgttgatcatcacttcgccagagagcttgttggatagctgcgtggggatatcgaacacgaagcccgaatcgacgaactcgacggcacaattaacgccaaggctgccggagccgattttgcatttggtttcggtatacggtttggcggctggcgtcgaggcgcccatccccagcgtcacggtgccgctggtcgtacgcaccagcgaaaaagtcccggtgccacctgtaaaggtctgggtatcgctgctgactacgcccttgttcgcggcggacaacgtggccgttgcggtcacaggctcggtgtacaacgagcaggcggcatccaggcaagccttgaccgtgaccggcatcggtgagcaagtcagtcccgtctgtggagcgaagatctcgaaatgatcaatttgcgcgcccaccgcattcatcttgttggcgcaaacctggaggtcatccaactcgtgaatattggcgttgctgcccgtagagccggtaaagctgagcatgaggtctttcggcacggcgccttgaccgctactggtgcgcacgtcgtagggcgcaatcaaggtggtgtaattgttgccggtgccgcctgtgtcacgctcaaccttaaccagcgtcttgccaggcgtacgcgaatcgacggtaatgcgatagagatgtccggggctcggtgtgctggtggccgatccattgtcgatgcccgtcgccaggcttccggtacctgtcagataggcgtattcgctgctaccggaacctcgaatggctactgcatcgctgcgcgagcccaccccacccacacgcccttccgtgggattggaatagttgccgaactcgtcgaggccgacgcccagccagccgccggcgaaaccgggtatgccggttttctgcgcataccccaacgagccgccgaacgcaccgggctgcggcgtcacactcgcgtccgacaggatcaatgccatgccgtccgcgccacggctgctcttgctcgagtaaccgaagtacttgaatgtcacggtgatcaggttgttggcggcaggaaacgttcgttgcacggtggcggcggtcgatgcatcccccgtatcatccgtcatccgcaggcgaccattgacgatcctcggcgtgccaaaggttccactgcgcgaggtgacgacccagtcattgcccagcactgaacgagcgaaggtgtccgcagaggccgtcaggcagctcggcgtgatggcaccgtcgcaaaggtcggtcggagtcgttgccgttggggtgcaaacgccatagacatggctgcttccggtacccgtgatggtcgtattaccccaggtcgccgccgtcacgttgccatttacaacgctgtcgtcgagccggacctcattggtggtgctcatgtttcccgtcagggtcgtgcggctcagaacgatattgttgctcgtcgccgtcacgttacccgtcacgttggtactggtcagagtgatctggcagcagttgctgctgatcgcaccggtcacagagccgccagtaaccgtaacagcaccagccgaggcagacaggccgccgccgaacaccgccgcgttacccacgatcgtctggcccgtaacgttgcccccgacgcgtccaccctccaccaggatcgtgccgtagctattgctgacactgcccgcgatcaccgtgccgctggtcgccgtgacatcgccgccatttaccaggttggcttcaagcgtgcttgccgatagcagactcgttccggtaaccgtcaggttgcttttgaaagtcgtgccacttgcggtgaggttgttgttgacccgggcagtcccgctgattgacgtgtccgtcaggctcgtagcgccactgcttaacagcgtgccggtaaccgcggttcggacaagggtcaccccgccgctgccggcctcgaccgccccgttcacggtcgtggtggtgagagatatcgcgccactggtcgaagtcatcgacccgtagaccgtattggtccccgtagcggtcagcggactgtatccagagttgagcgagacggacctgcttgacgtgccgatcacgttgccgcgtagagtgaatccgccgctcgcggaaacgtttacatcgccaagtggccaatcggcggtaagcgtgtcaccgctacccagcgacacggaccctgagcaataaaaagtcccgctatcgtaagaccaattaccggtacagggtgcattggtgccgtatccgaaataccaataaaaggaatagttcgctgcggatgccaatccaggcgacatgcacagcaacaacagcaagctgcgtatgactgctgaagccttagttcccactggtttcgaccctcgcgtgcaatcgcctgtaggcataatccggacgagccgcaggcgtcggcgcgttttgcgcaacggcgtcgacactgaacatcgtcaccgtcttgccgttctcgcgagccggatagacagtcgctacgcaactgaccgacacgccggaaaattcggccagcgtgccgtccaacgcaagactgccagagcccgcacacgcgccgtccttcacagcacgccggatgccccattcgagaccggccctcgccgcctggtaggcgcgggcctgctgcagtgacaaactcagggacccactggtattgatcgacaggcgcgccatgccaatcaccgccagcgcaacgacgatcatcacgaacagggccgccaccaacgaaaacccgcgttcacggcgcattgtcgactttcacctgttgttgaagggtgatggattcgccgtcacgcgtgagtgtcaggctcagcgtcaccaatcccggtcgctgtggcgtgcctggctggtagttgatctggcagccggttacataaggcgccacctgaaccgcatctgcgggcgctacgcttggcgccgtagcgctgagagtcgtacgggtatagcgcaccaactgcccgccgctggcggacgggtcgcaccggtagccaattacctgatcggccaggtagaaccgccgctggggtgaggggtaagcgaagatgaaacctgcgctcgccgtgccgcccagcgtgagctgggtttcgccggagaccgcgttggccgccgcactgaaggtggtgccagtcggtgtgatgacgcccggattggcataagcccagacattggaaccgaccgtcggattgccgccactgctggcgcccaggttatacacgaccatccaccgggcgccggtaacatcgaaatcccgttcaagcacctggaagccatcacagcgcccattggctgtatcgcaaccgctcacgtcggcagagaaacgcaggccttcgccaccggcacggttggatacgtagcggccagcgttgaggatattgagcgtctccagggtacgaccgtcgacagactggcgaaccgagttcggcacggccaggcgaacgtcgcgcgccatacgattgagcgccaccgaggccagctcgacgagctcgccgcgccggctctggtcgatgaaggcatcgagcggacgcttgagcacggcggtaatcatgaccaggaccacggcgctgagcgcgatgacgatcaccagctcgacgagcgtaaagccgcgcaatgatttcatgggcagcgatccacgccactggggtcgatttcgccgtaacacgtacgcatcccggccatcatcaaagactggcctgacggatcggtaacggtcacgtcgatgcgacgtgccggcatgccgttccacgccgccagagtggtaaccgcaacccgtacccgataatccgataagccagtgatggcgtcgcccgccgcgtcacgaacgccctgatcatccaaaccggcgtaatcacagatatcgtcgaagcgtgcgcgtggcagcccagccgtcgctgcacagctcgcggtgttgaagctgctcgggtcgaggtaaggctgagcgagaatttcttccaggtagccctcggctacagccaagctttgctggcgcagcatggggtcagcagagcgtccgactatcgaagccatcgcggaatagagggccgcagcggcaatcccgatgatcacgatgctgatcaccagttcgattagcgtcatgccgcgctggcgcttcatcgcaccagcccggtttcggcggtcacgctgaagctgaacgcaccgatggtggcattcgccgcgccggacggacgtcccagcgagtcgaacaccacaggaaattgggtcgccgacaccgcgacccccgagggtacggtgttggcgaagggaacctgaccatccggcccctgcgcatccgcgctgaaattgccggacgagcaatcggcagctcgacgcacgcggtagccattggcgtcgaggctgacctggatcagacagccgctggccaaggccagcttttgcgcatagcgcacggctgaaaccgtttcctcgaagaacaggcgttcatcgaacacctttcgatcgaaaaaacgcggccccaccacagcggcgaggatgccgatgatgactagggtcatcaccagttcgacgagggtgaagccgcgttggtgggtcatacaagcgctcgtagctgaaggtaaaactcgtgcaggcagtcgctatgaacgctagtcacgatgattacggcgcagaagcaagctacgagtcactcgcacttcgagacatcaagggtgatagttggagcaccgttttcggcggcctcggtgtacttgacttggcatttggtgacgtcagtaacgttcttcgccgatacggtggccggggcacccgcgactccaacagtagcgaagtcatccgacgaaatttgcgctgcttgaaggatccctgccgatgtcggataaccattaagcatagggatcttaacgccttccaaagttacagtcgtgacagcttcgtcacctgtaccggtggtttcttttttcccggcgagaagtgctgaatgggcgatagcggatgcagacttgattgccccagcggcccccttaacagaggcggcacgtgcatcggttccgaaatccgcaaatcgcggcagcgcaaacgccgccaaaatccccagtatcacaatcaccataatcagctcgatcatggtgaaaccgctttgttgcttcttcatggtgttgctcccgttgtgtaatcagttgaacgtgacgaaaacttcgccggtattggcgttgtactcgatgatgtcgtcagccccatcgagcgtgtaggtgtacaggcagcgggtgccgttggccgtggcggtgaaggccgcctggttcccgttgaccgtgggcgccgatgcttgcagcaggttgccccatagccgccggcattcgtcggcggtcatagtcgtgttgattcccggcgtcccactgcgctcggtgcctaccggccaaccggccgcgttgacgtcgagcgttccgttgccatagcccgccacgttgatctggcagttgccggcggcgcaaaggttggtgccgccattgcgattgagctcgtattgcccgcgcagcagcgacaccgccgaggtgaacgccccgccagcgctgcgtaccgcggcacggtgagcgtctttggccgaatcgatgaagtgcggaagcgctactgcggccaggatgccgaggatcgcgataaccacaaccaactcgatcatcgtgaaacctgtttgcgctctgttcatgcgttgccggttttctgtcatgagcctttccaatttccgttcagtagcaattgccatgctggtttcttcggctgccgaccggcggccgacggtacgccgtcatcctctcccctgcgccgctgcgcccagttcccacatcggcaggaacacaccgagcgccagcaccagcaccatcacgcccatgcagacgataaggatcggctcgatagcgtcggccagttgcttgaggtcgtagtcgacttcctgttcgtagaaatcggcgacttcgataaacaggtcgtcgagggcgccggtttcttcgccgacggccatcatctgcagcaccagcggggtgaacaggccgctgttgtacgctgagcgtgtcaaggcttcgccacgttcgacgctttcgcgaatgccgagaatggcttcgccgatatgccggttgccgacgctggcgctgttgatcgacagggtctgcaacaacggcacgccggcgcggtacatcatcgcgaaggtgcgggtgaagcgcgccagggcgatgcgctcgaagatgccgccgacaatgggcaggcgcagcttgatgcgatcccaatgcagtcggcccggatcggtctcgatccatttgaagaaggcgtagagcccaccgacaatgccgagcagaagcagccaccaccagtcgcgcatgaagtcggaggtgccgatcagcacccgcgtcgcccagggcagctgcgcgtggaattgcgcgaataccttggcgaaagccggaatcaccagcaggttgatcaccgccagggcgacccccatcgcgaccatgacgaagatcgggtagcgggtggcctgcttgatgcgcttgcgggtttcgcgctcgagctccagataggctgccagctgcttgaacgcctgatcgagctggccggtgttctcaccgacgctgaccatgctgacgaacaggttgttgaataccctcgggtgcgcattgagggccacggccatggattggccgctttccaggctggcgcgcacgtcctgcaggatctgccggaaaaacaggtttcgattggattcggccaagccgccgatggcgcggatgatcggcacgccggccttgctcaggctgtacatctgccggctaaagatgatcagctcgtccagatcgacccgcttgcggcgcagcttgtcgcgcagcagcgccagcacatcgccgctgccggcggccccggcatcgctggcatcgatggtcaacggcgtgatctgccgggacagcaactcgccggcaacggaatccgcgctggcaccctcgagttcgccgctgaccttgacgccctgcgcgttgcggccggtgtaacggaagctcggcatcagactgctgctccccttagaaatacctgcgcaacgtgcccaaggctcgccagcaagctggcccctacgggagcggtacggcgcggcaccggcacgacgttcacgccatcacctcatcgtccgccagggtcgcgcagactttcagcacttcatccacgctggtgacgccggcgatcgcgtagtccatggcgcattcggccagcggacgataatgcggctgctggcgtgcagcttcggcgaagccctgcggatcgccgcgacgcagggcggcaaccatggcttcatcgagttcgagcagttcgtagacaccgatccgcccgctgtaaccactgttatggcactggtggcagccgcttcctcgatagaagcgttcgcccgccagggagctgccatggagcgcctccagccacgccagctgtcgcggatcgggctggtgttcttcctggcaattttcgcaaacacggcggatcaagcgctgagccaggacagcattgagcgcagtggctaccagaaacggctcgacgcccatgtcgatcaagcgcatggcagacgtcagggcgtcgttggtgtgcaaggtagacaggacgaggtggccggtaagcgcggcacgcaggccgatctcggcggtctcctggtctcggatttcaccgaccagcacgatgtccgggtcctgacgcagcgcggcgcgcaggacgcgagcaaaggtcaattcgatcttggcgttgacctgcacctggttgatccgcggcaggcggtattcgaccggatcttccacggtgatgatcttcttctccgggctgttcagctcggaaaggccggcgtagagcgtcgttgtcttgcccgagccggtcgggccggtgaccagcaccatgccgtgcggccgttgcagcaggcgccggaaccgctccagcatggccggcggcatgcccgtaccgtcgagctggaacatcgcgccgctctggtcgagcagacgcatgaccaccgattcgccgaactgcaccggcatggtcgagacccgcacgtcgaggttgcggttcttgacccggatattgaagcgaccgtcttggggcaggcgtttttcggatatatccagacccgacatgatcttcaggcgcatcaccaatgcggaagccacgcggtgctctttcatcacctgctcgttgagcacgccgtcgatacgttggcggatgcgcactacgccttcgtcgggctcgatgtggatgtccgaggccttcatttgtacggcgtcctcgaacagcgtttgcagcaggcgcaccactggcgcgtcgctgttgctctcggctcccaggcgcgacaggtcgaagtcgctctcctgcagctcgccttccagttcgccggccagcgaggcgatctcgctggtgcgccgataaagctgatcgagcgcgccgagcagttcgttttcgcgcaccaccgcggggaatacccgcttgccgagcaggcgctccatctcgtcctgggcgaacaggtcgagcgggtcggtcatgccgaccagcagaccatcggcctggcgtgacagcaccaggacccggaagcgccgcgccaccgcctcgggcaggctctgcgtcagctggttgtcgaatttgtagtgcttgagctcgacgaagggaatctgcagctgctcggaaagcgcccgcagcaagcgcccttcgtcgatgaagccgagatccagcacggtacgtccgagcttggagccagtgcgtttctgatcctgcaaggcaagttgtagctgggcttcgctgatcagtccggcctgaaccaataggtcaccgagacgaatcttgcgctggcgaaggtcctgagtcattgcgtccctcccaaggaaccggcgcgttcgctggcgaactgacgcgcgctgccatccaggccctgcccttgcagagcctgacgataatgctggccggcctgcgccggctgatcgagctgctccagcgcgatggccaggccgagctgccaagcgccctgatccggtcgcacggcaaccagttgccgataggtcgcggcactggacgaccaatcaccgacctgctgatagagcgcagcaagcaacgcgtgatagctgacgttgcggcgcaggtccggtgcactctgctgtaacgtggcgatggcggccgctggatcgcctacctgcaactggccacgtgcgagcagttcacgaagctccgcatcgaacggccgcacctgcagttgagccggcagccacctcagcagcgcagccgtgtcgccggccgccaggtaggcccgggccaaccatcgggtgacctccgggttgtccggctgggcgagctgcaatgcttgcagttgctcgatggcccgcaggtgatcgcctcgcgccaacgcctggcgcgcctcgaccagcacatcggccttgtgcgcgccgatggacaatgtcctgggaccagcaggcgccgatggctcggcgctcggagccggccgagcgctggacttctgcgcgacaggcgccggctcacgtggcgcttccgtcgcagcgacctcgcgggtgacccagtccggcagctgcgcttcgtccggctcggccggttcagctaccggcatcgatacgttctgcgcttcggcgtcattggcgtcacccagcggcacatccagccacagctgcgaccgatcgccagccgactcgagacgatcggccacactcaggcgatcgccgaaaccgaccagtaaaatctgaacgtcgttgccctgcgcctcgacccgccaggacaaggtctggccatccttttcaatgcggccggagcgaacctcgcccgtgtacccaacgtcttcgagccggaaactaaccgaaccactcgtgtcggttcgctcgtagctgacggagtgatcgagcaacagctggagcacgaaacgtcgcccatcgttttgcggcagcacctccagcaaacgcgtcgatgcaatggcctcgagcaccggtgcgaccggctcggctggaaccggcgcgacgggagcaggcgtgaccgtggcggactctgcggtccaacgcaggcgatcgccaagcagcaacagggcagcgaccaccagcacgatcgcggcgatgaccgccccgccccgccacaaccgcttgagccgcccacggcgtgctgcgccgcgttcatccacggcgtgaagggcgcccagctgctgccgttcggcaggcgccgctcgacgcgcgtcgagatcacacagcatgtcgttgaccaggctcatggcagcacctcgaccaattgatccagccagggccagaggccggcgatcaacgccagacaacccacagccaaggtccagccgaagcgagacgaagcctgtcgccagaagggccgcgcgccttcagtgtcatccagcgcccgacgcacatgccgcgccgacacctggcgggcgccttctccaaacgccaccatcaggcatttgttggacaggatgttgatcaaccgtggaataccgccgctgccacggaccaataagcggaccgcggcggcctggaacaacggctcgcctcgataacccgccaccgcgaggcgctcctgcaggtagcgcgtggtgtctttgacgtccagcgggcgcaggttgtaggagaacgtgatgcgctgacgcagctggcggaagtcctcgcgcgccagcgtctcgtccagttccggctggccgaacagcaccacttgcagcagcttgctgtgttcggtttcgaggttggtcagcaggcgcaacgcttccagcgtcgaggtaggcagtgcctgagcttcgtcgatcagcagaaccgtgcttttgccctgcccggccaggtcgatgaggcggctgtgaagggcggcgagcaaggcgtgattgtccaggctttcaacctcggcaatgtgcagctcgtgcgccagcgcctgacgcagcgtcatcggcgtcagtgtgggattgggcagccaggcaacctgatagcgggcgccgtccagctcgttcaacaacgcacggcagagcaacgtcttgcccgtgccgacctcaccggtaaccttgatgaaaccctcgccctcggccagagccacacgcagcaggttaaggcaggcctgatagggggccagctggaccatgaagccggtatttggcgtcagtgcgaatggcttttcgcgcaagccgaagaatgcttcgtacattgccagcgcttacctgatcgaccggaacgattcggcggacttgcgcagatcgtccagccaggcctggtcatcgaccacctgcggccgcatgagaatcaccagctcggtctgctgcagcgctttgcgctgttgctggaacaacccacccaccaccggcaatttggaggcccagggaatgttcgcgtcggtgttggtgttgcggttctccagcagcccgccaataactaccacctggccgctgcgggcacgcacgatggagtcggattgtcgggtcgtcgagagcgccaggggcaagttgaagacgttgtccgaaccgcccagctggatgctcttgttctgatcctgcacgcggctcacggtgggacgcacatgcagcgtgacctgaccgttctcatcgatctgcggggtgacatccagcgagatgccggagaagaacggcgtcagcgtgatgtccagatccggcgcggtggtgccgccagccagggaagtggtggtggtcgacacatcggtgacgaagaactcgtccgtgcccaccttgatcaccgccttctgattgttcagcgtggaaacccgcgggctggagagcacgcgcacgtcgccctgggtctccagcaattgcagcacgccgctgaagtcgcccacctgcacggccgcgctgaacacgccgcccacgttattcggcccgctcaaggtatcgccctgtacgcccaggctgaactgcgcattgcccatgctgcccagttgcgcccagttgatgccggactggaagccgtcggacagattcacttcgaggatcttggtttccagaatgacctggcgttgcaggttgcgctgcgcctgggcaaggaagcgctccaccgcttgctggtcgctgctcggcgcccgcaccacaagcaatccagcctgtgggttgaccaccacctggttgccctgctcgtcgccgatcatcatctcgaccacgccgcgtacctcgctccacaggtcgacgttgctggtggtcatcaactggctcgcattcaccgtcgcggaggtgctgctggtcgtggtgccggccgcgccaacgccggtgttttcactgttggtgacctggccggagctgacgcgggtatcggtggtgccctgacgctggacgttcaggtagttcaggtcataggtgcgggtaatcgcctgattcggctgaatctgatagccgtaggcggtgcggcggtagtcatagccatagctgtcacgcacggccgcgagcgcttcctcgagcgtgacgttacgcaggctgaacgtcacgttccctgtcacgccgggatgcaccaggatgttttccccggcgctgtccatcagactgagaaagaactcccgcgccggcatgtcactgacggccacatcgaaccgtggtccggtaatgggctggctgtccgcggcgggcagcggcggaatcagaccggcctgtatcgaggccggcggcgcaaccttctgctgattctgctccaggctttcctggaacaggcggttgctttgctcatacaggcgtttgtcgccatcctcgaaagtctggcaggcaggcagcaggcagaacaggctcaacgcgccgaggcggagcatcagggtcggcatcatggcagggtacggctcgtttggatgattgaagcgctcaggcgcagttcttgttgccggccctggcgttcgatgacaacggaatgcctgcgcaccgccaggacgcgcatgtcgcccaggcgctcgccgaccttcaggttctgcccgttgatcacggcgctggcgcgctcggggccgcgcagaatggcctgaaggtgcagttcctctggcgcttgcgtcacggcgtcgctgacaacgcgctcggcgggtggttgagtgggatccacggcgaaaaccggcgcggtgaggagcaatgcaaccaggccgatcgtgctgacttcaaacttaaacacccacccaccccgcgtcgcgactcaacgtatgcagatcgagaatgacgtgggcccgaccggcaccgccctcgcccacctggtaatccagcgcatcccaatgcaggcgccaaccgctggactggatcgctttgaggtaggccagcaggtcgaaataaccgccttccagggtcaggcgcaggccgtggcgatagaacaccacgggcgtcggcttcccctcggccggttcagccggcatcgccgctggcacagccaacggggcactggaactctcaagggaaaccagcttcagcttcgtctggttgcgcaacaggtcttgcagcaatgctttcatgttcgccggcgataccagcgtgctggtctccaggtcgatgcgccgaagcagctcatcgtggcctgcctgcgcagtcgccaatgcctgccgatagctcaggttgggatcggcggcaagcttggcctggatctccagcaaactgttctcggcctccagttggcgtgcatgggcgagctgctgtcggctggcctcggcagcgacacgcaggcccagcggctcggcaaccagtagcaggtaaagcatgatcagcagcgccagcccgacgccataggccagccattgctcgcgtggcgccagggcccgccaatgctggatgagcttattcatcgccccgctccgccaatgcttgcgaggccaaccggaaccgcagcagatcctgctcgtcacgctgtaaatcgaagtgagcgaaatcgcgcccgctaaacgcactgctctgtcccaggctgcgcagatatagcgggagcagttcctgatcctgcgtcaaaccctgcagggccaactcatccccgccggcctgcagccgaatgctcgtcaaccagagcccgcgcggcggatgccggtccgccaacccttgcaacaacgccacgaagccggagctgcgctgagcgtcgagtgtcttcaggtaatcggccaggcgctgcagctcgcggttttccgcttcgcgctcggccaactggcgtggcaacgcgggatcgagcactggctcttgaaagcccgtcttgactacatcgagcttggccacggcctcgtcggcctgccgctcggcaatcgccgcggcctggctggccgaacgcagttgccagccctgccagccaccatggctgatcagcagcaccgcaagcagggcaatacccaggcgcatctggcgtggcctcgggccgccgccacgacgacgctcgcgttgatagagattgatgttttgcatcagattttttcctgacgcagggcggcgccaacggcaccgatacagaacgcctggctcggctcgggaagatcgctcgccggttgcccggggaacaggtcacgcaggtccaggcgctgcagattgacggccaggccgctggcaagcgcctggtgggtccgctcaccgtcctgtttcatcggcagaagcaacagccggctgatgtagcctttgcccagctggctctcgtagtaatcgagcgagcgctggatttccagcgtcgccccggacaggtcgtgctcggcgcgcgctagtccgtgctcaatacgccgcgccatgtacaggtcggcaccgttctggacgatgatcaagccttcgctggtacgcaggcgcagcaacgccaggttggtcgccccagcgccggccagcaggcccagattacgcaaggccatttcggtgatgtcgatgcttgccagccgcaatcccgcgtgttgcaccaacgcgcggtactccttcattcgcgccttggtcagcaccacgcaatagaccatgcgggtgcgcccgcggtacgcatcatcgggcagcgcgaagcaatcgatgaccacgtcttcaagcgaatcgccgatcaaatccttgacgcgccagcgcatcgcgtcgcgcagctcttcggccggaacgtccgctgcttccagcaagaacatctgataagcggacggatggagcagaaaattaacgggcagaccgcccaggccgtggtcggcaaccgtctgcttgagccgctcggcctgtgccgcaggttcacattcgaaatagtcgcaacgccgcagcgttggcgtctggccattgcgctgcacgtgcgcaagcgcaatgccttgcggtccggtttcgagaccaagcagactgcctgtcgcagcttcacggcgtttgaaaaacaaccccatcgggatatgaactcctggtacgactcggtggttcacaggcgctttttattggcgatcccgaacctctggcgataagcaactatcaaattgccattactgcgacgcgactctaacaaaacgaaacggcaggtccaaatgcgacacgcttcgctgtctgcaaccgatacgcgtcaaattaccgcgaccacttatttatcggccggtctggaatagagctacaaaccgctcgtcgagactgaccatggcaaaggcgtctggaatatggcggccggtgcacttgtcgacacatcgagcaacaggcgtaccacaaaggcgggctagcgcgtttcgcgctgataatggcgaccagcggtctagaacagccggagctgctcgaaaccggcgcgcagatcgatcaggcggaccccgacgccgatcagccgcacggggcgtttaccgcgggcaaaagcgcctgcgagcaggtcggcatagtcttcgagttccaggccggcgccggcctgctcgagggtggtctgggtgaaatcgtggaacttgagtttgacgaagggcttgccggggcggtaaccgctgtcgagtcgcgccatacgcccggccagttgctcgagcagctcaggcaggcgctcgaggcaagcggcgagatcaggcaggtcgcggtcataggtattctcgacactgaccgactggcgccgactctcgacctgtaccgcacgctcatcgatgccgtgcgccaggccccacagccgttcgccaaaggagccgaaatccctcaccagatccagccgccgccagctgcgcaggtccgcacagctgtgtatgcccatgcgcttgagcttctcggccgtgacccgccctactccgtgcagcttggttaccggcaacgcctggacgaattcatcgacctgatccggggtgatcacgaacagaccatcgggcttgttccagtcgctggcgatcttggcgagaaacttgttcggcgccacgcccgctgaaaccgtaatacgcaactgttgccagacacgccgccggatatcttgcgcgatgcgagtagcgctaccggcgaagtgctcacaaccgctgacatcgagaaaggcttcatcgagcgagagaggctcgatcaggtcggtgtaggtgcgaaaaatgccatggatctcccgcgacgcttccttgtaggcgtccatgcgcggccgcaggatcagcagatccgggcagagcttcagcgcatggccggacgccatggccgaacgcacgccgtaggcgcgtgcttcgtaattgcaggtcgcgatcacgccgcgacgatcggccagccccccgacggcgatcggccggttcgccagactggggtcatcgcgcatctcgatcgccgcgtagaagcagtcgcaatcgacgtgaatgatctttcgggtcgcgttaacggtgctgcactcgtgtttggtgccgggaagcgccacgcggagcggcgctggctcggcgcgcattattgccgatattcagcgcgccgagccaacgaccagatgatcagcatcggccgagtttctcggtagtgcggagcgagcgccatcaggcgccgacagacggggtgaaggagcctggaaaccgtcgagccaggcgctagagcggttggtctgggcgtcacgcgagggtacgaaacgccagaccggaaggtcacggcgcctggtccgaaccaatatccgcaggcctcagtcggaattaatgaaccgaagacttcttatcgacgccggagaccactatgaaactacccactaccgctattgcaacccttaccctgctgttcgctagcgccaccatggccaatcaggacgatatgcagcaccaaacccatggcgccgccggcgatacccagggcagcgcgatgcaggagaaccatcaacgcgcgaacacggccaatgtagacgccaacggcaagagcatggatcgcaagatggaaaaggaagtgcaggacgactggcgtgaagatgccaaggaacgccgtgacgccgacgtcagcaaaccggaacagcgctgaggcgagccgctacagctcgagggggtaaggctgcaccaatgccttgccgtacccctcgacgaattccgctggcattcgcttgggcttgcctgaagacagctgaatgcagacgaaggtggtctgagcgcgcagcagcgtggtgttgtcgatgggcctgatgagctggaaatcgcggcgcatcttcaggcgctgatcggaatcgacgatccaggtcgccagttgcaggcgatcgccctgataggctgccgccaggtaatcgatttcatgcctgagcacggccatggcacggtccagccgacgatagtcctccaggcccagccccaggctttgcgaatgctgccaggcacatcgctccaaccaggatacgtacaccgcgttgttggcgtggcccagctcatcgatatgctcggcctcgacagtgaaatcaatgatgaacgcgtcggtccggtcccagatcatgcctatcctcgctgtgcagtgcgtcttcaggttgcggtctattggaagccagacgccgccggatgtcacgtccgtgacgatcatctatgacaaagcattcagcactgcgcatcgtttcagcctgatgaacactattgccagcgctgacaacggatgaaatcgcgcccaaaacaaaaagggccatttcgtgagaaatgaccctttgatgcccaaaacgggcaaaaaaaaatggcgtcccctaggggactcgaacccctgttaccgccgtgaaagggcggtgtcctaggccactagacgaaggggacgaaaccttcgatgaacagatcggcgaaccgctacgacctgtcgtggattggtggagctagacgggatcgaaccgtcgacctcttgcatgccatgcaagcgctctcccagctgagctatagccccggatttaacgtctcccgactcgcgccgctttcgcgtcgcgatctgaataatggcgtcccctaggggactcgaacccctgttaccgccgtgaaagggcggtgtcctaggccactagacgaaggggacgcaaagcccttcaaaggcgaccggcgtgaaccggcgtggcaatcgagattggtggagctagacgggatcgaaccgtcgacctcttgcatgccatgcaagcgctctcccagctgagctatagccccatctcgaggacggggcgcatattaggtgcggccctgcggggtgtcaacgatatttttacctgagcccaaagatttttcggcagcagaacaaatacttaccggtgacgagcggtacaggacgacccgcgcgcggcggcgccaggcgcacgccgccttgtcgctcgggtcatgccatggcggcgaaaagcttttcccactccttcacttctttcttcgacgccccgcccaacagctccagcgcctgacgcagccggaagcgcgtgaggtccgggccgatgatttccatggcatcgagcaccgataccgagctggcctggccagtgatcgaggcgaacatcaacggcatgacgtcacgcagtttcagttcgagatgcgcagcgaccgcattgatgcagtcggtgatgcgctccttgtcccactggcgcagcgcttcgagcttccacagggtcagctgcagcacctggcgaacctgcgtggcgtcgagcttcttgtgctcgaacagcgcgggatcgaggttcaacgctccagagaagaagaaaccagccagcggcgcgatctgactgaaggtctccacgcgctgctgcacatgcggggcgatctgcatcatgtagtcggggttgaacgcccacttttgcactgcggcggcgaactgctcgaccgacagctcgcgcaaccactggccattgagccaggacagcttttcgatatcgaagatcggcccgcccagcgatacgcgattgatgtcgaagtgctcgatcatttccgccagggtgaacttctcgcgctcgtccggcatcgaccagcccatgcggcccaggtagttgagcatcgcttcgggcatgaagcccatgcgctcgtagaaggtcaccgaggtcgggttcttgcgcttggacagcttgctcttgtccggattgcgcagcagcggcatgtagcacagttgcggctgctcccagccgaagtattcgtagagtttgatcagcttcggcgccgacggcagccattcctcgccacgcagcacatgggtgatgcccatcaggtgatcgtcgacgacgttcgccaggaaataggtgggcaggccatcggccttcatcagcacctgcatgtccatgcgatcccagccgatctcgaccgtaccgcgcagcatgtcgttgacctggcagacgccctcgctcggcaccttcatgcgaaccacatgcgactcgcccgccgcgatgcgctgctgagcggtttcggccgggatatgcatgcaatggccgtcgtaacgcggcgtttccttgttggccatctgctccgcgcgaacctgatcgaggcgctcggcgctgcagaaacaggggaacgcatgccccttggcgaccagttcgtccgaatacttcttgtagatctcgccgcgctcgctctgccgataagggccgtgcggcccgcccacgtccgggccctcatcccactcgatgcccaaccagcgcagcgcatcatagatctgctgctcggactcgcgcgtggagcgcagctggtcggtgtcctcgatacggaggatgaactggccgccgtgctggcgcgcgaagcagaggttgaacagcgcgatgtaagcggtgccgacgtgagggtcgccggtgggggatggtgcgatgcgggtgcgaacggtggtcatgatgttctcggatcaatgcacggaaagacacggcagccgacgatagccggctcggtcggctgagtcagcgcgtgtaaaggcgcgatgttaacaggcgcgcctccaccggctccaccaggcgtccatcggtaaccggtagcgactgcatcaggaagtcgaggaaggctttgactttcatcgcctggaaacgccgggagggatataccgcatacacttcgccggtcggcagctcgacgtccggcagaagctcgatcagatggccgtcacgcacctcctggtcagtgatcatggtcggcaacgcagcgataccggcccccgccagcgcagcctcacgggcaaaggtgatgttgttgcaggtcagcacgcgacgacaactgacgttctgctccaggatcggccagtagcggacaggatcgcgtgacaggctgatcgcacgatggcgcgcgagatcctccacctgcatcggcacgccatgttgcgccaggtaggcgggactcgcgcacagccgccggcgggtttcgaacagcttgcgcgcgatcaacgtggagtcttgcggctgaccaaccaggatgacgatatcgatcccttcctccaccggatcgacaggccgcgcggccaactccacctcggcattgatatccggatactggcgcatgaattcgcccagaacccgccccagcacccactggccgaactcgatcggtgcagtgatccgcagcagcccggccggcgcctgctgcagttgcatgaccgcctgctcggcttcggcgaagtcgagcatgatctgccggcaacttccgtagtaggcctgccccacctcagtcaaccgcaacctgcgcgtggtgcggttgatcaagcggacgccgaggcgctcctcgagctggacgatccgccggctaacggtggatttctgcatccccaggctgagcgccgcttgggtaaagctgtggcactcgaccacacgggtgaagatcagcgcgtcgtccagccccatggattgttccttatgcgcaacaaagtttagcgattgtaacgacttattacgcagcaggaacactggtagattgaccggctcactttccggtcacgagcgacgacatgcccaccaagctgcaacgccgactgttcgtcttcatcgccctgctgctgctcgtcgcaggcgcctttttcgcccactggtacttcgttgggcgctactacgaacacaccgacaacgcctacgtgcagggcgagatcacacgcatctccagccaactcgccgcgcgcatcgagcaggtccacgtgcaggacaaccagcatgtccaaccaggcgacctgctggtaaccctggaaccgggcgactttcgcctcgcccttgagcaggcccgggccaacctggcgatccgcgaagccgaactcgcccaggctcgaagccgcctcgctcaacaatccagcctgatcgccgccagccaggcgtcgctcggcgcggcgcaggcgaatctcgagcgcagtcaggtcgatctgtctcgggtcgaggcgctacgcaaacccggtttcgtctccgaggagcgagtcactaccctgtccgccgacgctcgagtcgcccgctcgcagcggcagaaagccgaagccgacctggccgcccagcgccagcagatcgatgccttggaggcggacgtcaaacgcttgcaggcgcaaatcgaaagcgcccgtgccgagatcgcacaggccgagctgaatctcggccgcagcgaaatccgatctcccatcagcggcatcgtcgggcagcgctcagcgcgcagcggccagtatgtgtccgtcggcgcctacctgatgtcgatcgttccggacgaggaaatctgggttcaggccaacttcaaggaaacccagataggacgcatgcgcgaaggccagagcgccgaactgaccttcgacacctatcccgacacaccgatcgaaggccgcgtcgaaagcctgttccctgcctccggcgcccagttcagcctgttgccgccggacaatgccaccggcaacttcaccaaggtggtccagcgcattccggtcaagctgaccttcgccagcgacaacccgctcaacggccgcatccgccccggcatgtcggtggacgtgaagatcgacatccgtggccgctgatgcgctgatccgcccggttggcgaacccagccggcgcgactggatcgcggtgatgagcgccatgctcggcgccttcatggcggtgctggatatccagatcaccaactcgtcattgaaagatattcagggcgcgctctccgccacgctggaagaaggctcctggatttccacctcctacctggtcgcggaaatcatcatgattccgctgaccgcctggttagtgcagctgctctcggcgcggcgactggccgtctgggtatcggtcgggttcctcttctcttccctgctctgctccttcgcctggaacctcgaaagcatgatcgtgttccgtgcgatgcagggctttaccggcggcgcgctgattccgctggccttcaccctcacgctcatcaagctgcccgagcaccatcgtgccaagggcatggcactgttcgccatcaccgccaccttcgcgccctcgatcggcccgactcttggcggctggctcactgagagctgggggtgggaatacatcttctacatcaacatcccgcccggcctgctgatgatcgccggcctgctgtacggcctggaaaagaagccgccgcattgggaattgctgaaaagcaccgattacgccggcatcgtcacgctggccatgggcctcggttgcctgcaggtgttcctcgaggaaggtcatcgcaaggactggctggaatcgacactgatcgtccaactgggctcggtggcattggtcagcctgatcctcttcgtaatcctgcagctgtcccgacccaatccgctgatcaacctgggcattctgcgcgagcgcaacttcggcctcacgagcatcgccagcctgggtatggggctcggcctctacgggtccatctacctgctgccgctgtacctggcgcagatccagaactacaacgcgctgcagatcggccaggtaatcatgtggatgggcattccgcagctgttcctgatcccgctggtgcccaaactgatgaaaatcatcccgccgaaactgctatgcgcggcgggattcgcgctgttcggcctgtccagcttcgcctccggcgcgctcaacccggatttcgccggcgatcaattccacccgatccagatcatccgcgcgctgggtcagccgatgatcatggtgaccgtatcgctgatcgccaccgcctatatccagccacaggatgccggctcggcctcgagcctgttcaacatcctacgcaacctcggcggcgcgattggcatcgccctgctcgcgaccctgctcgacagtcgcgccaagatttatttcgactatctgcgcgagtcggtggtgccgagcaacccggcggtggccgagcgccttgcatccctgactcagcagctgggcagcgagcaggctgcgctgggaaagctcagcgagatcacgcaccagcaggccatgatcatggcctacaacgatgcgttccatttcgtcggcatcgcgttggcgatcagcatggtcgccgtactgctcacccggccgctaccacagaacgtacaagccggcgcgggagggcattgaggcgcagggagaccagcgccccaccacggcacggggcacccgcttctgtaggagcaggttctacctgcgaccccgcacacaccgacgccacccaatcgcaggcagagcctgctcctacagcaaggcacacgcccaatcactgcacggagccctcgcttctgtaggagtaggttctacctgcgacccggcgcaacaccggcgataacccaatcgcaggcagagcctgctcctacagcgaggtatacgcccagcacagcgcggagccctcgcttctgtaggagcgggttctacctgcgacccggcgcaacaccggcgataacccaatcgcaggcagagcctgctcctacagcgaggaatacgcccagcacagcacggagcccccgcttctgtaggagcaggttctacctgcgacccggcgtacaccgacgccacccaatcgcaggcagagcctgctcctacagccagccgctcagagccagactgcatcccatagcgggtaatcaccaacatgctgcaccagccccgctcgcaacggattggcgacgatatagcgcgcgattgtgcgaatgtcttcctcgtgccgaacggctcgatcgtgaaagccccgctgccagacctggccggtcttccgccgagaagcgttgacggctttggcgctgcgggacttgacgctggcgagaaccgtgtcgagcggctggtcgcctaactcgaagagccaatgcagatggtcgggcatgagaacgaaggcgagcgaacggagctggtcgttcgtgtgtgcgctccgcatttcgtcgaccacgagccgccccagacgccagtctgagaacaatgcttcacgtgcctgaacgacggtcgtcacgagataaacccgccctggctccgagtaacgcccgcgacgcagactcctggcacctggcttgtgttgttgcattccattgctccttctggctctccttcggtacctgttcgcaggcagagcctgctcctacagcgaggcacatgcgccaccacagcgcggagccccgcttttgtaggagcaggttctacctgcgaccccacgccaccagcgacgcccattcgcaggcagagcctgctcctacagcgaggcacatgtcccatcactgcacggagccccgcttttgtaggagcaggttctacctgcgacccgacacgccaacagcgatgcccaatcgcaggcagagcctgctcctacagcaaggcacacggccaccggagcccccgcttttgtaggggcaggttctacctgcgacctcatgccaccgacgatgcctaattgcaggcagagactgctcctacagcaaggcacacggccaccggagcccccgcttttgtaggggcaggttctacctgcgacctcatgccaccagcaacgccaatcgcaggcagagcctgctcctacatagaagcgcgtgcctgcgatcgctcctatcgcgctgatcttccctacacctgcagcaaccgctcgcgcagcttgtggatttcgtcgcgtgtctgcgcggcggcttcgaactccaggtcgcgtgcatacgccagcatcttctcttccagctggcgaatccgcttggtgatctcgcttggcgaccgtagctcgttctcgtagcgagcggcctcctccgcggccttcgcctcgccgcggcgctttttgctgcgcgaccctggcacggttgcgccctcgagaatgtctttcacatccttgaacacacccttaggtacgatgccgttggcttcgttgaaggcgatctgcttgttgcgtcgacgctcggtctcgccgatggctcgttccatggagccggtcatgttgtcggcatagagaatcgctcggccgttgaggttacgtgccgcgcggccgatggtctggatcagcgagcgctcggagcgcagaaaaccttccttgtccgcgtcgagaatggctaccagcgacacctcgggcatatccagaccctcgcgcagcaggttgatccccaccagcacatcgaacacgcccaggcgcaggtcgcggatgatctcaacgcgctccaccgtgtcgatatccgaatgcagataacgcacccggacgccgtggtcgcccaggtaatcggtcagatcctcggccatccgcttggtcagcgtggtgaccagcacccgctcttccttggccacgcacttgttgatttccgagagcagatcgtcgacctgggtcagcgccggccgaatctccacttgcgggtcgaccaggccggtgggcctgaccacctgctcgatcacacgccccgaatgctcggcctcgtatggcccgggggtcgccgagacgaagatcgtctgcggactgatcgcctcccactcatcgaaacgcataggtcggttgtccagcgccgacggcagacggaagccgtattcgaccagggtttccttgcgcgagcggtcgcccttatacatggcaccgacctgcggcacgctgacatgggactcgtcgatcaccagcagcgcatcagccggcagatagtcatagagcgtcggcggcgcctcgcccgacgcgcggccggacaggtagcgcgagtagttctcgatgccgttgcagtagcccagctccatgatcatttccagatcgaagcgggtgcgctgctcgagtcgctgcgcctccaccagcttgttgttgctacgcaggtagtcgaggcggtccttgagctccgccttgatgttctcaatggcgtcgagcagggtttcgcgcggcgtcacgtaatggctcttgggataaaaggtaaagcgcggcagcttgcggatcacctcgcccgtcagtggatcgaaggcagacagactttccacctcgtcgtcgaaaagctcgatgcggatggcttccagatcggattcggccgggaagacatcgatgacgtcgccgcgcacccggaacgtcgcccgggcgaagtccatgtcgttgcgggtgtactgcaggcccgtgagacggcgcagcaactcgcgctgatcgagacggtcgccgcgatccacatgcaggaccatcttcaggtacgactgaggatcacccaggccgtagatgcaggaaacggtggtgacgatgatcgcgtccggtcgctccagcaacgccttggtcgccgacaaccgcatctgctcgatgtgatcattgatcgaggcatccttctcgatgaaggtatccgacgagggtacgtaggcttccggttggtagtagtcgtagtaggaaacgaagtactccaccgcattgttcggaaagaacgccttgaactcgccatagagttgcgcggccagcgtcttgttcggcgccagcaccagggtcggccgctgcacatgagcaatgacattggcgatgctgaaggtcttgcccgagcccgtcacccccagcaaggtctgatgcgacaggcccgcctcgatgccttcgatcatctgccggatggcttcgggctggtccccggcaggcttgaagcgcgtgaccaattcgaacttcgacatatcgacctcttcagatagcgtaacgacccgaaagccgaacggtggtgccgctccgtcgcaggcaaggcgaacggcggacgtggcctttcaatgcggacgcccgcggcgatatcaagtgcgcggccgcacagacagacgaagcgaggcaagatagcgaccaggcgagcgtgaatcggatagaaaaaaccgccctagcatatcgcgacgcgagggtaggcccgctatactcttgccccgtttgcgcaccgccctcagcgcgaagcgagggtgctgcatcagccacctcctctcttcgagcttccccaccatgagtttgttctccgctgtcgaaatggcgccgcgcgatccgatcctcggcctcaatgaagccttcaatgccgacacgcggcagaacaaggtcaacctgggggtaggcgtctactacaacgaagaaggtcgaattccgctgctgcgtgccgtcgccgccgccgagatggcgcgcctggagctcaacgccccgcgtggctatctgccaatcgaaggcatcgccagctacgacatggccgtgcaaggcttgctgttcggtgccgactcggcgctgatcgccgacggtcgagtggtgaccacccaggccctgggcggcaccggcgcgctgaagatcggcgcggatttcctcaagcgcatgctgcccgacgcagtcgtggcgatcactgatccgagctgggaaaaccatcgcgcactattcgaatccgccggtttccccgtgcagaactacagctactacgacgccgccagtcacgggatcgaccgtgccggcatgctcgaagatctgaaaaacctcccgccccgctctatcgtcgtgctgcacgcctgctgccacaacccgaccggcgtagacctgcagccggaagactggaaacagatcgtcgacgtactgcgcgccaacgaccacgtgccgttcatcgatatcgcctaccagggcttcggcgacagcatcgaggaagacgccgctgccgtgcgcctgttcgccgagtcgggcatgagcttcttcgtttccagctcgttctccaagtcgttctcactctacggcgaacgcgttggtgcactttcgatggtgacgcagagccgcgacgagtcagcgcgcgtgctgtcgcaaatcaagcgcgtgatccgcaccaactattccaacccaccgactcacggcgccaccgtagtatcggccgtgctgaacagcccggaactgcgtgccatgtgggaaaccgaactggccgagatgcgtacccgcatccgggacatgcgcctgagcatggttcgccaactggctgagaagggcgccaaacaggacttcggattcgttgccaaacaacgcggcatgttctcctattccggcctcactgcagcccaggtggaacgtctgcgggtcgaattcggcgtctatgcgatcggcaccggacgcatctgcgcagcggcgctgaatcacagcaatctggaccacgtgaccgacgccatcgtgcaggtcctctgatccctgaggggttgacttctccttagttaacagtaggatacgcaccgctgttccgcgatagctcagtcggtagagcaaatgactgttaatcattgggtccctggttcgagtccaggtcgcggagccaacttcaaagcctcaggtgaaaacctggggcttttttgtggccgccggactcccaccagggactctgtcccaggttattcgcttcgctcaccccttcggggccgcgctgaagcgcgttctgctacgcagtcgagtccaggtcgcggagccaacttcaaagcctcggttcataccggggcttttttatatccgccggactctcaccagggactctgtcccagctgattcgcttcccccccctcaggatgttttctatcttcccgctgcggcagaactcggagctcgctccaacgtaggatgggtgcaacccatcctacgactcggcaatgtcccaggcgtaaggtggaaaacttattcaggacgaggcgacagcttctcaagctatctcgcgcagccaggtcaatagatcggcctgtggactgcagggctgcaagggttgcgacgacaacaggcagtagcgcgagccatcttcgacaaagcccaagggcgcaaccagcacgccgctgtccaaatcgtcgcgcaccaggtgccatgggccaatagccacgcccaggccggccaccgccgcctgcagactgaagtaaaaatgatcgaaggcctgccccggcgcgctgggagcacaccgacctgttgccaaggcccagtcctgccaggcggtcggccgtgtctgggagtgaaggcaagacgcaccaacctgcaacgcagcgccatcatgctccgcgctaatccaggccgccgccttgtccggacgacagaccgggccgacccgctccacgaacaagggctcgacatggtagctatcaggccaccggaaatcgtcacgacggattgccaggtcgatgccgtccgcgaaggagaacggcccgccaccggcaaccagatgcacctcgactcctgggtgcctggcctggaaagcgggccagcgagggatcagccagcgcatcagcagcgtgggttcgcacgacaacaccaggcgccgcgcctgatgagcactggcgcgcagctcgccgacggcctgccgcatcagaccgaagcccccgctcaccgcccgcgccagggtgcgcccaacctcggtcagaaacacgcgacgcccacgccgctcgaacagcgtcacacccagttcatcttcgagcagacgcacagcgcgactgatcgcgccgtgggtcagatgcaactcgtcggccgcgcgactgaaattttccagccgagccgcggcttcgaagcaccgcagcgccagcaacgacggcaggcgctgattgactgctagtgagcctgactcactatgtctgtcagaaaacatcgttaattcatgcagagacacttgctctagcatcctattttttgctgcgcatcgacaggatacgtcatgaccgaactgatagccgtagtcacatttaccttgctggcggtgatcagcccggggccggactttgctatggtcacacgcaacagcctgacactgtcgcgccgggccggggtgctgacagccttgggtatcggtctgggcgtactggtccacctcacctatacactgctgggtgtcggcctgctgatcgagcagtcgctttggctattcaatgccatcaagctggtcggcgctgcctacctcatttatctcggcgtgacgatgctgcgcgcgaagccgggagtcgcaccggccgacggcgccgcaccgccagcgtctgactggagcgcgctgcgcacaggctttctgaccaatgcgcttaatccgaagaccacggtattcatcgtcagcctgtttatccaagtggtacatcccgatacgccattggcggtgcagatcggctatggcgccttcatctcggtggcccacatggtctggttcggcctggtcgcgttgtgcttttcagccggcgccgtgcgcgagcgcctcctggccgtgcgccattggatagaccgcttgttcggcggcctgctggtcggattcggggtattgctggcggccgctcgcggggcgcactgatcgccgcccatgatgacagcggcgccaccggaccaggctggcgatcagaaacaaaaacgccccgcatgagcggggcgtttcgataccaccgaacagttactgcttggcagcttcttcagcggcttcaggctcggcttcagcagcaggagcggctgcgttttcgtcacccttgatgcccagcagttccagatcgaaaaccagaaccgagttggcagggatcagcgggctcgggctctgctcgccataggccagctcgctcgggatgtacagcttgtacttctcaccgacatgcatcagttgcaggccttcgacccaacccggaatcacgccgccgaccggcagatcgatcggggtgccgcgcttgatcgagctgtcgaagacggtgccatcggtcaggctgccttcgtaatggacagtaacgacatcatccggacccggctgaggaccatcagctttcttgaccacttcatactggaggccggactcggtggtcttcacgccttcgcgcttggcgttttcttcgaggaatttcttgccggccgcaacggcctctttgttcatttcggccatgcgctcttcggcgcgcttctgcaaatagctgaacgcttccatcaattgctcgtcggtcagcttctgctctttcttgccgatcgcatcatcgatgccctgcgcaacagcgttcgaatcgagatcggccatgccttcctgcgccagactcttgcccatgttcaggccgatgccataagacgctttctgtgccggggtttccagcttggcgctggtttccgaatcacagcccgccagaaccaggccaaccagggcaatcgccgacgccaaacgatgatgtctcattctgtttcctttaattacgcgtaagaggtgcagcaaaaacaatgaccggagcttaacagccacctcatgcagtgactaccgagcacgccgcggtaataggtaaagacagtgcaaagtccagaagtgccgcacgaaacgcagaaagccgccaacccaaaacatcgggcaaaaaaaaagcgaccctaaggtcgctttcttcgtgctatcaaggcgttcagtggtccttgatggctaatatggcgcagcggacgggactcgaacccgcgacccccggcgtgacaggccggtattctaaccgactgaactaccgctgcgctaaacctcgagtggtgggtgatgacgggatcgaaccgccgaccctctgcttgtaaggcagatgctctcccagctgagctaatcacccgtttgctctcgaagtggggcgcattctagagacggatctgaaccttggcaacccccttttgaaaaaaaaattgaagaacttacaaagacttaggaaaccctctgtttaagggtcgtttttgtggtttccatcggcattgcccctgcgcagggttggcctgcgttcgccagaggggaataatgcgcgctttgcttttaccggagtttccatcgcatgtggtttcgcaatctgctcgtctaccgtctcactcaaaacgtccctttcgatgtcgagacacttgaaaccgcattggccgccaagcccgcccgcccctgcgccagccaggagctgagcacctacggtttcgtcgcgccctttggcaaaggcgaagacgcacctctggtacatgccagccagggcttcctgctggtctcgacgcgcaaggaagaacgcatcctgcccggcagcgtggtcaaggacgcgctgaaggaaaaggtcgacgagatcgaaaacgagcagatgcgcaaggtctacaaaaaggaacgcgaccagctcaaggacgacatcatccaggccttcctgccgcgcgccttcattcgcaaatccgggaccttcgctgccatcgcgcctgagcagggcctgatcttggtggactcgtccagccccaagcgcgccgaagacctgctctccacactgcgcgaagccatcggctcgctgccggttcgcccgctgacggtcaagatagcgccttcggccaccatgaccgactgggtcaagacgcagaaagccgcggacgatttcttcgtgctcgacgagtgcgaattgcgcgatacccatgaagacggcggcgtggtgcgctgcaagcgccaggatctgaccagcgacgagatccagcagcatctggaagtcggcaagcaggtcactcaactgtcgctgggctggcaggacaagctgtccttcgtcctcgacgacaaactggtgatcaagcgcctgcgcttcgaggagctgctgcaggaccaggccgaacaggacggtggcgacgacgacctcggccagcaggacgccagcttcctgctgatgatgctgaccttcaaggagttcctgcccgcgctgttcgaagccctgggtggtgaggagatcccgcagggcatctaaactgccctggccgtcagccccggctggcggcccactcccccataactacaaggtaaagcccgatgcgtgctctcgccgccctaagccgctttgtcggcaacaccttcgccctctgggtcctgctgttcgccgtcctcgctttcttccaacccagctggtttcttcctgccaccgcctggatcgtccccttgctcggcctgatcatgttcggcatgggcctgacactgaaagcggcggatttcgctgaagtcgcgcgccggccgctgtgggtggcattgggtgtcggggcgcagtttctgatcatgcccgccctcgcctggctgctctgccaactgctgggcttgcccgcggagatcgcggtgggtgtgatcctggtgggctgctgcccgggcggtaccgcgtcgaacgtgatcgcctggttctcgcggggtgacgtcgcgctctcggtagcgatcaccgccgtcaccaccctgctcgccccgctggtcacgcccgcgttgatctggctgctggcttcggcctggctaccggtcaatttcggcgcgctgttcatgtccatcgtgcagatcgtgctgctgccgatcgccctcggcctgatcgcgcgccgcctgctgggcaatcgggtgcatcaggtggtcgatatcctgccgctggtttcggtggtaagcatcgtgatcatcgttgcggccgtggttgccgccagccaggcgaaaattgccgagtcgggcttgttgatcatggccgtggtgatactgcacaacagcctggggctcggcatcggctatctggtcgggcgcttgttcggcctgccgctggcgcagcgcaaaacactgtcgatcgaagtcggcatgcagaactcggggctcggagcggccctggccagtgcgcatttctcgcctttggcagcggtgcccagcgcattgttcagcgtctggcacaacctctccggtgcgctgctggcgacggtctatcggcgaatgaatgacaaaggtcacgacgcgtcctgacagactcgtgccggtccgggtcagttgcccggaccttcttgctgtgacaatagcgcgtgccgaggacgacctcggcttgctcgcaactaccggggacggccccacccagtcactgtccttgtggaggtgctatgtcctggatcatcctgtttatcgccggtctgttcgaagtcggctgggccgttggtttgaagtacacggaaggtttcacccgcccgctgcccaccttgctcaccgttgcggccatgttggccagcctggcgttgctgggcattgccatgaaagagctgccgctgggcaccgcctacgccgtctggacgggcatcggagcagtcgggacggtggtcgtcggcatcctgctgttcggcgaatcggcagcgctgttgcgcctggccagcgtaatgctgatctgcatcggcctggtcgggctgaaactcagccactgagaagccattgaagcgccgtcacggcagccggcgaaccccggctgccgcaggctgagtcaaccgtggagcgcgggctcgcgatagtgccgcgcacaggcctcaccatcggcgcggaacagatggcacttgttggcttgcacgccggtcgcgaagacctgtccaaccgcaacccggtgattgccatcgctggcgaccgccaccatcgagtcgacgccttccaggttcaggtgcaacaggttgtgatcgccaagccgctcggccacggcaatctcgccgttgaagacgaaatccgcctgctcggcatcgacgaagtgctcagggcgaacgcccaaggtcagcgcgtcgcctggattgacctttcggccatcgaccgccacccgcatggcgctgccgccgggcatctcgacctcaaccgagtctgcatcggcgcgcagggctcgaactggcaggaaattcatctgaggtgagccgatgaaacccgcgacgaactggttatgcgggtagtggtacagctccagcggcgggccaacctgcgcaatgcggccagcgttgagcaccacgatcttgtcggccagagtcatggcctcgacctggtcgtgggtgacatagatcatcgttgccttgaggcgctggtgcaggcgcgagatttcgatacgcatctgcacgcggaggaaggcgtccaggttggacaacggctcgtcgaacaggaacaccttgggttcgcgaaccatggtgcgcccgatcgcgacgcgctggcgctggccgccggacaggtccttgggcttgcgctcgagcaagtggtcgagctggaggatcttggcaaccgactcgacacggcgattgatttcggccttgttgacctttgccagcttgaggccgaacgccatgttttccgcgacgttcatgtgcggatatagcgcatacgattgaaagaccatccccaccgaacgatccatcggcggcagctcgttgacccgttcgccgtcgatctgcagctccccgtcggtgatgtcttcgagaccggcaatcagccgcagcaacgtcgacttgccacatcccgacggcccgacgaacacgacgaactcaccgtcggcgatatccaggtcgatgccacgcgtgattggaacctcgtcatagctcttgcaaatatttcgcagggttacactggccattattgttgttctccttcaaaaacagccgccgtgacgggtcacggcgagcatagcgagcggcggcgggccggtcgagacgaagcatccgcttcgcctcgagccctggacttagccgagccggcgggcgaagccgaagccatgcgccggcaagtgcacgccttgaccatcgaataccgccgtagccgatggcacatcgagcccttcgaccggcgcggacaggtcatagtgccgagcgctgtcgctcatattgaacagacatacccagacttcgtcgtccaaccgacgctcgtacaccagcagggcttcgtcgtggtagacggtgcgcatgctgccttcgaccagaaggcgctgatcctggcgccaggcgaggaagcggcgatagatgttgagcatggagttcgggtccggctcctgcgcggccaccgagagcggcagatgcttgtcggccagcggcaaccagggctgctcgcgactgaagccgccgtgcgggccctggtcgtgccagggcatcggcgtccggcaaccatcgcggcctttgaattccggccagaaccggatgccgtaggggtcgaccagttgctcgaactgcagctcggcctcgtccaggcccagctcctcgccctgatagaggcagacactgccgcgcatgctcagcaacatcgccatgaacatccgaccgcgggcgtgatccggctggttggccagcgcccagcggctcatcacccgcaccacgtcgtggttgccgatcgaccagcagggccagccatcgaccagctcgcgctcgacgcagtcgatggtgtgacgcaggaagctcgggctgcactgctcggtcagcaggtcgaaggagtacgccatgtgcagggtgtcgctgccgcctgtgtaagcggccatggtcctcagcgaatgatcgcaaccgatctcggccacggtcgcgctgcccggatagcgctcgagcaactgccggatacgccgcaggaagccgatgttctccggctgagtcttgtcgtagacgtgctgctggaaggcataggggttgtcggcgcgtacaccgatgctaccttcacgaatctcatggttcggcgggttgtcgcgcaactcacgatcatgaaagtagaaattcgccgcatccaggcggaaaccgtcgacgcccagcttcaaccagaactccatgtcgtcgagcaactgctgctggacttcttcgcaatggaagttcagatccggctggctggagaggaagttgtgcaggtaatactgcttgcgacggctgtcccaggtccaggccggcccgccgaataccgagagccagttattgggcacggtgccgtcgtccttcggatcggcccaaacgtaccagtccgcctttggattgtcgcggctggagcggctttccttgaaccaggcgtgctgatccgaggaatggttgagcacctggtcgatgaggatgcggatgccgcgcgcatgagccacatcaatgacctgcttgaagtcttccagcgtgccgaacagcggatcgacgccacggtaatcggacacgtcgtagccgaagtctttcatcggcgaggtgaagaacggcgatagccagatagcgtcgacgttgaggctggcgatgtagtcgatcttctcgaccacaccgagcagatcgccaaccccatcgccgttgctatcgaaaaagctgcgcgggtaaacctgataaatgacgccgccgcgccaccagtcgttgcgattcatacaaccaaccttcgatgtttgggggaacacgccgccactctaggtgcggcaacccgccgcaacatcctcccgccaacttattaccgaggcgtatggcgcgggcgtagagacagggccgacggggggcgtagagccaactgcccgggctggcccggcgccgccgaatcgcgtctggcttcgcccatgcagctcgccataaaaccgtcaacctaaaaacgaatcgacacttatttgtcacgagcagcttttaggatcgatgcagttccgggactgaccctgcagtagcagccgcgccagccatccctcgcgccgctgcaccagccaggagcgacacgcatccacacatccatggagagaacaatgttcaagtgcaagcccctcgccgctgccatcatcgcgatcctcgccagccaggcctacgccgacgacaacagtgcagaacagagccagtccggtgccgacaacattgtggaagtcacgcagaccggaggccaggacaacctgtcctaccaatcgcagatcggtgccagcaacgatggcatggtcacccagaatcaggcgactctgtcggatgccgtccagacccagaccggcgacctgaaccgcgccgacatcgtgcaggactcgaccgagcagagcgaagcgatccagctgcagcaaggcgacagccacgacgccagcatcgtccagaacggctcgttcggcgccagcgcccgtcagtatcaggacggcagctacaacaccgcgatcaccgagcagaccgccgcggatatgagcactgcggtgacggagcaagatggcagcgacaactacgccgaaaccatccagagcaacaccgagtcgagcgtctccgagcagcgccagaccggcgctgaaaacatctcgctggtctggcaggacggcggtgcccgcaacgaggccggcgtcgaccagcagggcaacctcaacgatgcgagcgtctaccagaccaacgccttcgactcgcgcgccaagatcgagcagcagggtgattcgcaggtcgcctcagtgatgcagcagggttctgaccacaccgccagcattcagtcgacgggcctgatgaacgaagcctatatcgatcagaccggcagcctgcagagcgcgtcgatctatcaggacggcacgtcccacagcgccgatatcttccaggccggtgagaacaacacggccagcaccgagcagaccggcaacaacaactacctcaccatcgaccagctggacggcaacttccagaccgcctcgctacagcagaacggcgagtacaacgaagcctacgtcgcccagacaggcacggatcacctgatcgacttcgcccaggacggcgccgacaacctgctcaccgtcgagcagcgcggcaacggcaacgagctgaccggcaccagctatggcgacaacaaccgtgtggacgttatgcaggatggtgacctcaacgtggccgacatccagcagatctacggctccgataacgaagtcagcctggcgcagactggcgagggtcatttggcgcaggtgatccagggcggcactgccaaccaggcgatgctcgatcaaagcggcatgggcaactcggccatggtgtcgcagatgggctcgggcaacatggcgatcgtcacccagcaataaagccgtaccggcggccagccgtgtggctggccgccctcctgctaacgcatgcgcgccggattacccatcacggtggcgcccgccgcgacgtctcgcgtcactacactgcccgcaccgaccaccgcgccatcgccgatggtcacgcccggcaggatgatcgagccaccgccgatccacacatgctcgccgatcaccaccggccggccgaattccaggccgctacggcgctcctcgacaccgcgcggatgatccgccgcgtagatctgcactgcgggaccgatctgcgtcccggcaccgatgcgcacctcggccacgtcaagaatcacgcaattgaagttgaagaacacctcatcgcccagatggatgttgtagccgtaatcgcagtgaaaaggcggccgcaccaccgcgccttcgccgacgcttcccagcagttccttcagcaaggcgcgacggaccgctggcgtctcgccgagcgcggcgttgtagcgcaccatccaggccttggcagtggcctgatcggcctgtagctcggggtcgcccggacgatagagttcgccggcgagcatcttctgtttttcggtcatcgtcatcttcggctctcgctaagcttgaacggcacccgtcccgagccggtcgggtgcgcactgaatggctctataccggtcactcgccctggatcttgctcagcaggctgcgcgccagctgcaccgcctcgttgcgatgggtgatgttgagcttctgatacaggctgcggatgtgtgtcttgatggtggtcggtgcgacgttgaggtgctcggcaatctgctcgttcgactgccctgcgtggatcaggctgagcacctgccactcgcgccgggtcaagggtgagtgccgaatcagctcgggcacgtcggggcggttgatgatgtcctggatcaccgcctcgtctagggtgatgcggatcgcccggctgaagtcgcgctgctgctgcgccagctgaatcaaccgatcggctcgctgggcctcgagctcaccgagcgtgcgctcgtgctgcaacgccttgagcatgacgatgatcagcttgccgatgcgtagaaagctgccgatggcgcccgtgctggtggccagcgtcagtgcttgttgcaggtgatcgagcgcctgctgtcgttcctcacgctgccaatgcagctgcgccaggaggatatggttgcggttcaggtccatgaccaggccgtgctgttcggcatcgccttgcaactggcgcaggataggcagcgccttctccggctgcttcagcgacaggtaggcacgcgcgtggttgcggccgttgtactgggcgaagtgattgagcccccgctcgagtgcgggcgcggtaagcagccactgctggatcgctgccttgtcctgagtcgaatcccagtagctgagcatcaccgcatgggcattggcgagccagtcgacgtggtaattgtcgcctgccagcatgctctgcatcttgccgacgtattcggcgcaggcattctgttgaccgcgtgcatgggcgacgcctgccagcaaggcataacactgcagcaaccaccggtcaccaacgtcttcgaggatctggatgccctgcagcgcgcattgctcggcggcgtcgagatggtgccattcgagcaggacctggccgcgcacgcggtagatgaattccatgatcggcgtagcccgcagctcggcctgttcgacgtactgaatcgcccgttcctgcaacgagtacgccttttgcagaaagccttgggcgatggcgatctccgagagctggccgaggttccacaccaccaagtgcgaggctcgaatttcccgtgcacggcgttcggcctcctgatattgctgttgcgcctgaggcagcaacccctgcacgaaatgcgcctcggccaggcccgatagcgcggcgaccttcgaggtccgcatgatcagcggttcgcgtgccagcgcctcgcgagccagcgcgatggcctgctgctcgtccccctgattcatcgccacctgcgcgcgcacggcattgaattcgccgacgatacgcgcccagtcctcttccgagcagctgtgctgcagggcctgctctccggccttgaaccagcgctcgacctgatcgaactggtaggaattctgcgacacccacgcctgcagcagtgtgaacaacggcgacccggcgatgaccgcctcgggcagcgtttccagacattgttgcaacagccccagccgtccctgacggtagaactgccgaccgaaccgctccagcacctcgccgacccgcgtcgggcagcgcgcctgcaccgcgtggcgtgctgcttcctccggcatgctctcggccatcagcgcctcggccgcacgcaaatgaagttcaggcacacgctgcggctgatgggtgtgcagttcgccctgcaggaagatgccgaacagcggatggtaggcgtaccactgacgcagactgtcgaggggctgcacgaacaagccgttccgttcgagctgctcgagcatgtcgcgggaattgctggcctgggtcaggtgattggccagggcggcattgaagcgctccagcagacaggtcgtctggaggaactcgaccgtcgccgaccccagagagcgcatcacctgttcgcgcatgtagtcgcggacgaagggatggccgagttgcaggctttccaggaacaggtccatgccacggctggtctgcacttcctgcagcgccagctgcaacgcacagggccagccgccggtgcggcggttgagtcgctccacctgctcgcggttgacggccaccggcaagccttccctgagcaaggcttcgacctcatcggtttcgaaggccagatgcgccgcgtccacggtcagcaattgatgcttgacgcgcagatcagccacgcccagctcaggcaggccacgactacacaccagaagggtcaaccaggatggcatgttgcgcaggaagaagcgcaacaccgcgatgacctcggggttgaccagcgtctcgaagtcatcgagcaccagcagcagcggttcgttatcggccggcagctccgccagcagatgcgtgatcaggacatccaaggcctcgctgccctgctccgcgagcagcaggctgcgcgggcaaccctgctccagctgcgcatcgagtacatgcagcaggtagcgagccagctgccgtggatcgttatccgccgggtgcaactgcagccaggccacctgccccggaaatgcgcgtgcccattggcaagccagcgtggtcttgccgaagccgctcggcgcatgcagtaccgccagccgcacatccccgagtcgctgcagccactcatccagtcgagggcgcgaaagcagccccttgggcatcggcggcatgctcagcttcgccgggatcagcggcaaaggctcaggtattgcggcattcatggtcatctcccgtgcttcgttccctggtcgggtcgcgcggtccatcgacgttgcgactgggcgagcctagcccttcaccccgccagcggtcagcccgccgacgatccagcgctgacaatacaggaacaccactgtgatcggcaggccagacagcacggcggcagcggcgaagtcgccccacaggtagttctgcggatacaggtattgctgggcaccgacggccaacgtcagcttgtcgacatccatcagcagcaccgaggcgatcgggtattcggtcacactggtgatgaaggcgaggatgaataccaccgcgagaatcggcacgctcatcggcagcaggatatgaaagaacgcctgccaggtcgtggcgccgtcgacgatggccgcctcctccagcgaaccgtcgatgctttcgaaatagcccttgatcgtccagatatgcaacgccatgccgcccagcgaagcgacgatcaccgcgccgtgggtattcaccccgagccaggcgatgtgctgaccgagctggtcgaacagggcatagatggcgaccagagacagaacgggcgggaacatctggaagatcagcatgcctttgaggatcggcgccttgccacggaagcgcatgcgcgcgaatgcataggcgctggtggtcgagagcatcaggatcagcaccgagctgatcagcgcgatcttcaacgagttccatagccacagcagcaccgggaacggtgggttggtcaccgtgccgtcggcgtgtgtgtaggggatgcccagcgccagcgaccagtgttcgagcgtcggatggtcgggaaacaggctgccggtggcgaagttgccttcacgaaacgagatggataccaccatcagcaacgggaacacgatcagtgcgatgaagacgagcagcgacgcgtgcgccagccagaggcgatatttgacggatttagcttgaacgatggccatgtccggttttcctcacactttcactttcgagagtttcaggttcagccaggccatggcaccgaccagcaggaagatcagcgtggagatggcggccgcgagggcgaagttctgtccagaatcctggaaggcgatgcggtaggtgtagctgaccagcaaatcggtggtgccggccggcgtcgtcgcaccgatgatgtcgggcccgccgcgtgtcagcagggtaatcagtacgaagttgttgaagttgaacgcgaagcttgcgatcagcaacggcgccaacggcttgatcagcagcggcaaggtgatcttcagcaggttgtccaggggcgtcgcgccgtccatcgccgaggcctcgtagagatcgcgcgggatggcctgcagcaagcccatgctcagcagcagcatgtacggataaccgagccaggtattgacgaccagaatcatgctgcgtgccagcgtgggatcgctgaaccagtccgggcggattccgaacagcgtgtcgagcagcaggttgatctcgccgaagttctggttgaacagcccacggaagaccaggatcgagatgaatgccggcacggcgtaaggcaggatcagcattacccgatagaacggcttgccacgcaccatgtcccactgcagcaggctcgccagcaccaggccgacggccagcgtgaagagcacggtcagggcggcgaaggccaccgtccagatgaatatctgcacgaagggttcacgaatgctcggatccgtcagcaccttggtgaagttggcgaaaccggtgaataccgcgaaaccaggcgccagcgccttgccgtcgctgtcgacgtagaagcccgtttccaggttcggcgtcagccgttcgccggtcttgttgttgatcagcacgccgtcgtcggcctgccggtagagcggctgcacagcggccacttcgcgcaggccatacagacgcagcagactgccgtccggaccgcgcatgacccactgttgcaactgatcgcggcgctggatgacgtcgcgcagcggcaaggccttgcccaggtcggcgacgtcctcggccggctgcatcgccaggggctcttcggctttcggctcgcccgtcagcggatcactgacgaacacgccctgctcgcccttgtcgacgcgcagacggtcgccctcggggctggcgtgcaggctgaaccggtagcgctccccggccaggtaggtctgattgaggtgatactgcttgacctgttcctggctcagcaggttgctgccgctgtaattggtgaagccgatcccgaccgtgtacagcagcggaaagatgacgaacaccagcatgcccgccaccgctggatagatatagcggtgggcgtaggtgcgccggctgatgaatacgtaactggctattcccgtcacgaccaggccgagtatggcgaacgccagttgccgctgggcatagagcgccacgaccagatacagcgagagcgcgttgaaggtaagccagaccaaccagcgcaaccccgatttcaacgagggatgaagcgtccttgtatggtttgtcatggcagggctgggcaactcggcaagggcattcacgacggggaacctttctaacctggagagtagatcgccggtcgcgataccgcgaccggtgatcggcgacgatttcagcgggtgatgcgcttggcggcatcatccagggcggcgtcgactgtctgccggcccgaggtgatgttggtcagcgcggccgccatggacgaccagaacatccccatctccggtacgttcggcatgggttcgcccatctgcgcgttctcgaaggtagccttgatgtgcgggttgctcgacagctcctccatgtacgccttgttcgccacggcacccagcgggacatcggcgtttaccgtcttcaggccctcgacgtccagcaggtagttttccaggaactcgacggccaggtccttgttcgggctggctgcgttgagggtcgccgcggtgacgcccacgaagggtttgccgggttcgccattgatcgacggaatcggcgccacaccgaagtcgatgccgctcttctcgatgttgctccaggcccagggcccgctgatgatcatcgccgagtcgcccttgttgaaggcggcttcggcgacgctgtagtcggcgcctttgggcatgacgcccttctcgatcagatcggcgaggaccttgccgccctgcttggcgccggcattgttgacgccggtcgatttgacgtcgaggccagcgtcggtcttctcgaacacatagccaccgttggctgccagcagcggccaggtgaaataggtgttgttgtagtcccagaggatggcgcgcttgccgttggcggcgagtttttcattgagcgcgaagacttcgtcgaagctcttcggcggcgtgttgaccagcgccttgttgtagatcaggccgatggtttccaccgaaatcgggtagccccacagcttgttgccgtagctcaccgcgtcccaggcgaaatcagctacttcgcccttggtctctgcgcttggtgtgatcggggtgatcagtccgctcttcgcccactcgccgatgcggtcatgggcccagatgaagatgtcgggaccgttgccggtcgcggcggcctgctggaacttgtcggtggcactgtccggatgtgccacttcgaccgggatgcccgtttcggcggtgaatttctggccgaccttttccaggcccttgtagcccttgtcaccgttgatccagataaccagcttgccttcttcgatcgctgccattaccggcatcggaagactgaaggtcgcagccagacccatcgcggccatacccaacagcgtcttgttcatattgcttttcctcgtggcttcttattgttgatcccacacgctgcagcccttgggcattcgcagttcccgcatcttcgaccagtgatcgggggtgcacatcctcccccgcttgagcagggagggcgtagccacagggcgtagataacgcaggggatgagaaaaaattccgcctgcaaaaacggcgttacgcctgcacttggccggcagtcggatgttaaatgtcgcgaaaacaacaaaacggaccgataccatgcaccgccggacgcccgcttgtcacctgctggcttttgccttcgccctacccactcagctggccttggccgagccttcgatcacggcacgcatcgctgaccaacccatcgaccttcgctggcacgagatgcagccggagcgctacagcaccgagttgacactgcctgccggcaggctcgaactgggtaccgccggcgccgcacggtcgcagccgctggcggcataccgcaagcagacgctggagaaagacactgcgttgcgcttcgacgttcccgcacctggccgctatcgcctgatcgtcgataccggcgaggacgccagcctgcgcctgctgcccataaaggaagccgaacccgccaagccagggatcacgtgcccggtgtggcgcggtgagccggtgagcgtcaaggtcgatggcgttttcgccgaaggcgagcgcgtgcgcgacgcctacagcggccagaccgcgacggtgcatgacggccgggtcaccctgacccccgctgcgggcagcgatggtctgctgctgctcgaagccgtcgatacagctgccgagatgccctacgactggcgcaacgcgaccgtctacttcgtcatcaccgaccgtttcgccaatggcgatccatcaaacgaccgcagctacggccgtcagcccgacggcgaacaggagatcggcaccttccatggcggcgacctgaagggattgaccggcaaactcgattacctggccgagctcggcgtcagcgccgtctggatcaccgcaccctacgagcagatccatggctgggtcggcggcggcgacaagggcgacttccgccattacggctaccacggctactacgcgctcgactacacagagctggacgccaacatgggcagtgaggccgatctgcgcgaattgatggccgaggcgcatgcgcgcggcatccgcgtactgttcgacgtggtgatgaatcaccccggctactcgacgctggccgacatgcagacgttcggcttcggcgggctgcgcgaaggcatggcgcaatacctgcccgcgcagtggactgcttggcagcccgagccccacgaaaacctccacgcctaccacaatctggtcgattaccagcacccggactgggtcaagtggtggggcaaggactgggtgcgcgccgggcttggcgactatgatcagccgccgagcgccctggtcgatccggtcaagggctcgctgagcttcctgcccgacttcaagaccgaacgcgacgagccggtcggcctgccggtcttcctgcagcacaagcaacccaccggcgcggtggcgcgcgagggctatcgggtccgcgattacctgatcgagtggctgaccgactgggtgcgtgaatacggcgtcgacggctttcgcgccgataccgtgatgcatgtcgaacccactgcctggggcgagctgcgcaaagccgcggaccgtgcccgtgcagagtggtccgccgcacacccagacgaccgcttcgccggctcgccgttctggatggtcggcgaagtgttcggccacggccccgagcccagcaattaccaggacaacggtttcgacgcgctgatcaacttcgccttccagaccgacgcggcgcccggggccagcgaatgcctggccaaggccgagccgacctacgcggactatgcccgcctgctggccgagcatcccggccacaacttcatgagctacgcctcgtcccacgataccgccctgttctcccagcagaccggcaaggatctggcgctgcagcgcggaatggccaatgcgctgttgctggcgccgggcgcggcgcagatcttctacggcgatgaaagtgcccgcctgttcggcccgaccggctccgacccgtttcagggcacccgctcggacatgaactgggcacagcaggcgcagccggacaccgccgcactgctcgatcactggcggacgctgggccagttccgtgcacgccacccggccatcggcgccggacgccacgcgaagctgtcgacgcagccctacgccttctcgcgggtacttggggacgatcgcgtggtggtcgtgcaggccggcgcgtccgtcaatcgctgagccgggcaacagggccgcctggctggccgcgaagcgatacgcggccgcctcccgacacaattcccgaacccgcgttacccatcgactggagaagcagccgccatgcacgcaacccttaatccccgccaacaggcccagctggcattcgtcagcagtggtgcggagctcgaagtcggccatccggacgactgcccgctgcccctcgccacattggcgacgaccgacggcagcgaagcctatgtaagccaggtactgtccggcgggcttaccgcgcacgtctaccggatcgaagcgcaggggcgcagctggacgctcaagcgcgcccgggagcgctgcctggtgcagaatgccgacggccagacgtccttcctcaatgaagtgcagcggcgcgccgatctgcgcgccctcaaggcacgcccggaactggccgatcggctcgagggcatcgtcgacacccgctacgcaagcttcagacacggcgtgctgctgtcgccctggatcgagggcaaggtggtcagcgactggaacgaagcgcgcctgacggacctgttcgataccgtcatcacgctcgcctcccatggcctgttcgagtgggacctgtgccccggcaacgtgctcgacgatggccggatccgcctgttcgatttcggctacctgtaccgcttcgatcccttgcgcgagttcaacagcgacggcctcgcggggccgggcttccatccggtcgagcgcttcgaaacgcggcagttcttcgcctggttgctgagccaggagcggctgggcagcgatcgcgccctggccgcgttccgcctggaaaaggccatcgccctggagcgttaccagggttggcgcagcgagctggagcagcggggcgcgacctcagccgtgctcgagaggctgaccgccgtcatcgggcgctggcaaacggcattgtccggctcggctgaagcgctgtacctgtgcgaggcatggcgctcgcatcgcctcgacctggctgacgatctcgacggccagacttgcaccccactgaccttgcaacggctcgcctggctgcgcgacatggccgagacccgctatgacgatctccatcgctgcggtgccctcgccggcgaacagagtggcggccgcgcagccttgctggaccagttgcagcgagccgaagcacaggcgatcggctggcaggtgcctggcgccacgccacagtcctgaatgaccgagtcgcccggcacgccgagcgactcggcttcggcagcgccggatcaacccaggtgatcgcgcgtggccgaagcgcatcggtgcatccgcccgcgcccggcccgagtgccctcggccaaggcctccgatcaggtgtaatagcgcgcgcacagcgcctgctgttcggctgacatccgcgcctgccggtcgctgctttcgctgatcgccaccacgctgcccatgttctgctcggcggcagagtcgatcgcatgcatgccccgcgacacttcctcggcggcaaggcgctgttgaccggtcgccgaatcgatttcccgcgacatggtcgcgatgtgttcgacctgacggcggatgtcctgcatcagctgatcggccatgccgacctgatcgaggttggcctgcatctgcgcgcgacttttctccaccgattgcaccgccgaggcgatgccctgcgccaggcgctcgatgcgttgctggatctctccggtcgacttcgccgtgcgctgggccagcccgcgcacctcgtcggcgaccacggcgaagccgcgcccttgctcgcccgcacgcgccgcctcgatggccgcgttgagcgcgagcagattggtctggtcggcgatgccgcggatgaccaccaggatttcaccgatctgctcgctgagcacctcgacgttggcgatctcgtccacgctcgcctccagctgacgcgccagggtggcggtgctctcgcgggtgtcgctcatcagctcgctaccctgacgggccagggtctcgacgctgccgacccgttcagccgtctcgccggcgtggtgggcgacctcgccgaagctggtttccagctcggtcaggctggcgaccagcgcaccgatgctgctgcgctgctgctcgaggccggcgcgcgcctggttgcaggcgtcggcattgcggcgcgcgatctcgtcctgctcgtcggcgttgcgccctagctgtgccagcgcgtcacgcatgttggcggcgacccgattgacgtgctcgctgacgcgtccgaactcgtcggccttgcgatagccgcactgatcgcgcagatcgccggcggccaggtgctgcagggtcccggtgacggcgccgagcgcaacgcgcatggtgcggctcagccacaaccccatgaacagcgcgaccccgatcgagagaccggccatccagagcagccggatcacgccaagccggtaggtatcctgggcccgggcgagctgctcgtcgctggcctgctgggcactggcgatgagcgtgccgatgtcgtcgcgggcctggcgctgcaggccgctgagctggtccttctgctcacggttggcctgcttgtcgcgaagccagccgtagtactgcccgacggcgccctggccggcgacgtccagctgccgctcgatggcctcgaatggcggacggaagctgtgcccgtagtcagtgcggctgtcctggtgcggcgccaggtccagcagcacattctcgagtttcttcctcaaatctggcaggcgttcggccaccttcgccgcggcttcgtcgagcttgccggtcgaggcgctgccgatcgcgtcgaacatcgtcgcttcgacctgctcgaacgggataatgaactgcttgatcgagtaggccgccaggtcgtcatgggtgacgaattgcgcctgcaacaggtcctgcttgaggcgcgagaactgcaactgcagatctcgcagggcgaccgcattgtggccgacgcgctggagcaggccgcgatgcgcgtcgatcagtgcgaggctgcgacggtcgagctcgggcaacaactcgctcaagcgctgcttggcttcggtgtgacccggtgtcaggcgattgagctcggcgagtttcccgaccgcccgctggtgcagctcctggtggcgttcgacaaacgcatcgagctgctccggccggtcctcggcgagcgcatcggagaggttctgcgtcaggctctgcaaggtactgaaaaagctttcgctgaccagcaggcgtgaggccgtggtggagatctgtccggcgttgtcctgcaagcggccgatcgccaccaggctggtaccggccaccagcatgagcaacgcgacgagcgcggcgatcagcagataaaggcgcggcaggaagccgagccgaaagagggaaaaacgcggatggacggacatgacagctcctggcgcgacagcgaacgcgacgacttgttgttgtcacgccagaatcgtccgggccgggattacacacatcctccccctgtcgcactccccaggaggagtacccaggcgtagaaaagcgcccagggcgtagacgtgtgcgctcggaccgacccttgcggtcgatccggccagccgccgggtcgcgccggccagagccggcgcgcgtcgcttagaaggaaccgctggtactggcgcccgcggcactggtgaggcggttgttgccgcctggctgccaggtcttgacctgactcggattggcttcgctgcgcacgatgcacttccactccaccgcctgctgcgccggcaggctgatgctgcccttccaggtcgggtagctgctgacatcggtgaggcggaccgcgttggccgggttccagctgccgagttgcgtcagattgccgaccgcatagacgctgtcgccccactgggttacaccgttgtcgcaacggaaattgacgctgaccaggccgccgtcgccgccatcatcgccgccgttttcgccgctgccgccggtggtccagatccgaatctggccgttgtcctgactcaatgcctgattgaagctggcactgctgacctggcccgggttgtccaggttcgaacccagggcgatcaccaacgtctgcgccgtgccctgcaccgtagcgaccagccccgagtagccgctgtggaactcgatggccgagtccgcccggatgcccgcggcgcggcggatctggatcagctggcggatcagcggaccctgcccccagtcgtacatgtgcgaccagtagaccaccggcgtgccagggctggagaggatataggcataggcctggcggaccagatcgtcacgcagcgcccagtgatgctggccaccgttctgccccggcgaatagccggtgtcgtggttgtcgatgaaggtcaccgccacttcgcgccagcgcgggtcgggattgccgttgaggccgttcttccagtcggcgatcgagccattctgcatccgctccttgagggcgaagtcgaagaccgggcatttggcccggtcggaccaatccttgatcacctgctgccagctggccgtgttgcgccagtcccagctcggatattcgccgggcgatttccacagttcgcccacgcagaatgcgttgtcatgggccgcgctcatccagctgtcgacccgctccccggcgtaaccgcggacgaagtcgaagcgaaagccgccagcgccgtagttgtcgcgcaggttggcgaactcgtcgcggaacatgccaaacacctgggggttggcggtgttgaggtccgcatcgccgcccatgaagcgatcaccgtcatcgcagtcgttggcatagttgcccgggtcgctgcagtcgtgccgccagaagccctggccagccggcaggttgatttccttgtcgggatagccgcggttcatgtggttgggcaccacgtcgtaaagcacctttaccttcgcggcgttcaacgcggcagccgcctgcttgagctggccatcgctgccgtagcgaccgttcttgttgaagtcgtgccagaagtaaccttcgccgccgccggagttggcaccgtcgctccagcttgagaagtcgcgccagggcaccggcatccagatggcgctgaagccgtcggcggcgatggtcggcgccatctcgcgcagcctgtcgtaccaggcattgggcgcctcgcgcacggtgttccagtgaaatccctgcagaatgatttcgtcgccaccgtggtaacgcacgccggccgggctcttgcccgtcaggtcggcggcatgggccgtacccagggtcagcaacagggaagacgccgccaaggcgaggcgggtcgtagataaggcatgtctcatcgaagtagctccactcttgtatttgttgtgagcacccgacaacggccaccggcttcccggacggccgggcgcagtcggtgaaaccacatcaccgacccgcccagcctgccccgcagccccacccggccatacctccccaagcggtttattcgaggcttagtggccaggcgtactacgcgccgccatcagcggcgccagcctcctcccccactacgccccgccgctccgcctgaaaaaaaacaccccgggaggatgttgcgattttcatcgaaccgcacgctttcaccgccgtcagcccaaaccggtttcacccggagcgaccagttggcgccaaggctggcaaagcacgccggtcacacttgaccaacaaaaagaacaaaggactttcgcgatgactccgcaacaatccgtgcgtttttttaagcccaccctgctctgcaccgccctgctggcggccatgccttcgcacgcggtggatttccatggctatatgcgttccggcgtcggtgcgaccgcaggaggtggcgatcaggcctgtttccaggccgccggcgcaccggccaagtaccgcctgggcaacgaatgcgaaacctacgctgaaatcggcctcggccaggaagtctggaaggaaggcgaacaaagcttctacgtcgacagcatgatcgcctataaatcgggccaggctaacgactgggaagcgacccgcaccgacaccaatggcggtgccaacaacccctacgacgaaggcggcgacgtcgccatccgtcagttcaacgtggtgggcaagaacctgatcgcgagcctgccgggcgccgacatctgggcgggcaagcgttactacaagcgccacgacgtgcacatcaacgattactactactgggacgtctccggccccggcgccggtatcgaagacatcgacctgggcttcggcaaagccagcattgcctggatccgcaacaccgatggcgagtggacctaccagggctccggtacgggcaccaacatcgccaacgacaccctggacttccgtgttgccgagatcgacgtcaaccccaacggcaagctggaaatcggctacgactatggcaaggccaacctgaccgacctgcaggagcgcgacgacggctaccaggaccagaagggtcacctggtcaccctcgagcacacccagggcaactggttcggcggctacaacaagctcgccctgcagtacggcaccgacggcatcatcggcagcggtggccacaacactaccggcaacagcgatggcgacatgttccgcctggtcaaccagggcgtggtcgggctgaccgacaacgtcgaaatgatgtacgtgcagatctacgaggacaaagacttcgacaacgactccggccagaaatggctctccttcggcgtgcgcccggtctacaagtggaacgagaccatgagcaccgcgctggaattcggctacgaccgtgtcgacccgcaggccgacggcgagcgcagccgcgatctgaagaaactcaccctggcccagcaatggtccgccggtcgcagcttctgggcacgtccgcagatccgcgtgttcgccacctacgccaagtgggacggtggtcgctaccaggcggccagcgagtccatcgacgccggtgacgacgacggtctgaccttcggcgtacaggccgaggcctggtggtaagcgcctgacggtcgggcgacgtgcaacggttcctctcctcccgttgcgcccgcccgatcgcgctgcatctcttttttcgctcccaccgttccgacggtgcttttaccccgaccatggctggtcggggtcttttcgattggcgactggagtgttgatcatgaaaacgctgcgatattccctgcttggcctggccgtgctgctgacagccggttgcggcaacgaaccgcttcggcgtgtggatgcgctggcgcagaccccggcgcccctggacatgccgatacacagcgcgcgccaggcgctggctagcgccccgatctgctgcgatgcgatcgatgcgttcccctttcaaccgttgccggccaacttctccggtaacgtgatcctggattcctctgccccggcctacgacttcaagaccggcaagagcttcttccgcgccttcgcgctgccgcgtgacagcaaatccttcgagattcgcctgtacagccaggcgggagacaccgtactggcgcccagcgtcatgctgctcgacagccgcttgcgcatgacgcgcctgctcgatgccgacgacttcacctatgtcccggccgagggaatgaagggcgacagcctcgacgcgcgcctgcgggtcgaccggctctacctggacaaccccggcaacgaacaatatttggtgatcttcgcctcggagcgcgacagcaacggcaagaccacgctgcagcacccggccaaggcctacgccaaggcgttgggcaacgagccgccgagtatccccgatccggtggcacagcactcgccggttggtgtgatcaagatggtactgatcgaagaccgcgtcgccggccagcaggccaacacctacgtgcccgcctacagcatcggcggcgaaatgggcaatcagctgccctcgacccccgcccccgccgtactgccggaaacccaggcctactaccgccagggcattgatgcggcactggccagcaaggacctggaacgcgcgctacgcctggctgacgaagcggcccgtatcggcgacagcgaggcccgcgcctatctgctggagcgcatccagatcaaataggcggttgattcgcaggacctctccacccggttcagacagggccgggtgcgtcgctaccgagcaaggagctgcacatgatcaggttgcgccacaccgcatggcttttgatgcttgcctgtctatccaccaccgcaccggccttcgaacgcggcaagttgctggtctgggtcaatcaggacaagggctacaacggcgtcgccaaggttggcgagcgctttcggacggaaacgggtatcgaggtcgaagtggccacgccgaaggacctcgcggcgcgcttcgaccgtctcgccgggaccagcaagggccccgacatcgtcatcttcgcccacgatcgcttcggctcctggctcgacgccggccacctcgccgcgctgcaaccgagccccgcagccctgcagcgcgcaccggggttcacttgggaagcggtcagcgtcggcaatcgcatctacggctatccgttatccaccgaggtggtcagcctgatctacaaccgagacctgatcgagtcggcgccgcacacctggcgcgaggtggtcgagctggaccgccgcctgcgccaacagggcaagcgcgccatcgcctgggactacgccaacctctatttctcctggcccgtgatcgccggcagcggcggctacagcgtccgcaagcacgacggactgtacgacctggccgacctgggcatcggcaatccgggcgcggtcgccggcttcgagcaactgcgccagctgctcgacctcggcgtactcgagccggaggatggctacgacagcatgatgaaggcgttcaaggccggcgaactggcgatgatggtcaatggcccctgggtctggaacgaattgcgcaccgcgggcatgcgcatcggcatcgacgacgttccggggatcgacgccgaccggcgcggcaagcccttcgtcggcatcatcgcggcggcggtcaatgcgcacagtcccaaccaggcccaggcgcagcgctttctcgaggactacctgaccgccgccgatgggctacgcgccatcgacgcggacaagccactgggcgcggccgccaacctcgaactgctggaaacgctgcagcaggacccgctgatcgcccacacctaccagtcggcggccagcggcgagatcatgccggacatccccgagatgaagcgtttctggagcctgttccagaggcgcctgcaacctatgctcaggggtgagttgaacattccggcaacgctcgaccagatcagtacccgcctgaagcgccacggagtggtgcgccgacgcttctaccccgtcgccagcgcggccggggacgagcgctagccagacgctcgccgctaccgaagtgccgctgacggtcaacccgccggcggcagcggccggcgcaacagccagtagcgcaagcgcagcgcgaactccggcaccgaatagcatatccagccgatcaccagcacgttcattagcgccacagagagaaacagctgcgggatcgtcagccccgcgaccgtgagcaacacgatggaaaaaatcgccgagatcaccatgaacaaggcgttgagaatgttgttcgcggccaccacccgagaacgctcctcgagggccgtgcgggactggatcaaggcgtacagcggcacgatgtagagcccaccgaaggtgcccagcccgaggatatcgatcagcacccaccaggcgtgcggctcggccagcaacatcgaccagtcccgggccacctctgcggctggcacaccaccggcatgccaccagagcagcacgccgaacagcgtcaaaccgctcgaacccagtggcaccaggcccagctccacgcgatgccgggacaaccgctcgcagagcatcgagcccagcgcgataccgatcgagaacacggccaggatgagcgtcaccactccctcgtcgccctgcagccaatcacgggcgaacgccggaatctgagtcaggtacaccgcgccgagaaaccagaaccaggaattgccgatcatcgcgcgggaaacggcgcgctgctgccccaaccccaaccgcatgatctgcagcgactggcgcaacaggttccagtccagccgcaggctcggcagtgccgccgccgacagcggaatcgcccggctggcgagaaagcccaccgtcgccagccccaccaccgccactgacacccacagggcgtagtcgagatagcccatcaggacgcccgccgcgatggtgccgccgagaatcgccaggaaggttcccatctcgaccagcgcattgccgccgaccagctcatcgggccgcaactgctgcggcaggatcgagtatttcaccggcccgaacagcgcggattgcgtgcccatgcagaacagtacgacgagcagcagcggcaggttgcccagccacatacccagcgcaccgaccagcatgatgaggatctcagcgaacttgatacggcggatcaaccaggccttttcgtacttctcgccgcactggccgcccagtgcggagaacaggaagaagggcaggatgaacagcaacgcgcagaggttcaccagcaggctgacgtcggcggtggtgcccagcttgaagaggatcgccagcaccagcgcctgcttgaacacgttgtcgttgaaagcaccgagcaactgcgtcaggaagaacggcaggaagcgtcgcgtgccgagcaggccgaactgcgaatgcggggtcattgcgggtctccgcgttggtcatccgaaacagggttcgccggcgagttcatagcggcaattgcccgaacgcccagcgcatgacgaagaagctgagcagcccgccggcaatggtcgccaacaggttgcgggtcagcgccgccaccaggattgacagcagaccggcgagcagataggcattgtgccagtcgagcgcccactcgccctcgggccggagcatgccgggcacgacgatggcggtcagcacggcgactggcacgtaatgcaggccctgctccaccacgcgcggaaagcgcaggtcgggccaggcgaaaaagctgtagcgcgtcatgaaggtgatcgccagcatcccgatgatcagcagccaggtctgcatcagtgcacctctccctgtagttgacgttcggctcgtcgctcgagccagacaccgacgacgatgcccgccagcgccgcggcgatcaggccgagcttgtacggcaggtcccaggtcattagcgccacggccgcggctaccagcgccgacgccacctgcgggcgggtgcgcatcatcggcacggcgataccgatgaaggtcgcgatcatggcgaaatccaggccccagctggccacgtccggcaccgcctggccgaaggcgatcccggccagggtcgccagctgccaggacaggtacatggtcaaggccgcgccgaagaagaaccagtgcttgtgcggcgacccatcctcgctggcatagcgatgctggatcacggcgaaggcctcgtccgtcagccagaacgccagcggcacccgccagcgactcgacagatgccgcacgaaaggctgcaaggccgcgctgtagagcgcatggcgcaggttgacgacgaaggtggtcagcagcaccacggctgcacccacgccaccggtgatcagcgtgacggcgatgaactgggcggagccggcgaacaccagcgccgacatgccgatggtctgccagggagacagtcctgcaccgatggccagcgtgccgaagatgatgccgaacggaatcgcgccgacgatcagcggaaggatatcgcggcaaccatgcaagaactcctgcaagcgggacatcgaggctccttaggtatgtaccgcagacgatgaagcgctacgcaccaccgtggcgaccggcgcgtagagcgagatggggcggactgacgaccgctgggcgatccgcccgtggaagcggcagacattaccctaagtgacgcctcggcggcgacggctgttcgcccgcgacacgcccggctcttggatcttgatcccttgtgcccggcagcctcgttcatccgcctgcggtcagctgcatcgctgatcgacctgcaggatgcgaagccccgcctcggcactgccgaactgtggccctcaagcattgccccgcgcgcccaacgcgtccctgacggcaggccattcgagatcggtgatgctgtacaggaccgtatcgtccagccgcccatcggcaagacggcgatgattgcgcagcacaccctcgcggcgggcgccgagtttttcgatggcccgttgcgagcgcagattgctggccgcggttttcagctgcagccttaccagatgccactcgtcgaaggcatgcctgagcaacagatatttgatcgaggtgttcagaccgctgccatgctcggcctggtccagccaggtccagccgagttcggcggccggcaacgcggggtcgaagtcagcgaaccgggtggtgccgacgattcgatcggccatgcgcagggtaaacaccaccgcccggccctcgcgttgctcggcgagcgccaggcgataccagtcggggcgcagagggccattgagatagatgagctggtcccggttgcgctcggccagcgccaccagggccgggatgtccgcgtcgacaagcggctccaggcgcaaggcgcccctctgcaaggtgaccgggcgcggcgtgaacatcgcaagctctcctgaatcgacggaacgagaccctgtgtgatccttgcgcaagcgggaagtgccccgtcgccctcccctgggccgtcagcggctaccaacgcagcgcgatgtcgcaagggtattcgcgggttgccgcacgccgaaccacccgcctggcacggcgctatcaccgcttcgctgcgacgaacaggctcatgcgacgatggtcgcagccgcaacacgcttggcgcttttactgcgaaactttgcatactcatctactgctgagcggcaggcaccgatttccgtaatctgccgagcccgggtcgccgcccgagagataccggcatcaacaaccgcagcggcagattcggccggcgtgagcgccgtgatcgccctgctgtaccggccccggcgtcgcctggctcgatcgacgcgaagtcgcggcgggatcggtgtcagccgctttttcacctgtcatctggagtatgcatgtcgttgtccggtgggctgatcgcgctggtcgccttcacatatatggccgtgttgttcgccatcgccttctatggcgatcgcaacagcgcgccgatgtcgccacgtgtgcgtgcctgggtctacagcttgtcgctggcggtttactgcaccagctggacctttttcggcgccgtcggccaggcagccgaacaattgtggtcattcctgccgatctacctcggaccgatcctgctgatgctcctggcgcctcaggtgatccagaagacgatcatgatcagcaagcaggagaacatcacttcgatcgccgacttcatcgccgcgcgctatggcaagtcgcagttgctggccgtggtcatcaccctgatctgcctggtcggggtgctgccttacatcgccttgcagctcaaaggcatcgtgctcggcgtgaacctgctgatcggcaaccacagcgaggccgccgccgggtccggcacccaggacaccgcgctgatcgtatcggtggtgctggccctgttcaccgtgctgttcggcacccgcaacctggacgtgaccgagcaccaccgcggcatggtgctggcgatcgctttcgagtcgctggtcaagctgttcgccttcatcgcggtgggcgtcttcgtctcgttcggtctgtacgacggcttcggcgatctgttcaaccaggcctatgcgtcatcggcgttgaccggctactgggaagaaacggtgaactggccatcgatgctggtgcaaaccaccgtggcgctgatggcgatcgtctgtttgccgcggcagttccacgtgaccgtggtggagaacatcgaaccgcgagacttccgcctggcgcgctgggtattcccgctgtacctggtgctggccgtggtgttcgtcattccgatcgccctggccgggcaaatgcttctgccaagcggggtcagctccgattccttcgtgatcagcctgcccctggccgaagctcacccggcgctggcgatgctggcgttcatcggcggcgcctcggcggccaccggcatggtcatcgtcgccagcgtggcgctgtcgaccatggtctccaacgacatcctgctgccctggctgctgcgccgcaaggaggccgagcagccgttcgaggtgttccgtcactggatgctctcggtgcgccgcatcagcatcgtcgcgatcctgctgctggcctacgtcagctaccggctgctcggttccagcgccagcctggccaccatcggccagatcgcctttgccgcgctcacccaggtggcgccggccatggtcggcgcgctgtactggaagcaggcgaaccgacgcggcgttttcgccggcctcaccgccggtgcactgatctgggtgtacaccctggtgctgccgctgctcggttggccgctggagatgttccccggcctgcaatggatgtacaccaccgagctgccgttcaacaccagcgcgctgaccctgggcgttacgctgtcgctggtcggcaacgccacgctgttcttctgggtctcgatcctctcgcagacccgtgtcgccgagcactggcaggccagccgtttcatcggccaggaaatacacgccacccccaacgctcgccggctgctggccgtgcaggtcgaggatctgctctcgctggcctcgcgtttcgtcggtgccgagcgcgcggagctcagtttccagcgtttcgcccgccgtcacggccatgattactcgcccaagcagcaggccgatggtcaatggatcgcccataccgagcggctgctcgccggtgtccttggcgcatcctcgacacgcgccgtggtgaaggccgcgctggaaggccgcgacatgcaggtcgacgacgtggtgcgcatcgtcggcgaagcctccgaagtgctgcagttcaaccgtgccctgctgcagggcgcgatcgaaaacatcacccagggcatcagcgtggtcgaccagtcgctgcgactggtggcgtggaaccaccgttatctggatctgttcgagtacccggacgggctggtttacatcggctgcccgatcgccgacatcatccgctacaacgccgagcgcggcctgtgtgggcccggcgacccggacacccacgtggccaagcgactctactggatgcgccagggccgcgcgcacacgtccgagcgcaccttccccaatggtcgcgtggtcgagttgatcggcaatccgatgcccggcggtggcttcgtcatgagtttcagtgacatcaccgccttccgcgaagccgagcgcgccctcaaggacgccaacgagggcctggagcagcgcgtcagcgaacgaacccaagaactgtccgagctgaacaaggcgctgaccgccgccaagagcactgccgaggcggccaatcagtcgaagacgcgctttctagcagcggtcagtcatgacctgatgcaaccgttgaacgctgcgcgattgttttccgccgcgctgtcgcatcaacacgatgcattacccgccgaagcccgtgatctggtccgtcatctggacagttcgctccgttcggccgaggacctgatctccgacctgctagacatctcgcgcctggagaatggccgtatcaccccggaccgcaatccgttcccgctggcgacgctgttcgacacgctgaccaccgaattcagcatgctggcggtcgaacagggtgtcgacttcaaggtccacggcagccggttgcgcgtcgacagcgacatccgcctgttgcgccgcgtgctgcagaacttcctgaccaatgccttccgctacgccaagggccgcgtggtgctcggcgtgcggcgccagggagcgtgcctgcggctcgaagtctgggatcgcggcccgggcatcgccgaagacaagctgcgggtgatcttcgaggagttcaaacgcctggatagccatcagacccgcgccgaaaagggcctgggactgggcctggcgatcgccgatggtttctgccaggtactcgaccatccgctctcggtgcgctcctggcctggcaagggcagcgtgttcagcgtgacggtaccgattgccagcaacctcgtccggcaggccaagcccaacggcagcggcgacacgccacaaaccgcgctgaccggcatccaggtgctgtgcatcgacaacgaggacagcatcctcgtcggcatgcacagcttgttgtcgcgctggggctgccaggtctggaccgccagtaaccgagcgcaatgcgaggcgttgctcaaggaagacgtgcggccgcagctggtgctggtggattatcacctggaccacggcgagaccggctcggagctgatggcctggttgcgcacgcgcctcggcgaaccgatccccggcgtggtgatcagcgccgatggccgcccggagctgattgcagcgatccatgccactggcctggattacctcgccaagccggtcaagcccgccgcgctgcgtgcgctgatgagccgccatgtgccgctgcactgacgccaccttgcgccacggcaagtgtcggttgcagcgcgacggctagactgacgctatccctggccgccgacgtgttgcgcatatgtcctacgagttgtcgttgaacctggccaccgccctcggcgtcggcctgctgatcggtacggagcgcagctggagcggtcgcggcaataccgacggcatggaggaactggcgggcattcgcacattcggcctctgcgggctgctcggtgggctcgcagcactgagcgccggtcattttggcgcactcgcctggattgccgtgttcgtcgtgctggccctgttgaccatcgccggctacctgatcgaatcccgttccaacgccgattacggcatgaccaccgaagtggcgctgctgctgacgttcttgctcggcagtctggccgtcgtcgaaagccgtttgctggccgcatcccttgccgttgtggtggccttgctgttgagcctgaaagcgcgcctgcatggggcgttgcgcaagctcagcgaggccgaactgagcggcgcgctgaagctgctgttcatctccgtggtcctgctaccggcgctgcccaacgaaggctacggcccctggcaggccttcaacccctataccacttggtggatggtggtgctgatcgccggcataggcttcgccgcctacgtcgccatccgtctgttggggacccgtcacggactgctggtcaccgccctgctcggcggcatcgtctcctcgactgcgatgaccattaccctcgcccgcctggacgccgaaaagcttcgcccggccctcgcggctggcctgctggcgacctcggcgttgatgtttccgcgagtgcttcttgaagtggggctgatcaaccgcgagctgctgccgtcgctgctggcgcccatgctgacagccggctcgttctatgccggcggcgccctcttttactacctgcgcgcggcgcaacagccggagaacgcggccgaacctccattgaagaatccattcgagttgggcccggcgctgcgcttcggcggcctgctggtggtcattctgtttattgtcgagggcgcgcggcggctgttgggcgataccggtatctatctggtctcgctgctgtcaggcctgaccgacgtggacgccattaccctgtcgctgtccaacagcgcccgaaccgacctgagcgagctggttgcggttcgcggcatctttctcgccgcattaagcaacagcctggtcaaagtcggcctgatcctgctcatagggggacgcgccttggcgacgctgaccttgccattcatgggcgccggcctgctcgccgggctcgcggtgctgtggctgccgtgagccggccggtgctcagtcttcggcttcctcgaggggcgtttcagccccggcgcgctccagccagtcgaccggcagacgcttgctggcccgcgcacccagcagcttcagttgctcggcacgaccgaccagattgccgcgcccgtcggtgagcttgttgcgcgcgccgatataggccttgtccagttgctgcaggcggttgccgatctcgtccagatcctggatgaaagcggcgaacttgtcgtacagcgccccggcgcgctcggcaatctcgcgggcgttctggctctggcgttcctggcgccagagactgtcgatcacccgcagcgtggcgagcaaggtggtcgggctgacgatcacgatgtgcttgctgtaggcctcctggaacaattccggatcgccctgcagggcggcggcgaaggcggcctcgatcggcacgaacaacaggacgaaatcgaggctctgcaagccttccaggcgctggtagtccttgagcgacaagcctttgagatggttgcgcagggacagcacgtgctgcttgagcgccagcgcccggctggcctcgtcctcggcgcaggtcagcgcctgataggccgtgaggctgaccttggcatcgaccaccacctgtttgtcgccgggcagctggatcaacacgtcgggctggaagcgctcgccatcggcgctcttcaggctgacctgggtgtggtattcgcggcctttttccagtccggcatgctcgagcacccgttccagcaccagctcgccccagttgccctgggtcttctggccctgcagcgcacgggtcaggttggtcgcctcgtcgcccagccgctgattgagctgctgtagccgctccaactccctggccagcgaaaaacgctcgcgggcctcgtgctgatagctctcctcgacgcgcttttcgaacgcctgaatgcgctccttcaaggggttgagcaactgtccgaggcgttcctggctggcgtcggcgaaccgctgctcgcgctcttcgaagatcttgccggccagctcggcgaactgcgcacgcagttcgtcacgggcgcgctggagatcttccaggcgctgctcgtgggttttctgctgttcgttgagttcggcactgacggcggcatgggaggcgctcagcgcgcgcagctcggcttgctgcgcgtcgcgctcggcctggaggtcatcgaggagttcgcgggtttccagccgctgggtctgcaaccattcggtctcgcggcgcagcactgccgcctcggcctgcagcgcagcacgcgaggcctgcagctcggcgtgctccaggcggctggtctccagctgagcgccgaggccctcctgagcgagcatcgcctggctcaggcgctcgtcgagcagcgacaactcggcctgttgccgggacaggcgcctctgcatcacagcggccactgcggccagcagcatgcagagcgcaccaagcccggctgatagatagaggggatcgaggggcatgggttactccggctgaattgccgggcagtatagccagcggacgcgtaccggtcaggccgggcgctctgtcacggccattccaggcaggatcagcgtagggtcgaaacccgacgttttcccggcagcccctgcaggacgcgccttgcctcggcagagccctgggccgcagcctgctccagccagtgccgtgccttggtcagttcgcggtactggggctggcaataaagctgaccgagctccagttgcgcctggcagtcacccgcacgggccgcttgacgcagcagctcgaaaccgatgcgccgatcgcgctggctgtcgcagtcggtgcacagcagccggccgaggcggctctgcgcttccaccactccttcgcgagccggctgcttgagcatccgcccggcgattcgtttgacactcttggtctgtcctagacgctggctgtccagcagccacaacgccatgcgcagaggcaggcgcggagtagaagtgctatcgacggaagtcgatgcgagaggacgcgttctcatgatcaccgagagcttcgggggacaagggcgcgcactctactccttttttcacagagttaaagtcttgaaaaattcaaaaaaaagcgaactgactcacacaaatatttaatccacagaacctgtggataagtcggtggaaaacagggttacaaatttccccagcgcctatccctactggctttccgttaaactggcggttttttcaccaaagaaaaatttctttatttttcagtgagttattatcgatctatgacgcaagacgctttgtgtctgtttgtcataagcgcttgacaagccgcgccgacgaatgtgcacaagtctggcgcggggattgcgcaaaggcggcaaaccccagtgttcaagcggttttggcgactccggcgggaaccttttgcgtgaccgttggtcgctgctgcccgacatggtttcggggttcgccaatggccatcggcggcttatgctgcaaccccggacaagacggaacccaacatgacccggctgcggcgaaccctgctgtttacagcgcttggcgtgcttctgacgtgcctgctgctcgcgttctacgcagcccttcgctgggatgccttcaaagacgaacagggtatcgtcgcgttcgatatcgacggcctgcatttatcgacggacggcatcgcgctgcgacaatttgtcctgaagcaggaacgcgccgacggcgaacgccgggcactggtcgtcgatgacctcaggctgcgcctcgacagctggcggcaccccctgccgctgggcgccgtgcgggtggcacgggccagcgtcgaatggcagccggcgaaccagaccgaaccggcagatggcggcacaccgagcctgcccaaccggcagcaattgcaacgctgggcgggctggatcccccgcgacggccgtatcgacagcctgactctcgacctgccctgcgccagcggcaggtgcagcgaaacgggccaggtcagttggcagcacgctggcgaagcgatctttccggccgaactgcacctcgatctgctgcatggcgagcatcgcttgcaactggccgtcgatctgcacgagcaagccgccgacacccatatcggcctgcacgcgctgctcgacggcgaaccgcgcctgagcatgctgaaccagatcacgcctggcaccggcctgacgcgctggcgcggcgcgctgagcctcagcgaactgcccgaagcaccctggctgctgcactggctggccgattggttggcctacactccaccggcactgcccgagttgcccgaacagatgcgcatcggcggaggctggaccctggatatcgacacggcggcgtttcttgacgatttcagcgtgcaagagggcgagttgcgaatctcggcaaacctgcccgcgccctggccggtggtgggtatcggccaggtgcagggtcgattggacctcggcgcgcgcatcgagactggcatatggatccccacggaactggcggctgatctgagcctgcgtccaagcgccgtacgggtcggggacctcccggagccactgcggcccagcgccgtcagcctgaaaatcgctcctgccacagcggacggcgtctcgccagcgttgccgctgaccctgcaactcgaggccagcggtccctcgccgttctcgctgaacagccgcgtcctggtcgaaaccagggccccctacctgaccacattcagcgatacccggttgaacctgcacagcccgacgctcagcgggccggggttttccatgcagggcctcgaagcgaagctgcgcctggacggaacgctgtcgcagcaggccgcagccatccggttcgacaagggctcacggatcacggccgacggcatgaccatcgcggccgaggcgacagccagcaagctgcaggcggagctggccgggacggcaatggagttgagttttgctgacggccggctcgaccacttcgccgccaagggcaagcccacgctgacgatcgctgaactgaagcagccggcgttgcgcccgcaagcctggcgctggagcggcaccttcgcggcgcagccatcacgcgtggtgctcgacggcccgctgagcaacgatgccgggctgaccctgcctatggcgctgaactacggcctcgccgctggcacggcccgcctcgatgccgcccttcccgagctgttcctgcgcgccggcaacccgctggcggcaacacttgccgactggcctcgcgtgctggaactgaacaacggccggctgcagggcaaagcgcacatcgaggtcccggccagcgggccgttcgccgcgtcggcgtcgcttaccgccaaaggtgtcggcggcatatacgatcgcaccgaactgagcgggctggatgccgccctgtcgctcatcctgcagcgtgatcaattgcggctcgacgtcaaggaactgaccgtgcgggaggtcaatccaggttttaccttcggcccgctgcacgtggtcggcgaatacctcggcccgctggatgagctggcccggggtcggttggcctggcgcgaggccgaggtgcgcctgctgggcgggcggctctggctggaccccggcgccgtcgacctggctgccgcgtcgcaacgggtggacgcacacctgcgtggcctgcagctgcccttgctgctcgaggcctacccgaccgaggggctgtccggaaccggggtgatcgacggtgaattgcaggtccagcgcagtggcgccggtatcagtatcgaaaagggttcgctcaaggctcgtgagccgggaggcgcgttgcagttccgttcggcgaagatccaggcattgggccaggccaacccggccatgcgtctggtgaccgaagccctggacgacttccactacgcgctgctcgccagtgacgtgcactactcggccgatggcaagctcgacctgggcctgcggctgcaaggtcgcaacccggcactggaaggcggccggccgatcaacttttcgatcaatctgcaagaagacattccagccctgctgaccagcctgcagttatccgaccgcgtcagcgaaaccattcagcgacgcgtgcaggaacggctcagatcaggcactgtaaccggaccgtgaacaggagaatcccgccatgcggttgcgccattcaatctgcctcctggcgctggctctgctagccagcgcttgcacccctcgggtggaactggccgtgcccaacgagccgatcaatatcaacctcaacgtcaagatcgagcacgagatctacatcaaggtcgacaagcagctcgattccatcatcaacgaagacagcggactcttctgaggactctcatgaaaagctatctgaaactcggcaccctgctcatggcgctgtgcctggccttgccggccgcggccatgtcgctcaacgaagccatggccgcgcttggccaggccaaagccagcggccagctcggcgagaagcccgacggctacctgggcgtggtacagggcggcggtcaggccgaagagatcgccagccagatcaaccaggcccggcgggctgaataccatcgcctggcgcagaagaacggcatcagcgtcagcgacgtcgaagccatcgccggcaagaaagccatcgaaaagaccccgtccggccaggtcatccagctgaacggtacctgggtcaagaagtaagcaagcacaacggggtgcgcgcgcaccccgcctctgctccctctagggcgtcagctcctcccgcaaggccttgacgtcctccgccgaaaccggcgccgcggcgttgccccaactgttgcgcacgtaggtcagcacatcggcgatgtgctgatcggacatattccaggcgaacgatggcatggccggcgccgtcggtgccgcgtcggtccccaccgcgcggctaccggccaacaccaccctgatcagcgacgtcgcgtcacgactattgaccagcggcgcctgcgccagcctggggaacagattggtgatgccttctccgtccggcgtatggcaggccgagcattggtcctcgtagatcagcgccccggtgcgcatacgggcatcgtccgccgggcgcggctcgggcgcactctgcgcgtcgtcaccaaggctcttgaggtaggtcgcaacggccgccaggtcctcgtccttccaatgctgggtggaatgttccaccgcttcggccatcggtccggacgccatgtcgaagcggttggcgccggtcttgagatagcgaacgatttccgcctcgctccagcggccgataccggtatggctgttggcggtgatatccggtgccatccagctctgcaggttgctgccggcgaggaactcgtcgtccttgtcgccgccgatcaggttcttcggcgtgtggcagctgccgcagtgccccagcccctgcaccaggtacgcgcctcggttccactcagccgaccgctccgggtccggctggtattcgccctcctcgaagaccagccagttccacgcgatcaggctggtgcggatgttgaacgggaacggcagctggttggtctcgacctcgtgccggacagggtccagggagttgaggtacgcccagagcgcgcgattatcctcacgcgtcaccttggtgtaggcggtatagggcatcgccgcgtagagccgcttgccgccgcgggcgtggccgttggacatggtgttctggaaatcctcgaacgaccagcgaccgatgccggtgtccgcatccggggtgatgttggcgcccagtaccgtgccgaatggcgtatcgatcgccacgcctccggcaaaggccggctcaccgggcagcgtgtggcaggccgtgcagtcgccgagcaccgccaggtaacgaccacgtgccaccaggtcgtaggagtcactgccatcggcagcctgcgccaagccggcggcgaggccgagcatcccgacgcatagagcgggaagagtcttcatatggcgatcatctccccggggtttttcagatagacgcggcgaatggcgtcggccgccttgaaggccagcgcgcccaccgtcccggtcgggttgtagccggggttctgcgggaaggcactggcacccacgacgaacaggttcggcacgtcccagacctgcagatgcttgttgaccgaactggtggacggatcggcacccatcacgaagccgccgaccacatgcgaagactgatacggcccgctgttccagtgcccgtcctggtaggtcttgacgatgtgccgaggattcatcggcgcggcgatctcggccagcttgtcgatggaaaagcgcgacatcttgcgatcgttctccgagaaatcgaaggtgatgcgcagcagcggccggccgtgcgggtcggtataggtcggatcgagcgacaggtagttggtacgggtggtgtagctgctcgcctcgcaaccgatggacatggtgctgaggtagttatccaccgtggcctgcttccatttcgagccccagcgcggagtgcccggaggcaccggtcgcgtaccgatcggcgaagcgccgactggtgtcacccggatgctgccgccgccaaggaaccccagccccgagtggtcgaaattgtcgttattgaactcgtcgatgcccatgcccaccgcaccggcgccgatgaagggattgaagttcttgtcgtcgaagaacagctgcacgctgttggcggtctggtaggcgtagttgcgcccggtggtaccggtattgctcaccggatcgtagggcttgccgacgccggacagcagcatcagccgaacattctcgaaggtgaaggcactgaccaccaccagctccgccggttgctcgtactggttgcccgaggtatcggcatagaccacaccggttgcgcgcctgccggtcgaatccagcgtcacgcgcagcacttcggcgtgggtcaccgcggtgaagttgggcttgcgcatcagcgccggcagcacattgacgatggcgctggccttggaatagttggcgcaaccgaagttggtacagaagccgcagaaggtgcagggtcccatggtgaccccgagcgggttggtgtaggcctgggatgccagcgaggatggcaccggaaacggttggtagcccagttcgcgcacggtctcggcgaacagcgtcgggccatagggctgcgccagcggtggcgtcgggtattcgattgagcgactaccttcgaagggattgccgcccggctggatttcgccgttgagattgccggccttgcccgaggtaccggccagacgctcgaaggcgctgtaatgcggctccatctcggcccagtcggtgccccagtcctgcagcaccagctcatccgggatggcatcggcaccatagcgttcggtcaggtgactcttgaggcggaattcctcgggctggaagcgaaacgtgatcccggcccagtggttgcccgccccgccgacgccgttacccgggtggaacgaaccccactcgcgcatcggcagcgccgtttgcgacggggtgttgcgcaccgtcacggcattctgcatgggccgcagcatcagttcctgacggcgcagataacgcagctcgtcggtcaccgaggcgatgttgaaatcccgcgcggtgtcgcgccaggggccacgctccagggcgatgacgtcgagcccttcgtcggccagttcgttggcgatgatcgaccccgcccagcccagcccgatcactaccacgtcggttgcaggaagcttcttgatcatttcgactccctcgcgttccaggatttcccgccgacgatcgacagcggcaccaggtccagcttctggttatgcaactcgatgtagcgccggtagtcgtagcgcgcgccaggaaagccgatcatcttccaggacaccatgtctcgattgccgccatagattgggtcgccgaaaaagccttccatcgtgttgcccaacacctgctcgaagaacagcttcgaatccatcccatcgaggtcgatgccgcctttctcgagttcggcgagcagcgcgtcctgctgttcggcattcagggcgctgaaagactggctgtggcgcgactggcagagtttttccagccccaccagcccgtggcggatgcgctggcgcggggtgaacggtgactggtcgccctgctccggcgtgccctggcgaaacgggccctgcatgtaccaacggctggcctcgccgtagctactggcgagctggcgatccatgaacaccacacagcccgcctcgctgccgctgacgctgaggtcgtcggcgggaatcaggcggtcgacgatggccgtcacttcgcgcacctcgggctcggtgaaaaaccgccaccccggcgagtcgtagtgcatggggccgttgtgatcgaagggttgccagggcgggataccggtcagggtggtcgccttggcggttgccgcgacgcctgcggcaaggccggtcatggaggagaagatcagctgacgacgcgtcaggccacgggcagggttgtcattcatgtgggctcccttgaggtgatgtacagaccgaactggccatgcactcaatcccggcgaaacgaaggggtaagcggagcgccgcaaatcccgctcgtttcgcctgggtattcaaagggaccgccgaaggaaacattttgtttcatcggcgcccgcacgcaggtgctctaaaccgcgggtcctgctcgacggtgcgtcagaaccaggtcgacaccgtcagcgagccgaactggtcgtgcttgtcctgaccgttgaattcacgggtgcgccagacgctggcaaacgccacctgccaactgttccaggtcagtgcgatacccgccttggcgtcgccgacccactcgttcgggtccaccgaatggctgctcttgaaggtgttgccctcgagcagcatgttctgcgccatgtagcgcccttcgacattggcgaacaggttccaggcgaacccgcctccctgatcgaaaaacatgctgccgctctgcgcaggcgccaccgcgggaatactgaaactgcgcgccaggccctggccgatgcgcagccccagcccggcagaaccgtaggtatagagattgcccagcgaaaagccggcgctcggcccgtactcgaactccaggccggcaaaacgctgctgcaaccaccagcgatgctggtacgcgaggttgacgaacggctcgttgcgcagctggttgtcccaaccgcgcggctcgtcactgttggtggcttcatggacccggcgctggattttcttgccacccgcggcgggcccgacgatccctacatccagatgcaaaccgctggcaccgcgccagccctcgtgctggtgatcggaaaagatcgacagcccggcgaacagcagcccggcataggggcgatcgtcttcgatcagctcggcccgctcgatgtcgttcggcgtatatatctgatgacccagccggtaagcgacattgtccacctcgtcggcgctccagcccggcagcacatcggcaaagcggcgcgaccagtgatcggcatcgggcttgaatgagcgcatcagttcgaagccattggtgtaatggccatcgctgccggtagagatgatgtcgttttcgattttcagggaatacaggtcagcttggctgactgccggaacacaagcgacgagtacggcgagggaaacgcgagcatgcacgcgcgagattgccatggcccagctccttggttacatgcaacaggaaatgtatgcatgttttagagcgcagcgcgcggccaaacgttcacagtctcgctgcagctacagaccaaggtgtcagcgggccggccccgatatggagcctagcccaccgaatcgaccgctgccgctcaggtgccgatcacgccaccgtcgttcttggtgatcaggatcgtggacgcgcgtgggcgcgtattgccgtcactggccgggaagctcagctccgggtgctgcacgttgatccacatggcgcggtagtccggactccaggtgatgccggtgatttcgcagccgcgcgggccgaccagaaagcgcctgacctcgcgtgtgcgcgggtcggcgcagagcagctggttggtgcccatggcctgcatcgcggcctcgtcgtcgccgtagtcggtctcgatccacaagcggccggcttcgtcgaacgccaagccatccggcgaggaaaagatatcgccattgatggtgccggtgaggttggccggcaccggctggccgctggcgtccttggcgccgggccgctcgccggccagcaggaaaatctcccaggtgaaggccgtggcggtcgggtcggcgccctcctcgttccagcgcaggatctgcccgtgcaggttgtttggccgcgggttggccttgtcggtcggctgcttcacgccgcggccgtcattgttggtgagggtcacgtagacctcacggctgcgcggatgcaccgcgacccactccgggcggtccatcggcgtcgcgcccgcctggtcagcagcggcccgcgcgttgagcagcacctcggcctgatcggcaaatccgttttccaccgtgaggccattctggccgtgcaccagcgccagccattcaccgctgccgtcggcattgaagcgcgccacgtagagcgtgccgctgtcgagcagctgacggttggcctggtcggcacccggcacgtagcggccggcggggacgaacttgtaaacgtattcgcccttggtgtcgtcgccggaatagaacgccatgcggccgtcctcgcccagcgacagcaccgaacattcgcggcaatagcgaccaaaagcggtgcgcttgaccggtttgctctgcggatcgaacgggtcgacctcgaccacccaaccgaagcggttcggctcgttcacgtagccgccgtggggttgcgacaaatccggcgtggcgttgaagcgcgggtcggccgtttcccaaccgtagagtttgctcaggccttcaccggcaatgccgtagcgtttgtgcgatacgcgtttggccaggtcggccgcgtcgtggttgacgaagtagttgtgccagttctcttcacacatgaggtaggtgccccagggggtgaagccgctggaacagttgttgaccgtaccgatgatctcgcgcccgctcgggtccgcgacggtcttcagcgcatcgttgccggccagcgggccgccgaccgccatgggcgtcagcgtggagaggcggcggttgtagcgcgacggcatgacccgctgccattggccctgagcatccttctgcacttcgatgatgctcaggccatgggccgcctgctccttgcgcacctcatccagcgggcgcttgccgtcggtgaaggtcatgccgttggggtgcagcggcgggttgacgtactcgtggttgatcaccagcaggccgtggctgtcaggcgcgtcggggaacgggaagaagtgcatgccgtcatggttgtcgccggcctgtttgagctgcgcctgccaatcgtcgctggcgtccgggttccattctggcgcgtcggccagcacggcatcgccccaggagaagaaggtccgcgcacggtagccgggcgcgacctgcacgctgtcgaattcaggatcgagctgggtgggaatcccggtgaaaccgatcaacgaatccgattgcccggcgctgcggcaggcgcccaggctgccgccgagaaagcccagcgcggcgaggcccatgccgcccttgagcaggttgcgtcggctgcgatcgaccaactgcccaagcgaagtattcgaactcgggttgatggcctgatcgtcgagggctgaaaggttggcgtgaaagctctggaagtcttgtttcatcgatggctcgtctggcaaatggatctgctgcgcatcactggatgcggtaatggaaggtgttcttcacttcgggaacggtcacggcgcgaccgtcgactatgcggggctgatagcgaaagcttttggcggcagtcagcgatggccggatgaacagcggatggcaatcatccagcgccttcgggttctcgatccgcccctgtgggttgaccgagtaactcacggtgcagctgccttcgatgcccttgtccaacgcacgctgcggatagtccggcgcgtccttggcgatcggcaggtactgacggctggcagccgcggcggcttcggcctgtcgcgcccgttcggcggcagccgccgcttcggcctgcgcagcctgttcgcgctggcgcgcctcacgggccagttgttcgcggcgctcggctttgagccgttcctgccgctcacgctcgcgcctctgctcgcgttggcgttcgcgctgctcttcgcgtagacgctgctgttccaggcgctccgcttcttcgcgtttcttctcctcggcccgcttgaaggccagctcggcctgttcgaggcgatgctgttcgattcgcggatccacctgcggttcctcaaggaccgcctcgactggctcgggcacaggctcgggctcgggctcagtgggcacctcgaccaccggctgtggcgccggcaggctgaccagctgggtcttgagcacttgcgtggggctgggtgcggtcagctccggtgtccagccgtgcagcagcaggccgaacaccgcggcatgcagcgcgaccgtcaccgtcacggcgctggcatggctgcgccattgcggccgggccatggggaagctgttgggcagtggcatgctcaaactgctcatggcgcgggctgccctggcggcgcctcggtgatcaggccgagattgaccaccccgccgcgctgcaattcagcgatgccggccaccacgcggccgtaatcggcggcatcgtcggcgcgcacgtagacctgggtgtcgccgcgttcggcgatgatcgccgcgaccttctcacgcatctcctcgaggtcgatggcgctgtcggtctggtcctcggcgttcagctcgttgcccaggttccagtagaagccgccatcggccttgaccgagagcgtgagaatctgccgctcgttctcggtgggcatagcctcggcggccaccttgggcagttcgatcttcacgccctgcaccagcatcggcgcggtgaccatgaagatcaccagcagcaccagcatcacgtcgatgtagggcaccacgttcatttcggccttgggaccatgtttgcgctgcggtttgaccagcatggcgaggctcctgtcaggcggctgcggcgatgctgggcgaaccggcatgcaggcggcgatgcaagcgcgcctgcagttcgttggcgaagctgtagtagcgcgcgccgagcgtctggccacgggcggagaaccggttgtaggccatcaccgccgggatcgccgcgaacaggccgatggccgtggcgatcagcgcttcggcgatccccggcgcgacggtcgacagcgtcgcctgctgcaccatggacaggccgaggaaggaattcatgattccccagacggtgccgaacaggccgatataggggctgaccgaaccgaccgtggcaagaaattgcagaccgctttcgagttgctcttcctgctcggcgatggccacgtacaggctgcgctcgacgccttcgatcaccgcatccggggcgatgccgggctggcgctggagctggctgaattcctggaaaccggcgaggaagatgcgctgcaaagcggcttcgcggggaagcgactgctcgttgccctcgcgatagagctgggtcagttcgccgccgctgcgaaagcgctgcagaaaacttttcaacagccgttcgctgcggcgcagcgcggcaccacgctggatgatcaggtaccagctggcgagagacgccaagaccagcgtcgtcatcaccagttgcacgaccaggctggcttcactgaccaaaccccagaccgacatatgttcgctttgcatctgtgttcctccggccgtcccatgcaacggcgctcattggattgcattggggttacgcttcgatgacagcgcagcgcaaccccggttggttcacgccaggctcagtccagccccagcgcttcggcgaccgccgcccagggcacgtacttatagttctgcgcaccttcgggcatgcgcttgcggccgtcctgcaccaccaacatgccgcggtcccagaggccgccgaggttggccgaggtgacttccaggccatcggtttccgaagcaccgtcgatgccccgctcggcattcaggccaacccggaaggcaccgcgcacgtcgtagggcgcctgcgcatcgagcaccagatagctgtcgttgccctggctggagatcaccaggtaatcggcgttcttgccctggtacagcgccaggccttcgatgtcgtcatgcagtgggccgccgacactgatgaccttctccagcgccgccggcgcatcgctgcgcagatccagcttccataccgccacgtcttcctcaccgacaaacagccgctggttgcggtcatcggcgacgcagccctcgggctggctgtccaccttgaactcgcgcacctgctcgccacgcggcgaaccgctgctgccatcgaggcggtactgcaggaaagtgccgttcttgtcgttggcgacggcatggatcgcgcccttgcggtccttgaacaggcacaggccatagatttcactgaacggcgttgcgacctcactgatgccgctgacctcaccgctgcgcgggtcgatggcgaacaggtgcaggctgttgtgatcgcgattgctggccacggccagatcgacccgcttgccgccgagggcgaagccggcgcgcacgtcgacgttgttcagacgccccaccggcaggtactgcagttgcttgcccgtcaggtcgtaaacagccagcccgcccttcttgtcggtacccaggacgcggctgcgtgcagggtcggtcgggttgacccagatcgccgggtcgtccgccgcatcgcccaggtgcggcaccgggtcggtctgcaccatcgccggcagcatcgggatcaccggcgttgcggtcggcgcttggggttgccaatccagctgcgcgcgatgcacgccgcgctcgtcggtcaacaacagatcgaggccggccggcgtggcgcgggcactgacctgctccggttcatcgaagccatccagtgcgatcaccttatggctgcgccagtcatcgccgtcacgctgatacaggtgcagcgcacccgcttccgggtccagcgccagtaacccgcccggcaccagcgccatcccggcagcggcttcggcgatgccgccgaacggctgcacgatgtccaccggatggcgcagcaacggcgcttcggcgtctgcggggtaacgccagaggccgacgttttcttcgttcacgaccagctcgccggtctgatcattcacctggcagtagctgctctccggtggcaggctcagaccacgcacgcgctgtggcgcagccagcagcttctgccccgccgccaccagccattgctcgccaatgccttgcgcaccgaccagaaacacgtagccgttgcgcgcggcgtcacggtacaggcacagcccttcgatggcgaagtttgtcttcgggacatacagcggctggctccagcggtgctggcggtccagcccgagcagcacggcctgctgacgcttgcgatccagggtggcgatcagcaatccctgctcgctggcgcggtgatccagcccgtcgaagcgaccttggaaactgctgagtaccgcgccctttgcatccagcatctgcaagccacgcgaatccgggcgcaccagcagctgcgaagcgcctggccagaatccgtcgttgccgatcaactgggcgctttcggcttccagcggggcggcgctcgtcatgctcagcgtcactgcggtctgctccgcaggcggctgaacggttccggactgacagcctgccagcgcaacgcagaggctcagccacaaaggtttgtacgaaattacgtccatggtttttccaatcagcagccgctgaccaacaccgttccgaaggggaacggaacggcatcggggcggcgtaagggtcgaagtcgatgaaggcgccaggtcagaaatgcgtcagggtcaggccgagcttgtaggtcgggccgtactcttcgtactgggcgttgtagtggctgcgcccggtgtagacgaagtaggactcgtcggtgaggttcagcgcctcgagcgtcacctgcaggttcggcgtgatgaagtagcccgccttgaagtccaggaacagctgctcgtcggcgtacaggtcgtgggcttcgtcatcgatgccagcgacttcggccaggtattcggacttgtagttggccgccagacgcatgttgaagacgtcgttctcccagccgatcatcaggttgccgacggtatcggagtggttcggcaggtcgatgctgcggctgctgccctgcccttcgatgtccgcgtcggacttgctgaaggtggcgttggcacccagcagcacgccgttccagggcgccggcaaccagtcgagcttttgcgaataggacagctcgaggccgtagagcttggcgctgctgccgttctcgaagctcaacgcttcgtcataggccgcccactcgcccgtgccggcgaggtcggtgttgtagatgaagttgtcgatgtccttgtagaacaggtatgccgccacggcgccggcacggcccatgtagtgctcgatgccgaggtcgtagttcatcgactcgagcggctttaggtcggggttgccgaactccgcttcgtcgccgtcgatgacgaacccgggcgccagctgctcgaacgtcgggcgtactacggtgttggtccaggcggcccggatgaaggtatcggacgtcagctcataacgggcgtgcaaccccggcagccagtggtcgtagcggttgttgctggaaacggactcgaattcgccgtcccgaacgccggtacccttggcgttgagttcggtgccttcgtaacgcaggccagcgatgatgcgccacttgtccacatccacagtgttcatgaagtaggcggcgttgatgtcctcgctcatgtcgaagtcaccgatgcgcgactcttcttcgtcgcgaaactggctcgcgtcctggccaccgatcagaccttcaagggcgccagcactgatgcctgggccaaagcggccgaggccgtagtcgacagtgccgtgctggaagtcggccagggtcagatcatcgaaatcatcgtaggcccagacatcgacgtcgttgctcttgtcgcgccggctgagcttaccgccgaacttgaattgagaggcgtagccctggatgtcgtagtcgcgggccaggtccagacggatgttcttttccttgtcgcgggcatcgctctcttcccactccacctcgtccagctcgaagctggcgggatcgtaaaaggaaggatcggccgtcagccgcggtttggtcgtgctggaaaaaccgacatcggcgaagtcgccctcgaaggtggcgctggaaatgccgcccgggttgcgctcacgcgcctcgctgtagccgacctgcccgctgagcgtccacatccccatcatccgctcgccgccgaagacgtaggactggatggtctgggtttcctcgcgcgatttcagttcgcgccagccttcggcatcgcccagctcgccggccagctgcgcgtcttcgaactcgacgccggccgcattgcgggtttcggtgtccttgaagcggctgtagagggtgcgcaggtagtagctgctgacgtcatcgggctggtaatcgaagttgaggccgaacccggcgcgctcgcgggtgatctcgtagtcgcgctgctcgaactcctccagccgggcgccgtcctcgaaatcccacttgccgccggtttcgacgttgtcggagccgaagtcgcgctcctgccagctcagggcggcggcgacaccgaagttgtccacgccatcaccgagactgaagcggttgctgaccgcaccggagaacttcgggctggtcttgccgacgttctcgtcatagctgccttcggtgctgaggctgtagaacaggccgtcgtggtcgaaggcggacaggctctctacctcgatggtgccgccgagggagttggcgtccatgtccggggtcagggtcttgaccaccgagagcgactgcaccagttcggagggcagcacgtccagcgccacggcgcgacggccgctttccggcgatggcaccagggtgccgttgatggtgacgctgttcaggtccggcgcgatgccgcgcacgctgacgaagcggccctcaccctggtcgcgctcgaccgagagccccgggatgcgctgcaaggcttcggcggcattgtcgtccggtagctggccgatgccgtcggcgtggaccacgctctttacgctgtcggagttgcgttgttccttcaatgcctcgtcgatgctggcggcctggccgatcacttcgacgtgttccaggacaagcggctcctcggcccaggccgaaccggcgctgacggccagggccagcaggctgatgcggaatcctgcatggcggatgccgctgcggtatgtgctcatgaacaatcccccgaacgctgattaccgggtccatcccggaactggagcggacggtagggagggtatgtggcggttctgtgacagagctttttgctggggcgccagatggcggttattggggtggttttgggtgggggttgagctgatttgacctgttttcggcaaatcagatcctagcgctgagactgcttggccaacgaagacggtgcgaaagccgtttatcgtgcgttccgatagctctgtttcgccctgctgggcgactcactttttccaaacgcggaaaaagtaagcaaaaacgctttgcccctgcatccggccctgcgcttcgcttcgggttcgttcgctccatcgttgcttcaggggtcggcttacaagggccatccatggccctttaagcctttcgccgcatccatgcggctcaaccccttacgcaacgattccactcaccctcctgatggggcattcggtgtcgtctgttggtctgtgccagagatcaaaagactgagcgttgtgcgatgggcttcagaacgtaggatgggcgaagcccatcgcaagagctcgatgggttgcacccatctacgagactattcgcccctaaccaggaaggcgcttcgctgctgttcaaaacgtccagacgactcggtcccgagtccccttcaggaggccgagcgtaggtgctgcgcagggggacgcgaggcatggatgccgagcgaggcgcgatgggacatggatgtcccttcgcgccggcccccggagcagcaccggagcgagggaagttttgcgaagcaagccggggacgcctagtccggatgcaggggtggccttctttttggttactttttcttggccacgcgagaaaaagtgactcgcccagcagggcgaaaccaacgcttcagccacctcgcaaacaggccttacaaccaaaacgatctagctcctcagttaaaccacctcataaaaagcggtgagccaattcaacccccaccccattcatccaaccgtcacattcatctgttcccgtgccctcacgcactggcgcgcatccgccacggagacccgatgaaatccctgctcaagctccacaccctcaccctcctcggcctcgccatggccgccaacgctggtctgcaggtctacctcgccaccggtgagatcaagacctgggccgagatcaactggatggacgtcgccggcgaaggcggctcggccgtgctcgccctggtctggctgatcatgctgttgcacagccgcccggccggtcgggtgacccggttactcgcgctggggctggcgtgcgtgttcttttcctggtggatggacacgctggacgaattcatcaagctgccggaactggccatctgggacaactggctggagaccgcaccgatgcccgtcggcctggtgctgttgaccctcggcatctaccacctcaatcaggagcaacgcgccatcagccagcagatgagcaaacgtgagaaaggtttccgcgagcaccgcctgttcgacaagctcacccccttgggcgccgccgaatacctgcgccagcaggtgcagcaggcgctcgggcacgcccaggcggaacaacaaccgctgtcgctggtggtcgtggacctggatgatttcagcgccatcaaccagcgctacggccaggccgagggtgacgccatcttgcaggccatggcgcaactgctgctgctcaacctgcgccgccaggacctgctctgccgtctggccggggatcgcttcgtcgcggtattgcccaacaccggcgagacccaggcccgcttgattgcggccgaattgcagcacgccgtggccagcctggcgcacaagaccgcgcagcacggcgaacgggtccaactgcgggccagcaccggtaccgtgatggccttcgacgaggatgccgagcagttgctcaagcgcctcaacttgaacctggccaagaccaagcagcagctgccgcgctgcgcctgaggaacggccatgaccacaggctacgattgcgacacgcgcttcatccccgcgcatcatcagccggccgtgctgatcgacctggcgctgtcacgcgggatcgacagccaccagctgctgcgtggcagcgggctgttctatgaagacgtcgtcggtggacaggcgcggatcagcccccttcaatttctgaccctgattggaaacgcgcaacgcttgctcggcgccgaagacagcagcttcctgttcggccaacgatcgctgcccggccactacggcgaggccagccacgcactgacccacgcctgcacgctgcatcaggcgctggaacagctgcagcaatttcgcgccctgctcagcccgctactgacgccccgcctgctgctcgacgggcagcaggcatacctgtactggaccgacagctgtggcgcaggcgaccagcagcgctttctcaccgaggccagcctgaccgccgtggtcgcgatgagcagacggctatccggcgagcgactgccgtggcgcttttaccttgcctatccgcaaccgcgatatgtcgagcaatattgggtgcacctgggcgagcagctgaccttcgccagtcagatgaccatgatgagtctgccgctggaatatctgcacaagccctggcccggcgcttccgctatcgccggacaggttgcgcagcaggcgagttgcgcacagctggcaagccttggctggcctggcagctttatcgatcagctgtacgaccatctgtacgcgaatattcgcgagccgctgaacctggagcgtgtcgccagtgcgttcgagatgagccccgcgtcgctcaagcgcaagctgcacaagcacggcaccggcttccaggaccagctcgatcaggtccgcaagcatgtggcgctgtatctctaccagatgaagggctacagcaacgaggaggtcgccggctacctacgcttcaacgacaccaccaatttccgccgctcgttcaagcgctggacgggcctcgcgccgagcgccctgcgccagttgctcgacagctgacgcaggctggagctggacgtcgccgaggcgggctactgcacggtccgcctggccggtaccggcgcggcttcgcgcgtggtcggtcgatcgctcagggtggagaacgcctggcgcagcagcaaagcggcaacgccggccagggccagaaatgcgatgagcaccggtatggcatgttcgttcattgcgctgattccactgatgagaaggctttgccgtgatggccttctgatactagcactatgcggaacgcagcaatagcgcaccggcaccggtccgatggaccgtaacgcgagcggatgcgagacaaatcgcctcgtggcgggtcttacccaacaaccgaccgactcagccactcgtgggaggccctatgcagcgggactacaccaggcaataccaccatttgcgcacacacatcgatcgcatgctcggcaacggcgcggtgatcgaggaacggagaccgctcaccatccgccgcggtgatcagctgttccgcgttgcgtgcggaatgctgatcgccgagttggaccgctgaaacgcggctcgagaagaccgctggcttgggctccgcagacaccgaatgccctaccgccgcccggacagcctgtagcgtcgcgatcgagcgggcgcgctcatgccagccggccggctgaaacccgatgcagggttccgctgccctgctcgaacgcgctgatgttggccagtgtggtttccgcgatatggctcatcgcctcgcgggtgaagaacgcctggtgcccggtaatcaacacgttgggaaaggtcgtcaggcgcatgaacagatcgtcggcgatcacgcgctgcgacaggtcctgaaagaacagctgctcttcctcctcgtagacgtccagccccaggcggccgatcttcccgctttttaacgcgtcgatgaccgccctggtgtcgaccacccgcccacgtccggtattgatcagcacgacaccatccttcatccgcgcaatggcctgcgcgtcgatcaaatgatgggtttgcggggtcagtgggcagtgcagcgagatgatgtccgcttcggccagcagcttctccagtggcacgtaatgcacgaacgccttggcattcgagtcgggcgcaggatcgctggccagcaccctgcaaccgaagccgtgcatgatgtcggcgaaaatcagcccgatcttgccggtgccgaccacaccaacggtcttgccgtacagatcgaacccaagcagcccgtcgagcgagaagttgccctcacgcacccggttgtaggcgcgataggtcatgcggttgaggctcagcagcagggccaccgcatgctccgccacggcatgtggcgaataagccgggaccctcgccacggtgatgccgagccgttcggcttcggccaggtcgacattgttgaaaccggcgcagcgcaacgcgatcagttcggtgccgctgttgtgcagctgccgcagcacctcctgatcgagccggtcattgacgaacgcgcagacgcccctgaaacccgcggccagcgctgcggtatccgccgtcagcgatggttcgaagtagaccagctcgtgccgagaagcctcatttgcctgatcgagaaaaaggcgatcgtaggctttgctgctgaataccgcgacgcgcatggccacctcctgcgaaaaggtcttcgggcggcgctggttggccgcatcattgctcgtgccggctccgcaaacgctggcacggccggaacatcaggccagtccgtcgaaggacagcactgaattggcctcgtgctgacgctgcggacaatcggtcgagacccagagccgccccgcaaccaacgcagcaggatcgccgcacggctgcggtcattcaccccagcgactccttcaaccactgccgtacccggcgacgctcacggcgcgacagcaactgtttagtgaacgggctttcgggaatcagggcgcacgctggcccgccgttgtcgcccagctgaaaccggcgcagaacaccgatcgggtggcgctccgggccgtagaacgcaaccgcgcgaatctccaacgtgtggaacgtccagtcgccagcaggcttgtggccatgcagttcgatgccgtgctgctcggcgatgcgccgcaacatgccctggaaagtgccgatgtggatgaagtcaccgctgcgcaacgggccctggtgcgtcgtctggtagatcggcaggtccggtgattcgccgtcttcgtcgtcgatgctttgccggatgtcggtcacgtcgagctccagcgggcctttggatgtttcgacacagaccatcagctggttgatgaacatgggctcggcgctcatgttggaaatcagacagagcgaactcagtcccctgccggcgccacgattgatgatcaggctcggcttgcgctgacgacggaagttgagcagcagcagctgcgcatagaacacccagaccagcaaagtgctggcggaaatgatcagtgagatcagctggtggttgtctttcagccattcgatcatcggtagtctcgatgcgttgtgaactgctcagacagcacgaaccccagccagtgccagcccgcacgacgattgcagcccatcgccgcgaagcggacggctggtacgaacaatccaccggggtggcagatccgaagctcaaagcaggttccgccccggaggaccatcgatgaagaccgcatccctgagcattgcactgatcgcagcattggcggcgaccagcaccgtcgccaacccggacgccgccagcgatcggcaggcccccgatcagtctcagcaagaccgcaacagcgacgcttcggcgcatggctatcagaatccgaccggccccgatcccgacccgcgcatgactgaccaggtcggcgaagacaccttggaccaggacgacgagcactccacgccggcaacgcaggacgagcggcaggagacgaaacagcactagccttgggcgtcagcgatccaccggccgcccaacacgggctgccttcatcggaagcgatccgattggccgcacgcggcggccaatcggtgacgttcatggtttgacgacgaggccaacgccgcggccgcgcggatccgatgcagtctgcagcgcctgcccgtccacgcgtatggcctggatgtcgcccatcgaccaaccctgatccttaaggacataacccatggctttcagctcatcggcgaccttgccggtcagcggcgcataggcgtcgtagtaaatggtgtccttgggcagcagctggtgatgaacgcgttgcgccgacacggcctccttcaacgggagcttgaagtcgtacacgttgttcagcacctggaagatggacgtgaatatccgtgagccacccggcgtgccgaggaccaggctgacctgtccatcctgaacgacgatgctcgggctcatcgaggacagcatgcgtttgcccggctcgatggcgttggcgtcactgcccaccacgccaaacgcgttggcgacgcccggcttggcgctgaaatcatccatctcgtcgttgagcaggaaacccgccccctggaccaccacgccgctgccgtagtcccagttgagcgtataggtgttgctgacagcattgccttcggcatcgacgatggaaaaatgtgtggtttgccgtggttccagtccgggccgtacctgctcggtggccgagatcgccgtcgggttgatctcgcgggctcgacgcgccagatagtccggcgcagtcagctggacgaccggcacatcggagaagtctggatcaccgaggtaatcggcgcggtcggcaaatacccgcttctcgatttcagcaagcaaatgaatgtagcgcaccgagtttaactcgacgcccttgaagtcggcggcgcgctgctccttgataccgatcagctgggccagcgcaataccgccggagctgggtaatggcgcggtgtagaggcttttgccgcgccagtcgatacgcattggctcgcgccactgggtgcggtagtcggccagatcgtccttggtaatcagcccaccgtcacgctgcatttgcgcgaccagcaggtcagccgtcttgtccttgtagaaatcatcagcgccctgatcggctatgcgctccagcgtttcggccagttccggctgacggaagttgctccccggacgcatggcgccgaagtacgcctcgaagttggtcgtgccgttgaacagcccaatggcatcctcgcgatactggaattgctgatcggccacttcgaagccttctcgcgcgtagccgatcgccggcgtgatcagttcgctccaaggcagcgtgccgaagcgccggtgcgcttcccacagacccaacaccgtgccgggaacgccagccgccttggcgccgaccaggctcaggttctcaatgacctcacccttgtcgtcgaggtacatacgcttgctggctgctttgggggccacctcccggtagtcgagaaagtagggtttgccgcccatgtaaagcgtcatgaacccaccgccaccgatgtttccggcttccggataggtgaccgccagcgtgaaagcggttgccacggccgcgtccaccgcattgccgccggcactgagcacaccggccgcgaccttggcgctgtaggcatccggcgccgcgactgcagcaccttcgagtttggcgccgagggcggcgtggctgttgacgacaagcgaaacggtcaagacgacgaagagaggtgaacgcatgctgctcgatccttcttgttgatttttctggccgggcgacgggaggcgtacgcgtacggtgaacaatcaacaagatagacgagtatcgaggcgaacccggggccggccgtggtcgccgacgggtggcaagcgcacctggcgaaccagcgagacgcaccattggccgctcggcatcgaccgcaaagcgctcgcctctcaagtcagaggcgagctggaccatccatctgtccaaacgcgccgggtcagtagtcgcagttttcgcggtattcggaaatcgcgaggttcgcttcgtggttcgggccgcagaggaacgggtcgtagcggcgatcgaaatcgatgaagcgcttcatccaggaaatgccgtacatcccgagcaggtcttcattggggtagccggagttggcgcagaaatgcgagccgccgtagatctcaagaaaggctttcggggtggtattagggattcggttatagaacggcgaggcatgcgccgccaccggcgccactacatcggctccgcacgccagaatcatcgtcggcgtcttgatggtgctgaaactgttgagcccagcgtagtacggcgcctgcgggataattgcgttgagcgaacgttcggtcgcgagcttgagcgagccacctccgcccatcgaccagccgatgacgcccaggcgcgcgctgtcgatcttgcccgcgatcggactggagcgactgttgctctgttcgatgaggtagtccagcgctcggctgagctgagtggcgcggctatcgggctggtcgtagatagtgttggtattcatggtcatgaccacaaaaccatgggacgccaggcgcggcccccaccactcgatactgttctcgtacgacagatatcccgggatcacggcgatagcgcccatccttccgctggcattggtggggtaatgcacggtgctgtcgccgaatcccttgagatagccggacaccgagaatttggcgacgctaaacggcccggatcggctcttgagcgaagcaaccgtcggattaggcccacgtgcgcagtccgtgcaaggcgcggacgggcccggggcggataacgcgtaggcacttgccagtagcgaagtaatcagcagcgcacttctcaccattgatgttttgatcttcattgagttcgcctcttgttattgttttcgctagttccccttaccaactcgcaggcaaacggcaagcctgccggaacaaaaactaacaagagcggcaagaagacaacaatctgctaacacgctcaattcgtacaagcacccacttccgaaccccgcttagccatctacgaccaatggccggcgcaactaccggcagcaaaaaaagttccgtaaaaaacagaccgggcgttagcacgcgccgttggcgattagctcgaagccaccagcctttgcgccagcattcatgggcttcggcacaagacacgtgcagcgtcgagccaggcgaccggccgtcacaatcagggatatgaataagttttgataactttccgccaatccataagcctggagcgatcacagtctcacccgcttaccgtgccccactttgacagccctgtagcggccactatactcagtcgcagttttctcccagttaagttaatcgaagtttattaaggtgattgaacgatttcgccccttctctaaaaataataagtaacgaaccatgagccattcgggttccaaccaagatcgagggcctgcgctggtctatgtttcaagcaggcgctatatctacctcgggcgcacccagttgcgcatcagggatttgcattcggccgcttcgtcattattggtttgtcttgaggggtctgtgagatttcaggtaccgggcgacaaccactggacaagggccaagagcattctcattccggcgggtacccggatcagcatagagaaccagggtggcgtgatatcggcctgttacctggacgcaacgaagccggactttcaggtgttgaggcgccgaatggcatcgatcacgtcaggggtttattacaacctcgtaggcgagaaccttttcgcggaaaatctcgttcggctgcgcgatgacgcgccggatttcgccgaggcccagcgtcgcatggaggcgctgatccatcacagttccaacgccagcatggcaaccaccgatcctcggatcacctacgtaatcgagcggctcagggataccgcctcactgaatatttcggtcagcgcgctggcaagcgaagtcggcctgtcggaatcgggtttgatacggctgttcagcctgcacgtcggaacgccgctgcgcaggcatcgcctgtggtacaggctgatcgagttcgtcacgttgacgctgtctggtgtgcccaccgcctcggcaatcaagcaggcgggctttaccgacgcctcgcatctgtctcggtgctatagcggcttcttcggagtcaacctgtcctacgccttctcgaaaagcgtcaacgccaggtatatcgtcgaaaagcccctcgcacagctgcgccatccctcccgttagaatcgcgctcgcgctcgcgctcgcactcgcgcccgctaacgctgcccttcgaccgacggaaagctcgccaatccggcctgattggctggatggcgcttcgttccaaggcaaagctaccggctgtcaatcggctgcgctcatcggttgggaataatggatatcttgccgtccttttccaaaatggcgaatttgatctgatccagccgttccaacccctgtgtagtccgcgcagcttgcaagatatcgtcttgatcgatgcgagacttctggatgcgccgatccagtacttttccatattcaacgataatcatcgactcaccatcgataagctttgcaatcctagtcgattttctttttatataagtcaacgtgatatccataccaaccagtgacacaatcacgataaaggcattggttattgaaaagtcatctccgagcagagcctgttgagtcgcctctccaataaccaacagcagcacaaaatcgaacgtcgtcagttcagagagtgttcgccgtcccgccaccctgaaaacgaataaaaccacgatataaatggcagcggagcgaagtacggaatccataacgagccccctctacggataaatatattgggtcatctttattgagctggtatcggtacgcacctcactcacagaaattcccacttcgcttgatcgaacggagaagtaggcagtgacccagccattcgaacccggtcgaaactgcaatcgcaacccttgaccaaaactttccgaggcaaggggttccggctggatgctctcaactgtgaaattccgcaaaaaatcaccaccgatcaccacccatactttgccatccggtccgttctgcgcgcttaccttgatatggccggacgccccatttcgctcgaaccgctgatattcaattttcaggttcccgtcaggcgcttgcgcgaccgtctggcttatcgggccgctgccaaacaatcccagcaatgccgaaagcaccaatacacccaacaagccccaaccgagccgttccagcgtccacaatcgacactgcagcctcatatcctctcggatgggataattgcgattatccagatcggttttccaagacgacatcgcagcagctcctcgagtactcattgagtatgtagataaatacccatcggaaaagtttttacgaagcggacttggcaagcggtacagcgagaacagatcaaccgatgcgttacttagttcgtaatggcgccatatccataaataacgaggcgcagcagcgtctcgccacgctccgctagttcctcagaccaccccgtcaacactgccatttagcgattggttggccataatccagcctcaatggccttgtctctgtgcattcgacgaatggccgaaattttccatcgatcacctctcgtacctagtgaggcgacagcgctttggtcaactagcgtaacagtggcggcaactttgccaatggccctgagcgggcttccgaaacgggtcaaaagcgtcgccagatagcggctgcaattcgccaatgatcgcgaaaaagcttccgaggccggtcgcaagggcggcgagcacagccatggcggcggtcgcaactcgtgataaacacagccgctctctttaccggaggtaattaccacaacaagagcagtaggtgacgaatcccgctaacgtcgcaacttatttgaaggggatagactatcccgcaaagaaagacgatttggttcaatacgccaagaagaatggtgcagagtcggaagtaatcgacgaaaaccgcatgcccgaacaggagtacggcaacatggccgatgtcatgaagggttacggcgacacccgttagcacaatattcgttaatttagcgggccggcgctttcagtgccgacagttcgcgcgctcttacgccttaccgattcgttgctcgggctgtgccttaaggcctgcccaccgcgcttagccataccatgtcgataggccaggtgcagagagcagctgcctacaggaacagcagaaatgaaaaagccccgtgactcaaagaatcacagggcttttaaatagtggcggagagatagggatttgaaccctaggtacccgcgagggtacaacggatttcgaatccgtcccgttcggccactccggcatctctccagcggcgcgcatcatagcagttcgcgaacgattgtcgaaccccacagggatcttttttctcgctattcagcgtgttgcgttggtctgagccaaatctgcctggccagtcaacggccgcagtgagcggattggctcaagcggtcaggcgcgtcagggcctcgcgatatttgtcggcagtcttctgtgcgacatcggcaggtaccggtggcgcgggcggctccttgttccagccggtggactccagccagtcacgaacgaactgcttgtcgaaactcggtgggttggtgccctcctgatagctgtcagcgggccagaagcggctggagtcaggcgtcagcacttcgtccatgagggtcaggcggccttcttcgtcgaggccgaattcgaacttggtgtcggcaatgatgatgccgcgggttgctgcgtattccaccgcggcggtatacagcgctatcgaggtatcacgcacctgagcggccagcgctttgccgatgatggactcgcattgctcgaaagtgatgttctcgtcgtggtcacccacagcggccttggtcgagggggtgaaaatgggttgcggcagtttggccgcttccttcaagcccgccggcagagcaattccgcagacggtcccggccttctgatattccttccacccggagccgacgatatagccacgtacgatggcttccaccgccacgggcttgaggcgcttggccaccaccgcacggccttctaccagcggcaattcgtcagccgggaccacatcctcgaccttgtcgccggtgaagtggttgggaatcaggtggccgagcttgtcgaaccagaaattggaaatggcggtgaggatcttgcccttctccgggatcggctcggcgaggatgacgtcgaacgccgagaggcgatcggtggcgaccatgagcatgcgcttgtcgtcgatttcgtacagatcacgaaccttgccggagtagatcttcttgaggctgagggcattgggggtggtcatggcgcttctcgcggtttgccgaaccatcgccgcgttgcgcacgtggcgatcggatctgtcatcaaacgaaacaggcgaaacctgtaggtttcgcctggatgggttggagcggatcgatgcgaaggatcagtccaggttgtctttgagcatagtcagcacgcgccgtgctacgtcggcgggtgcaacggtatcaagatccttgtcgagggctacctgtacattggcgccgacatcggtgacacggacttgatagcgctcggcgcgagcctcgatttcctcgcgatccggagtcgagccgaacagcctggagaagaagcctggtttctcatccggcttcgccgcgccttccgacaggttgatgtaataaacacccagggtgcgatcgaggtcttcgacaagaatgtcgctggcagccagggctcggccaacgctcgaccaggcgcggttgaagtcggtatcgagctgcaacacgggcgaaccgctgccggcttcgctgagtgtcacacggctgggcgcatcgaagtcacgctcggcgagcaacgaggtcgagctgccttgggccgcactgctgttcagacccgcctgcaattcgtcgagcaagacgcgatcgagttcggcgttagccggctcgtcgggccaggcgacatcggcactgctgccggcaggacgctgaacgctcagtacgtagatttcgctggtatcacgctgcaccccgggttcgatgcgaacacgaacacgggtttcgcctgttcccagcccaaggttgcgcaccaatgccggagccaattggtcgcgcgtctgccaggcggtgacgaactctcccgtttgtgagcgctcttcggcgatctggaagccgttgtcggtgaagaactggcgcgtcgcggtccagacctgggaaggagcgcgcatggccacaagccagcgggcatcttccgatgtctgcaggctgaaatcgctgctctcttcggcgacgaccaagcgttgcggacgcggcacttcgtattcaccgctcgcacgggtgtcggctacctgttgaggaataggcagcagcggttcgatcggtcgcagcctgacgtcggccggcgcttgcataggcgggacctggcgtgcctgaagatagtcgctaccacggtcgcggaaatatccgtcttcgccccaaatccagccacaaccgctggttccagagatgatcagggctagggtcgagaggccggccagtcgcttcatgcatgttccttcattgtcaaatcggtaagcggagctcgctcaggccagcacacctgactggcgcatcgcagcgcggagcggctcctggcagcgctggcttagccaagtcaggggcagacggatgccgtcttgcatcagccccatctcgtgcagcgcccacttcaccgggatcggattggcttccaggaacagggtctggtgcagcggcatcagcaatgcattgatggctcgggctttttccgcatcaccggcaatggcagccgcgcagagctcactcatcgcccgcggggcaacgttggcggtgaccgaaatgttgccctttccacccatcagcatcagctccacggcggtggcgtcgtcgcccgaatagacgaggaaatccttgctgacacgatcgagcacttcccggccgcgcttgaggtcgccggtcgcttccttgacgccgatgatgttcggcaccgtggacagccgctcgatggtctccggcagcatgtcacaagcggttcggcccggtacgttgtagaggatctgcggaatggccacggcttcggcaatgtggcggaagtgcaggtacaggccttcctgggtcggcttgttgtaataaggggtgaccaacaggcacgcgtcggcaccggctgacttggcgttttcggtcaattcgaccgcttcccgcgtcgagttcgcaccggtaccggcaatgaccggaatacgaccgttgacctgatcgaccacccggcggatcacttcgatgtgctcggggacctcgagggtcgccgattcgccagtggtgccgaccgcaacgattgcattggtaccttcctggagatggaagtccacgagtttgctcaggctatcccagtcaagaccgccctgtgcgtccatgggagtgaccaacgccaccatactgcccgcaatcatgcaaccactcctgccggaaaaagagaggcgtaatggtacaaggctcccgtgcgctttgcgagtgggctggatacaacctgacgtcggaacgattgcgcggcggcgacacgcttcgcacggcgatatccggtcgcgcattccctcaggcgatgcttttcgctacccttagccgttttcggcctggctggccgacccgattcatcaccgccaggaacctgcatgtccacccccccagtaccccgagaacagtttctcgtcatcagcgccatgggccgcagcccgatggcgctcaccaacgtgctttgccgagccagcaacgagaatcgctgcgccgtggtcagtacccgcctgacccgacatggcgaatactgcgcgctggtcctggagatcaccggaacctgggacgccctcgctcgcatggagacagcgctccccggcctggcaaagaagcacgagttcaccaccaacgtggtgcgcagcgaagcgctggagactcggccgcaggcactaccctacgtggcctatgtcagctcggtgtatcgcccggacattctcaacgagttgtgccagttcttcctcgatcatcgcgtcgagctcgaaagccttacctgcgacacctaccaggcaccgcagaccggcggcaccatgctcaatgcgaccctcactgtgacgctgccggccggcacgcagatcagttggttgcgcgatcagttcctcgattttgccgacgccctgaacctggacgccctcatagaaccctggcgcccacaaaacccgtaatgaaggatgtccctatgcccgtgcagatcgaccaccccgttccgccatttcaggcccaggccaccagcgatacccaggtcagcctcgatacgctgaaaggcaagcaggtcgtgctgtacttctacccgaaggacaatacgccgggctgcactaccgagggccagggttttcgcgatctgcacgatgccttcagcgaggccaacacgctggtcttcggcgtgtctcgcgatagcctgaaaacacacgagaacttcaaggccaagcagacgtttcccttcgagctcatctgcgacaaggacgagcagctctgcaagctgttcgacgtgatcaagctgaaaaagctgtatggcaaggaatacctgggtgtggaccgcagcaccttcctgatcgaccgcgacggcgtgcttcgccagcaatggcgaggggtgaaggttcccggccatgtcgaggccgttttgcaggccgcccaggcactgcacagccaataaacgaaaggccagcggatgctggcctttctctttctagacgtgctccaccaccgggacggtaggtgccctgcggggccaggcatacagcaccgccttgaacaaggtggccaggggaatcgcaaagaacaccccccaaaagccccaaagcccgccaaacagcagaaccgagcagatgatggctaccgggtgcagattgaccgcttcggaaaacagcaagggcaccagcacgttaccgtccaacgcctgaacgatggcgtaggccaccatcagatagatgaactggtcacccaagccccactggaacaatccgatcagggcgatgggaatggtcaccaccgtggcaccgatatagggcaccaccacggaaacgcccaccagcagcgccaacaaggcggcgtagttcagctccagcgcggcgaacaccgcataggacaccaccccgcagatcaggatttcgatcgccttgcctcgaatgtagttggcgatctgcacgttcatttcctgcgaaacctgggtaatcagcgctcgctcgcgcggcagatagccgctcagccagtcgctgatctgctggcgatccttgagaaagaagaacaccagaatcggcaccaggatcaggtagatcatcaggctcagcagcagcggcaggctggacagcgatgatgtcagcaccaactgaccatagcgccccacctccccgcgcatgaaatcgataccgcgcagcacttgctcttcggtcagcaactgcggatagcgctcgggcaagagcagcaacagcgactgccattcgaccagcatccgcggcagctcgttgaacagcgtcagcacttgctgccagagcagcggcacgagaaacaggatgcacaccgacagcgctccgacgaacatcagaaacaccagccagaccgccaccaggtgaggaattcggacgcgctcgagggcgccgaccaacccctgcatcagaaacgccagcaccaggccagcgagcaccggggcgagcatgtcgcccagggtcaacaccacagcgaatgcggtgaccaacaatacagccagaaccaccgcctcttcgtcagagaaatagcgatgtatccaaccgcgcagaacattcagcatgtgcgcttccttagcggcctcaggcctttcgcaaccagtaacgataaacgccttcgtccgcctcttcacgcaacaacgtgtggccggccaacttggcgaagctgcggaaatcgcgctgcgaccccggatcggtcgccgtgaccatcagcacctgcccgctggcgagccgattgagttcgagcttggccttcagcagaggcatcggacatgccagcccgacggcatcgagctcggcatcgcaggcggtgtcgtgcactggctgttgagtcatgagtcatctcctagaaagaagcgcaggataccgacctgcgcccaccgctggccagttacccaggcacaaggctacagtaacgctcccgcttcaatgagccagtctggatgaaactgctgcgccctactctgctgacgctggcatgcctgattgggcagccggtcatggccaacgaccttccctcactcggcgactccagctcgggcatcgtgtcaccggagcaagagcaccagctcggccgcgcctggctcagcttgctccgtgcccaggttccgcagctgtcagatccccagctcaaggacttcgtcgaacgcagcgtctacaagctggccgaaagcagccagttgcaggatcgccgcctggaattcgtgctcctcgatagcccgcaactgaacgcgttcgccgctccgggcggcatcatcggcgtcaacggcgggctgttccttcatgcccagactgaggccgaatacgcctcggttctggcccacgaacttgcgcacttgtcccagcgccactttgcccggggactggaagaacagaagcgcatgcagctgccgctgatggcggccatgcttgccggcgtcgtcgcggccgcggccggagccggcgatgccggtatcgcggcgatcgtctccacccaggctgcggcgatccaggcgcaacgccgcttctcccggcagaacgagcaagaggccgatcgcatcggcatcgtcaatctcgagcgagccggctacgatccacgcgccatgcctgagatgttcggtcgcctgatgcgccagtatcgctatgatcagaagccgcccgagttcctgctgactcacccggtgaccgagtcgcgtatcgccgatacgaagaaccgtgccgagcaatatcctgccggcggcgtcgaggacagtctgcgctatcagctgatgcgcgcgcgggtcgacctgaagttcgaaagcacacccggtgtcagcgccaagcgcttccgggccatgctcagcgaggatccgaatctggacgccgcgcgctatggcttggccctggcgcaaatcaagagcggccagctcgatgaagcagccggcaacctgcaaccgctgctgagcaaagagccggacgacgcgacctacaacctcgcgcagatcgaactggatatcaccgccaaccgccttggcgcagcccgggcgcgtacccagacgctgctaaagctctatccaggcagttatccggtgcgccaggcggatatcgacctgctgatcaaggaaaacaagctgcaggaggccgagcaagcgctcgatgccctggtcgatgtacgccgcaaggatccggacatctggtaccaggtttcggaaattcgcgggctcaccggcaacatcattggcctgcatcaggcccgagccgagtacttcgcgctggtgggtgattatgaccaggcgatcgagcaactcgacttcgccaagcgtcgctcgaacaacttccagacagcggcgcgcatagacacgcggcaaaaagcgctgatcgaagagaagcgcatggtcgaagagatgctccactgagctgatgcgcaacgtgccggtcgcacgtcgcgcatccttgaggcgaacgtcaggcgttgccggcctgacggatgcgcgcggcctgcgtgaagtccagcatccgcttcaacggtttgatcgcgcgcggcactagcgccggatcgacgaatatctcgttactgccgaaacgcaagcaatccagcgtgcgctccagcgtgttcatcgccatccacgggcagtgagcgcagctgcggcaggccgcgccattgcccgcggtcggggcctcgacgaactgcttgtccgggcaaagctgctgcatcttgtagaagatgccgcggtcggtggcaacgatgaaggtgggatggggcagcgtctgcgccgccttgatcaattgactggtggagcccacggcgtccgctagggcaatgaccgactcaggcgactcgggatggaccagaatggccgcatccggatagagcaccttcatatcttccaactgcttcgccttgaactcttcgtggacgatgcaggcgccatcccacagcagcatgtcggcgccggtctcacgctgcacatagctaccgagatgcttgtcgggcgcccagataatcttctcgccgttatccatcaggctttcgacgatctccagcgcacagctcgaggtcaccacccagtccgccctcgcttttaccgccgcggaggtgttggcgtagacgaccacggtgcgttccggatgctggtcgcaaaaggccgagaattcctcgaccgggcaaccgagatccagcgagcacgtggcatccagcgtaggcatcagcacacgcttctccggattgaggatcttcgccgtttcacccatgaacttgacgccggcgaccacgaccgtctgcgcctcgtgctcgttgccgaaccgcgccatctccagcgaatcggaaacgcagccaccggtttcttcagcaagtgcctggatcaccggatcggtgtagtagtgcgccaccagaaccgcattctgccgtttcagctcaacggcaatatcgcggcgcagctgcgcctcctgctcgggcgtcaacggcttgggctgcttggccgccaggtgggcctgcaccaaaatacgttcggggatctgcgtcatgttcgcggtcctgcaaagcacgttattgcatgaagcgccgggcaacagccggtcaaccggatcggctcgaacgaggcgaaagggagaggcagtacgatatgcagattccgccttcctgcccgctcaagggggcaagaatactagccgaagccgctgcaaaagggaaagcgaggggcaaccaggcaacaccgtttagcgccgcccaaatgtaaaccgcccgcatcagccggcggttctgttcatatcaccgctcagatttgagcatgtggccacgttcttccaggttgatatgccattgcatggcttcacgcagcatgtgcggtgtttgaccaccacggtcacaggcgccctcgaagtactgattcaatgcttcgcggtaggacggatgcacgcagttatcgatgatcacccttgcccgctcacgtggagccaacccacgcagatcggccaggccttgctccgtgaccaggatttccacgtcgtgctcggtatgatcgacgtgtgcaaccatcggcacgacgctcgaaatgttgccgcccttggcaatcgatttggtcacgaagatggccatgttggcgttacgcgcgaagtcgcccgaaccaccgatgccattcatcatcttggtgccaccgacgtgcgtcgagttgacgttgccgtagatatcgaactccagcgcggtattgataccaacgataccgaggcgtcgtaccagctccggatggttggagatttcctgaggacgcagcaccagcttgtccttgtacttctccaggtttccgaacacgcggtcgttgcaacgctcggacagcgtgatggaacagccagaggcgaacttcatcttgccggcgtcgatcagttcgaaggtgcagtcctgcagcacttcggaatacatcaccaagtcttcgaacggcgaatcgatcagcccgcacaccacggcgttggcaatattgccgataccgacctgcattgggccgaggttcttcggcaggcgaccttcggccacctctttcttgaagaactcgaccaggtgattggcgatggcctgggtttcttcgtccggcggcgtgacggtggaataggagtccggctgttcggtgatgacgatcgccgcgatcttggccgggtcgaccgggatggccggcgtgccgatacgatcgtctaccttggtcagcgggatgggtccgcgattcgggcgctcgccggggaagtagatgtcgtgcaggccttcgaggttgaggttgtgggccagattcagctcgacaatgatcttgtcggcgaataccgccaggttggcagagttgcccaccgatgtcgtcggaacgatatggccctgctcggtaatgctcaccgcctcgacaatggtcacgtccgggcgcttgatctggttgttacgcatctgctcgacggtgtgcgacaggtgctggtcgatgaacatgacctcgccctgattaattgccttgcgcagcgtggcgtccgcctgaaacggcccgcgacgtgccagcagacccgctgccgccatctttccgtcgagatcgttaccgaggctggcaccggtaatcaggctgattttcagcttctcgtctttcgcacgatcgatcagggccaaaggcaccgctttcgcctcacccgcacgggtaaagccgctcatgccgacggtcatgccgtcgtgaataagagtagccgcctcatgggcgctcatgaccttgctctgcagggaggacaagcggatgcgatcggaatacatttgagcctcaaaccaacggacaatcgggaggtcgcagtctattacgtttgatctcgcctcgttcccagaccaaggtcgtagtgaaaaacggcggttatagctatccgatataggcgtttcgcatctcattttttgcaggcataaaaaaagccggaattcatcgaattccggctttttcgctccctaacgggagaatttggtgggtcgtgtaggattcgaacctacgaccaattggttaaaagccaactgctctaccaactgagctaacgacccgttgcggtgcgcatgatactgatttgattagttaaatcaacgtttatggtgaaaaaagttaactgtagcgcgtagggtctacgatgccggcctctgcaaagcctgcagcacgcagacgacagctatcgcacttgccgcaggcgcgaccgtcatgatcggcctgataacaagagacggtcatggcgtaatcgacacccaaacgaataccggtctggatgatctgcgccttgctcaggttctgcagcggcgcacgaatagtgaagccctgcccttccacaccagctttcgtagccagattggccatccgctcgaaagcctcgacgaatgccggtcggcaatctgggtaaccggaatagtcgatcgcattgacgccgatgaagatatcccgcgccccgagcacctcggcccagcctagtgccaacgagaggaaaaggctgttgcgcgccggcacataagtcaccggaatgccctcttcctgggcttccggcacggcgatgctctggtcggtcagcgccgagccgccaatgccattcagattgatcccgatcaccttgtgctcgactgcctccaactgcgcagcgacgcgctcagccgcctgcaattccgcgcgatgacgctggccgtaatcgaagctcatggtgtagcaggcatagccttgtgccttggcgatcgcgaccacggttgcggagtcgagcccgccagagagaagaatcaccgctttgctgtttgtcattgtcgttacctgtcgaaaatccgggcttctacgagatgactcgatgaaactcagtggccgggcgcgtcgttccacagcagcttgtgcaactgaagctgcaaccgcaccggaagattgtccgcgacgatccactcggccagtgcgcgcgcgtcgacctgaccgtgactgggggaaaacaacacctcaccgacgcgctcatccagccgatattcgatgagtttggatacggaccagtcgtagtcttcgcgcgagcaaatgacgaatttcacctgatcgttgagggtcagctgagcgatgttttcatatcgattgcgacccacctcggcagagcctggcgtcttgagatcgacgacccgactcacccgccgatcggtttcggaaatatcaagcgcaccgctggtttccagcgagacgtcgtaaccgcgatcacagagttgacgcaatagcgcaacgcagttcggctgcgccaatggctctccgccagtgacacatacataccgaggcttgtaggaggcgacccgttccagtatccggtcgagcgacatgctctcgccgccgctgaaagcgtaagctgtgtcgcaatattgacaacgcagggggcagccggtcaggcggacgaacgccgtgggcaagccactggttcgcgtctccccctgcaacgagaagaaaatctcggtaattcgcagggtttcttgcataaaggccacgggcgtgacggctaaacaggccatccgcctccgttgcgtaaaaggggctgagagtctaacgaaaaacccgccgttagggcgggttttgttggtctgcgccggcttatcggcttatcgactgagttgacgctgggccagctgggcggcagaactgttcgggtagtccgcaatgacctggcggagaatgccgttagccttgtcccgattgcccaggcgaatctcgacatccgccagcttgtagagcgaatccggcaccttgttgtgttgcggatacgcctgagagacacgcgcgaatgcttgccccgcgccttgcagatcgcccttggcgagattcacctcacccagccaatactgcgcattgcccgcataggggctattgggatatttacgcaagaaggcggaaaaagcctggctggccttatcgaaatccttcgccttgatcagatcaaacgcagcgtcgtagtagagcttctccttttcaggatcggctgactgactattcgccgcgccttgcgctggcgcacccacaggcgcctgtacgggaccactggcgtcgattgcacccgtggccgaagaatcctggctaaccgatctgcccgaagaggcagcggataagcgactgtccaaatcctggtaacgctccagcccttcctgtttcagacgctggatctcgttctgttgcacttcgagcatgccgcgcagttgagcgatctcttcctgcatctgctgcaactgaacgaagagcataccctgcgccgaagacggagccgatgctccgcctccgacataggcaccgccagtttccgcaccggaagagtaattcgtctcaggcgcgccaccttgggcttgcgagtcgtaatccactaccgggacctgggccgccgcaaaaagcggcaggccaagcgcaataagcgtcagagcgtaacggtgcttgagcatggcttattacttacgcagctcaacgcggcggttctgggcccaggactgctcgtcgttacccatggcaaccggacgctcttcgccgtaggaaaccagttccagctgagcaggggaaacgccctgcagaaccaggtagcgctgaacagctttggcacgacgctcgcccagagccatgttgtattcgcgggtaccgcgctcgtcggtgtgaccttccagaacgacacgattgccggcggacttcaggtccttggcgtgaacgtccagagcgcgcatggcttccggcttcaggtcggagctgtcgtactcgaagtagaaggtggtgatggcgcgcagggcagcttcttcgccgctcatgctgccgtcgacagcaccgctgtcagcaccgtaaccagcgttcggatcgatggcggacgaaccttcgcccgaatcatcgccgcctttggacgaacaaccaacagcgacggccatagccagcgccagcgcagcgaacttaccgaatttcagcatttccatgtgtaacaaccccaggtgtgtttttggttagtaaagcgttgtaccgcatcagttcaggtaaggggaccacgatggctcacggacttcgccttgagcagtaggaagcgggagcctaactcgaccattgatggatacgagcatcaagactccccggccctgctggcgggtcgcgtagattagcatggtgccattaggcgcaacagtgggcgactcatctaaactggtttcagagagcaaccgcaaattgccgcgctgcaggtcctgtgccgccaccttgaagttggtgtagccgtcctgacgatgaatcattaccaaggtcttctcgtccgcggagagctttgggttggcattgtaattaccaacgaaagtcacccgctcggcattgttgctgcccagacgttgcttgtagatctgcggcttgccagcgcgatcggacgtgaagtaaatggtttgaccgtcggcgccccagaaaggctccgtatcgatcgcatagtgattggtaagccgctgcagctgccgcgaccccaggtccatgacatagatctccgggttgccatccttcgacaacacgaacgccaggcgattgccgtccggcgagaacgctggcgcgccgttgagcccttcgaaattggtgatctgctcgcgacggccggtatcgatgtgctgcatgaagatacgcgggcgcttctgctcgaacgagacataggcgatgcgacgtccgtccggcgaataacgcggcgaaagaatgggttcgcgcgactgcaacagggtgaccgcacgcgcaccgtcatagtccgagcgctgcaaggtgtagcgcgtattcgccccgccaagacgctcgaccgtgacgtaaagcagtcgggtagagaacgcccccttgatgccggtcagcttctcgaacgcctggtcggcggcgaaatgcgccatgtctcgcaactggtcctgaccgccgcctacggtaccggtcatgacctgttgctcggtggctacgttgaacacttcgtagcggatctgcagcttgccggcggacggcgtgatgtcaccgaccatgacgtactgcgcacccaacgccttccagtcgcggaaaatgatttcgctgccgcggctcggcatgctgatcatgttctgcttcggtatgggttgaaagataccggtgttacgcatgtcgttgccgataatctcggccatgtcgtccggcagcaccgttccgccctgccaaccgaacggcaccacggcgataggaatcgcacgatcggcaccgctggtaacgacgatgttcttctcctgggccatggcagtgcccagcacgaacaggagaaggacagtgaaacctcgaaggtaattgatcacaacgctagatcctcaggcgtaaatgtcatcttgaacgagcggtacggctgaaaatcctgagcagagaggccctgcatctcggtcagccgaccgatattcttaactgctgcaaccgccgaattgtcgaatggcgcatcgccgcttgaacgtgaaacagtgacggaggtgatagtgccatccggcaacatgttgacctgcagcgtaaccgacatgttgttgcgcgccgagggcggtcgactccaaccttccgcggcacgcaggcgaatcagatcatcgaaattgccggccacctgatcaccctgggtatcggccatcgcctgctgccgctcggtgctatcggacaacagctcggcaagcgcttgagccttcttgtcctcggcagccttacgcgcggcctcggccgcagccttcttcttcgcctcttcggcggcctttttcttcgcagcttcggcagccgccttcttcttggcgtcctcagccgcctttttcttggcttgctcggcggccgcttttttcttcgcttcctcggcagcctttttcttctctgcctcttcggccgcttttttcttggccgcttcatcagcggccttctttttggcgatatcggcctgttttttctgttcggcctgtttagcctcttcggccttcttcacctcggcagccttcttggcagcctcagccttcgctgcctcggcctttcgagcctcatcagcctttttttgttccgcagctttagcggcagcctgtttttgctgctcgaccttgcgctgctccatctgctcggtttcgtactgtttggcagccgtcttctgcgcctcgccggcaatcttctggttggtctgcgtcttggcctggctttgcgacttgagctggtacaaggtcgcctgaacgatcggtttggaaggcggcagctcaggcgtcatggcgaagctgacgaagagcattccgaaaatgatgacgtgcagcccaaccgccagaatggtgggccagtagagactttccgagcgcgaacgttccggatgtggcatcacggcgcctcggttatcaggccgacattgcctacgcctgcttcctgcagcccacccatggcagccatcaccgaaccatagtccaccgccttgtcgccgcgcacgaatacctgcacctgcttaccctggctgcggttctggttcatgatcgcggtcaccgccttggtcatctcgccgagggtcagcgccttgtcctgaacggtttccgtgtcgacctcggtgcccatgttccagtaatagcttttgtcggccttgatcgagatggtcaagacgcgcgcatcgttgtcctgaggcaggacctcgctgctgactttcggcagatcgaccttgacgccctgattgagcatcggcgcggtcaccatgaaaatgaccagcagcaccagcatcacgtcgatgtacggaaccacgttcatttcggcgacaggtttgcgtctgttgcgaattctagccatggcctgcggcctcaatcttcagtggtgtgaactttacgatgcagaatcgcctggaactcgtcggcaaaggtgtaatagcggccgatgagcatctcaccacgcgccgagaagcggttgtaagcgatgactgccgggatcgcggcgaacaggccgatggcagtagcgatcagcgcttcggcgatgccgggcgccacggtcgccagggtcgcctgctggacctgcgccagtccgcgaaacgagttcatgattccccaaacggtaccgaacaggccgatataagggctggttgaaccaactgtcgcgagaaacggcaggctctgatcgagcttctcttcttctcgcgaaatagccactcgcatggcacggttgacgccatccatcaccgcgtccgggtccactcccggctgttggcgcagacgggagaattccttgaagccggcacgaaagatctgctcgacgccagagtcgggatcaggattgctgccggcttgccgatagagcttggacagatcgattcccgaccagaagcgttcctcgaatgcatccagggaccgcttggcggcacgaagcatgctgccgcgctggaaaatcaggatccatgacatcaccgaggcgcctaccaggatcaacatcaccaactgaaccacaaagctggcgttgctgatcaggctccacatggacatatgatcgacgttggcttccacgcttactctcctgctgggggtaggcccgacccggcgaaagctgctcgcagcccttcgggaatggaacggggtttcaaactctcggtgcgcacgcaggccaccacgaactgcccttcgcagagcagtagatcatccttcgctcgccgtacctgctgcctgaaccgcaggcttgcgcgcttcatctctatcacttcagccgacacgagcaactcgtcgtccaacctggcgggcgcgtggtatcgcgcctcgctggaatgcacgacgaaaagcaggtcttcacccaccagctgcgactgggcgaaacccaggctgcgcaaccgctcggtacgggcccgctccatgaacttgagataattgacgtaataaacgataccgcccgcgtcggtgtcctcgtaatagacacgacaccgatggaggaacggttgagcatgtgattccgcgcgcatactagtgccaggccctgcaaatgccaatcgggtgtaacaaagatttttcctcactcggtatcgccgctgaaaaggtctgcgatcggcgagtcagccatgcgtttcggcagattcaaaccgaagtgcagataggcgtggcgggtgacgacacgtccgcgcggggtgcgcatgatgtagccctgctgaatgagataaggctcgagcacatcttcaatggtatgccgctcctcgctgatcgcagcggcgaggctgtcgatacctaccggcccaccgtcgaacttttcgatgagcgtcagcagcaggcggcgatcctgatgatccaggccgcgctcgtcgacatcgagcatgttcagcgccatgtcggcggtgccacgcgagatttccccattgccgcgcacctcggcgaagtcgcgtacccggcgcaacaggcgattggcgatacgcggcgtcccccgcgcccgccgtgcaatttcgacagcgccttcggcttctatgggtagaccaagaatgcccgccgaccgggcgacgatggtcgccaggtcggcggtggaatagaactcgagacgttgcacgatcccgaagcgatcacgcagcgggttggtcagcataccggcccgcgtggtggcgccgaccaatgtaaacggcggcaggtcgagcttgatcgagcgcgcagcgggcccctcgccaatcatgatgtcgagctggaagtcctccatcgccggatacagcacttcttcgacgatgggcgacagccggtgaatctcgtcgacgaagaggacgtcaccctcttccaggttagtcaacagtgcggcgagatcacccggacgctcgagcaccggaccggacgtgctcttgatcgatacgcccatttcctgcgcgatgatattggccagcgtggtcttgccgagccctggcggaccgaaaatcagcgtgtgatccagcgcttccttgcgcgcccgggcggcacgaatgaagagatccatctgctcgcgcacgaccggctgcccgatgtaatcggccaggctcagcgggcggatggcgcggtcgaactgctcctcgcggtcacgaccggtggcggtaatcagacgatctgcttcgatcactagaccattcccttgagtgcacggcggatcaggtcttcactgctcaaatcgtcttcctgtacggcggatacggcacggctggcctcttgcggcttgaagcccagcgagatcagggcgctgacggcatcgctctcggcgcttgagactgccacagcaccccggggttccaccaccagggtcgcgatggacggcatgttttcccaggccttgaagcgatccttgagttcgaccagcaaacgctcggcggtcttcttgcccacgccggggatcttgaccaacacggaggtatcctgcgcctggacacagcgcaccagttcgtcgacctcaagccccgacatcagcgccaacgccagttttgggcctactccgttgaggcggatcagctcgcgaaacagttcgcggtcgcgcttctcggcgaagccatacaacaggtgcgcatcctcacgcacaaccagatgggtgtgcagcgtcagcgtctcgcctgtggcaggcagacgatacagcgtggtcatgggcacctcgacctcgtagccgacgccgttcacgtccagtatcaggtgcggcggctgcttttcagccaggatcccgcgcaaacgtcctatcactgtgattcatcctctttcggccagcagcaagaggcagaccggtaagttgtttccgagcccagcatgcgagagtcagggcatgagcgttacaggcgcaggcgcccgccgcgccgcttggcgccggaaagaccatgcggaatcaggctctgccgatgatgggcatgacacaaggcgatagccagggcatccgatgcgtcgatctgaggcttctgcaccagtttcagcaaatgcatgaccatcatctgtacctgctgcttgtcggccccgccggtcccggcaatcgcctgcttgacctgagtggccgtgtattcggcaatctccagcccctgctctacggcggccacgatcgcggcaccccgcgcctgccccagcttgagtgcggaatcggcattgcgcgccatgaacacctgctcgatgcccatagtcaccggaccgtgcaggcggatcacctcgctgacgccgacgaacaccgcctgcaggcgagcggccagctcgccactgccagtacggatacagcccgaggccacatattcgcagttgcgaccgttatccctgaccacgccgtagccggtgattcgtgagccggggtcgatccccagaataagcgtcatgccgtcgccatactgtctatttatccagccgccagtataaggagctcgacgcatggcggccagcgggataacgaggcgtgaacatctgtcgaaaacaggccaacaaaaagccggaagcaccgaggtcacttccggcctttggcagcaccatggatcagtccaactgttccatgatctcgtcaggaatgtccgcgttgtggtagacgttctgcacgtcgtccagatcttccagcgcatcaatcaagcgcagtaccttctgggcggtttccaggtcggagagcggcgctgatatcgaagggatcatggcgatatccgcctcttcggccttgaaaccggccgcgctcagcgcctcgttgactgcatgaaattcggtgaagctggtggaaaccagcgccgagccgtcctcgcccatttccacgtcgtcggcacccgcttcgagcgccgcttccatcagagcgtcctcgtccacgccggccgcgaagctgatttggcccttgcggtcgaacatgtaggccacggagccatcggtacccagattgccgccgtgcttgctgaaggcatgacgcacttccgccgcggtgcggttgcggttgtcggtcatggcttcgacgatgatggcgacaccgctcggcgcataaccttcgtaggtcagctcgacgacgttgtcggcctcgttgttgcccgcaccgcgagcgatggcgcgatcgatcacatcgcgcgacatgttggccaccagcgccttgtccaccgccaggcgcaggcgcgggttatcggcagggatcgccccgctcttcgccgcaacggtcagctcacggatgagcttggtgaatatcttgccgcgcttggcgtcctggcgccccttgcggtgcttgatgttggcccatttggaatgaccagccataactgcctccctttctgatcaactctttcatcttgctgaaaaccaagagcccaggtttccctgggctccggtgacgccgtcattcggctttaggctgctcgcgcaggcgaatgtgcaactcacgcaacgccttggcatcaaccgcaccaggggcttgggtcatcacgtccgcagcgctctgggttttcgggaaagcaatgacttcgcgaatcgactgcgcgccagtcatcagcatcaccaggcgatcgagaccgaacgccaggccgccatgcggtggcgcaccgtacttgagcgcatcgagcaggaagccgaatttctcgtcctgctcggcctcgtcgatccccaggatgcggaatacagtctgctgcatctccttgcgatggatacggatggagccgccacccagctcggtgccgttgagcaccatgtcgtaggcacgcgacagcgcgccggccggattggcctcgagctcctgcggcgtgcacttgggtgccgtaaacggatgatgcagggcgctcagcgagccgtcgtcgttctcctcgaacatcgggaaatcgacgacccacatcggtgcccattcgcaggtcagcaacttgaggtcgtgaccgagcttgatacgcagcgcacccagggcctcggagacgatcttggccttgtccgcgccgaagaacacgatgtcaccatcgaccgcaccgacgcgatcgaggatcacgttcagcttgtcttccgggatgttcttgacgatcggcgactgcagcccctcgacgcccttggcgcgctcgttgaccttgatataggccaggcccttggcgccgtagatgccgacgaacttggtgtagtcgtcgatctgcttgcgcggcatgctcgccccgcccggcacacgcagcgcggcgacacggcacttgggatcgttggccggcccgctgaataccttgaattcaacctgctgcagttgatcggcgacgtcgaccagctccagcggaatgcgcaggtccggcttgtcggagccgtaacgacgcatggcctcttcgaacggcatgtgcgggaactcaccgaactcgacgcccaacacttccttgaacagcttgcgaaccatgccctcggtgatgccgatgatgtcggactcgtcgaggaagctggtctcgatgtcgatctgggtgaattccggctggcggtctgcgcgcagatcctcatcacggaagcattttgcgatctgatagtagcggtcgaagccggcgaccatcagcaactgcttgaacagctgcggcgactgaggcaacgagaagaagttaccgggatgggtgcggctgggcaccaggtagtcacgtgcgccctcaggcgtcggacggccgaggatgggcgtttccacatccaggaagccattttcatcgaggtagcgacggatgctggtggtgatgctcgaacgcagcttgagcttctccgccatttccgggcgacgcagatcgatgaagcgatagcgcaggcgggtctcctcgccaacatcgctgtactcgttgagcgggaacggcggggtttctgcctcgttcagcacttcgagctcgtatcccagcacctcgatggcgccagatgccatgttcggattgaccgccccagccgggcgcaggcgcaccttgccggtaatcttgacgacgtattcgctgcgcaccttgtccgcagcggcaaaggtctcggcgcgatcgggatcgaacacgacctgagccaggccttcacggtcacgcacgtcgaggaagatgaccccgccgtggtcacggcggcgatgaacccagccgcaaagtgtgatttcctggccgtccaggctttcattcaactggccgcaataatggctgcgcatcatggtgaggttcgcttctcgcatcttgaattcgttgggtcgctcgactcgcgactgggcagacggcggcttcttggccccgcctgggtgttactcgtcggcatatacggcagccggcgccacagcgccacgcttcccgcacggcacacacgagccgtccgacacaagcgcgggattatatccgcataatcgaatcaacgcagccgacaccgatagccctgagcaatcgagacgatagccaacgtcattgaaccgagccccatcgatagcttccaatcagcacatcaccgctggcgacagtgcgtcgctcacaacgagtaacggttttctggcataactatcagcgaactcatcaaaacgggagagcaacatggaaattgatatcggtattgccgaacaggatcgcgccgccatcgcggacggtttgtcccgcctgctggccgacacttacacgctgtacctcaagacccacaacttccactggaacgtgacgggcccgatgttcaacaccctgcataccatgttcgagacccagtacaccgaactggcggtcgccgtggacgatattgccgagcgcatccgcgcgctgggcttccccgctcctgggacctacgcagcctacgccaagctgtcgtcgatcaaggagcaagagggcatcccatccgccgaggaaatgatcaagctgctggtggaaggacaggaagcggtcgtgcgaaccgctcgcggcatcttcccgctgctggaaaaagtcagcgacgaacccaccgcagaccttctgacccagcgcatgcagatccacgagaaaaccgcctggatgctgcgcagcctgctggcagcctgagacggatccagttctctagaggggtggccgcgaaagcgaccacccccgcgaacgcttctaaccgcatagaaccctatcgtcagcgtcgtcgtcgccttcccttcctctccccgtgggagcctgacgcgccatccatttgagcagcgccttcctttactgttaaatacgcgcgcgccgcaggctggacacattaatagagcgatcgattcccccacgctcagcttccactcgtccaacgcctggcgctttctgtcgtgctttttaactgcgagtcataaacaatgctcaagatcatccatgtattaacgggcgtcgctgccctggtattgtcattcctgcccagcctgaccggcgcgttaccacttctggtgcaacccgaagcgctggccctgttgtttctcgggctattgaacgtacagttcgcctcgtttggccccttgcatatgcatggccggggccgccccgtccttctcggcgcatcggtgctgttggttgttgcggttgcagtccaggccgccgtactgctgatcccggttaccgccattgccggtcagcccgcaacgcttgccagcctcatgctcgccttcgtggcggtgctgctgcaactggcgacagcgccagcgaaaagcctaccgtccagcgatcgcagccgcccctcgagcagtcgcaaggcccaatcccgaaatgcgccagcgccagctgccggccgtgaaaccggcacggtcaagtggttcaacacctcgaaggggttcggcttcatttcgcgagacagcggtgacgacgtcttcgtccacttccgcgcgattcgcggcgaaggccaccgggtacttgtcgaaggtcagcgcgtcgaattcaccatcatgatgcgcgacaaaggattgcaggccgaggacgtggtccccagccagtcgaccatctgatacttggcgccagattcaacgctggcccgccacctccgtcgccatcaatagtgcggcggaggcgcttcgtccccttctccatccattctgctttgcatatcctcttgccgtctggcgagcaaagccagttgcgcctgcaggcgctcgacggtccgctgctgcgcaaccaatacgtcgttcagggtctgaatcgtatcgtcttgaaatgccaggcgcgcttccagatcgatgatgcgttgttccagctccattacgtcactccgcaaaacgaaagttgtctgtaagcaccagcttgagcttctgcctgatcgccgccacctgagtctcgctataagggctggctgcgtgctttccccagacgggcgccggccaagcagcatcgtcccgtcgccgcgcgatgacatgcacatgcagctgcgccaccacgttacccagggtagcgacattcatcttgtctgcgccgaacgtgtccttcagtgtctcggccaacgccgtcgcctctcgccacagcatctgctgatccgccgaatccagctgaaacagctcgctgacctcctcgcggcgcggcacaaggatgaaccaggggtagttggcatcgttcatcagcagcagccgacacaacggaaagtcgcccatattgagcgtgtcctgctccaatcgcgagtcgagaacgaacataacggcactccaagtcttgatcgagggacaggccagccgaagctgcgcgtgatcgttagcgcaagaatactccaacgcctcatgcccttcagcgcctgcaatgcaccaagcctgagcaccagaaagctgcaaggccccggattagagcctgccgccccgagccgaggcccgaacacaggcaacaaacgtgatttttgcgtttgcgcacgcttattgcagtgagtcaaaaagcacaagcggaagggggagaaaaactgaaatagctgcgttaagcttgcccgcgctagtttccccagctacacagtaattctcggaacgttaattccagggcttgctgcaggtttcgaacaactgggcaaacaaggactgaaattgagcttgtataccgaaaataaagatgcctctttccggcgcacgcaggaaagcaagcaccaatttgaaccaaaggagcaatcacgatgaaagtgatgaagtggagcgtaatcgccatggccgttgcggccggcacgtcgcaaatggcattggcgtccagccagtccgaatcggaaggctttgtcgaaggcagcagcctgaccatcctgaaccgtaacctgtacatgaaccgcgatttccgtggcgatgcttcccaaagctatcgcgaagcatggggccatggtttcatcggcaccttcgagtccggcttcacccaaggcaccgtcggcgtcggcgtcgacgcaattggtctgctgggcgttaaacttgacagcggcgaaggtcgtgcttggccggacattttcccgagtgacagcgaaggcaagccgcaagatgactattcctcggccggcgtagcagtcaaattccgcgtttcagataccgtgctgaagtacggcactcagttcgtagcgctgccggtcttttccaccgacgacgcccgcctgctgccagaaactgcacgcggcggcctgatcaccagcagtgagatcgatgggcttgaattgaacgtcggtcgcttcactgccctgagcgcaaaatctgaagcggaccatgattccgttggcctcgaagagatcaacctcgtcggtggcacctacgcgtttagcgacagcctgagcacctcgctgtactactcggacgtaaaggacgcgttcgagaagatctacggcaacgttaattacaacatggcgctcgccgcagaccagtcgctggcttttgacttcaatatctaccagaccgactacgagtcagagttcaccggtactggtagcgacgaagacaacaccatctggagccttgcttctacttacggcattggcgctcataagttcacagtcgcgtaccagaagtcgcatggcggctacaataccaatggctatgtctatggcgtagacggcggcggcaccgtttggctaagcaactcagtccagtactccgacttctattacgaagacgagcaatcctggcaggtccgctatgacctcgacatggccgcctatggcgtttcgggcctgagcttcatgacccgttacgtgagcggtagcaacatcaacatgggcgctggcaactcggacgcggaagaacgcgaatgggatatggaagccaagtacgtgttccaggaaggtcctgccaaggatctgtctctgcgtgttcgccaggcgttctataacgccaccaatggtctggataatgacctgagcgatacccgtctgatcgtcgagtacccgctgagcatcctgtaacccaggctgatcagctttagctcgagcaacacgataagcccggcccacgccgggcttattcgttgtggctgacgaccagctgatcgattctgtacgccatcgtggcgccgccgtacaatgccgagtcatttttccgctctgcaaggacacaacggcccacatgcgcaccagtcagttcctgctctcgaccctcaaagaaaccccttccgatgccgtggtcatcagccaccaattgatgctgcgtgccggaatgattcgcaagctggcttccggcctctatacctggatgccgatggggctgcgtgcactgcgcaaggctgaagcgatcgtgcgcgacgagatgaacaaggccggcgcgctggaagtcctgatgccggccatccagcctgccgagctgtggcaggaatccggtcgctgggtccagtacggtcctgaattgctccgactgaaagaccggcatgatcgcgagttctgcgtcggcccgacccatgaggaagtcatcacggatctggcgcgcaacgaactcaacagctacaagcagttgccgatcaatttctaccagatccagacgaaattccgcgatgagattcggccccgcttcggcctgatgcgcgggcgcgaattcgtgatgaaggacgcctactctttccatgccgatcaggcttcgctgcaggaaacctatgaccgcatgcatcaggcgtactgcaacatctttacccgcctggggctgaacttccgccccgtacaggccgataccggttcgatcggcggcaccggctcacatgagttccacgtattggccgagtctggcgaagacgatatcgccttcagcgacagctccgactatgcggccaacatcgaaaaggccgaagccatcccgcgtgagactgagcgtggcgcacccaaggaagagttgcgcctggtcgatacaccgaattgcaagacgatcgcggcgctggtcgagcagttccagctgcctatcgaaaagaccatcaagacgctggtcgtgcgcggcgccgagaaaggccagctggtcgcgctgatcgttcgtggcgaccacgagctgaacgagatcaaggcggcgaacctgccacaggtcgaaagtccgctggtgttcgcaaccgagcccgaaatccgtgccgcgatgggcgcaggccctggctccctcggcccgctgaacctgccgatcagctgcgttgtcgatcgctcggtcgcgctgatgagtgacttcgccgctggcgcgaaccaggaagacaagcactatttcggcgtcaactgggaacgcgatctgccattgccggaagtggccgatctgcgcaacgtagtcgccggcgacccgagccccgacggcaatggcacgctggttatcaagcgcggcatcgaggttggccacatcttccagctgggcaccaagtacagcgaggcgatgaactgctccgtcatgggcgagaacggcaagccggtcatcctgaccatgggctgctacggtattggcgtctctcgagtcgttgccgcagccatcgagcagaactatgacgagcgaggcatcctctggcccgaggccctggcgcctttccagatcgccctggtaccgatgaagtacgaaaaccaggccgtgcgcgaagcaaccgacaagctctacgcggagctgacggctgctggctacgaggtgctgctcgacgaccgtgacaaaaagaccagtcccggcgtcaaattcgctgacatggagttggtgggcattccgcatcgcatcgtcataggcgaccgcggacttgccgacggcactctggaatacaagcatcgccgtgatgccgaaagccaggccgtgccggccgctgacatcctcgagttcatcaattcgcgcaccagtcgctaacggaaatcatgctcaaccgaagtgcttcaatctgcgccacgctttgcgtggcgctttttatgggtggttgtgccaaccagttgccccaacgcagcgagcacgaggcccgcaccgagcgcaagctgcttgaccacagtctgcgcatcgaactgggcgagccgctgctggagctgcctcagcgtcgaatccgagtgctcgaccagaagaccttcgaagtcaccgacttcgaagtaacccgtcgctatgaccggtatacgccgtatcaaccgtggcgcgagctgtacgaaattccgctgggcgctgtcgcggtggtcgccggcataggtgccaacgtgctcaacgtcgtgatgctcggccatcttccggaaagcgccacgcgcgactggatcagctatggctttgccggtctcaaccccttcgtcaatgtcgaatccaatggccgctcgcaacagaatctcgccagcctcgacgagcagcgtcgcgacgcccgactcgagtattccagcctgccctgggccgagcggcccgtgcaggtcgtagcggggagcgaaacccacgagctgactaccgatcgtaatggcgtgctgcggctgaacctgctcgacggcccgttcgccgaccaggacatcagtcaggtcggcaagctccagctgcaggtcgaggacccacaggacgcgacccgtgccgacgcaaccttgctggtcagccgcagcctgcgcggcaaactggtcgaggcccacgacctcatcttcgacgatctggaaggcgatgatgtcgagcagtgggtgcaccgggtcaagcgtctgtcggaactcgggctcgaagaagaggccagtgagctcgagcagagcctgatcgaattgacccacaacgatcccgatctgcagcagcaatttcttcacagcctgatgcaggacgccggtcgtcaggtcagcgatccgggcgaagactgaggccgctccgtgaagtctctccggtggttgtggctgatggcgctggtagcggcgtggccagtggctgcaaccgttcgccaggcgccggaaccggagctgcgcgagctgatgcagcggaccgtggcggaagccgaaagctttcaggatcgattcgacgccgaggtctggttgctggacatgtcgacacgcctcaaacgctatgtcgctgatccacaggagcgcctgacgttactgcgcctggtacatcaggaggccagcaaggcaggactgaagccggacatggtgctggcgctgatccacgccgagagccggttcgatcgcttcgccatttccagcgtcggtgcgcaagggatgatgcaggtgatgccgttctggaaggccgagctgggccgcccgcaggacaatctcactgacaacgccaccaaccttcgctacggctgcaccatcctcagctattacctgaaaaaggagaacggcgatatcaaccgtgcccttgcgcgctacaacggcagcctcggcaagccccagtacccggcgaaggtcatcgggttctggcaggacttctggtacgtgaaaccctgaaagttacgcggcgcttttccctagcgctgctgcctcaacgtgtccagccgggctagcagtccttccttcgtctgctcgcccaccagatgctcgcgcacaacaccggcggcatccacgatataggtcaccggcaacaccgtactgcgtggcaggtccaggcggtcggccggatcgacactgagcacgcggaaagcgattcccaagtcatcggccgctgcggccaactcgtcaccctgcaggccgtcgaagttcaccccaagcaccgtaacgtcatccctggcgctgtccagcgcgttcaactcgggcacctccgtccggcagggaccacaccactccgcccagtagttgatgaccagccactgacccttaagctgttgcgccgtgacagccgagccgtgctgatcagcgccccaatcttccccgcagccggccaacgccaggcagatgagcacaccgaacaaacctgcggatcgcttgatcattttcgtttccttgcaacgtagcggtgccgtgatcatacccgtcgcgcctgcagccagtcggcgacactgccgccgaagaggctggcctgctctttatgaagcagctccagggtctggcgcagcgttgggtaccagggctcgtcgagatgatccggtagcgcctgcctgcccgagagaggccagggattgcagcgcaacagctgatcgaagctgtaatgattgaggtcgcgacagagcacccacccggacgacccggtgcggcataccagctgctcgcgctcgaagaactcgaaaatctcgtcccattcgtcctccggcaactgccagccatttcgatgcgcgtcgcgcaaacgcacctcgcggccggcctgctggctctcgtaaagcacgcgcaacagcccgagcatgaccagcagacgtggcaccgagcgctggcgccattgctgcgaggacgacaagccgcacaccagctccgcgccaaacagcacgatcatccaggaaagataaacccacagcagaaacagcggcaccgctgcgaaggcgccgtagatcagttgatagctgggaaaatagctgacgtacaagccgaacaactgctttgccgcctcgaacagtacggccgtaaatgcccctccgaccacggcgtgccgcagcggcacccgggtgttcggcaccgccgcgtagatcaacgtgaaggccgcgatgctcagcacgagcggcatcgccttgagaatggtgcgcgcaccgacgacggcgtgcggcccggagatcagcgacagcgaggtgatgtaggtgctcatggcgaatcccgcgcccagcaacaacggccccaggctcaggatggcccagtacagcagaaagctggaaataccacggcggggttggcgcacgcgccagatgacattgaaggccttttcgatggtgagcagcatcatcagcgcggtggccatcaggaagcccacgccgaaccaggtgagctgcttggcctgatcggtgaaggcaaccagatattcctgaatggttgcgccggtggatggaatgaaattgttgaagatatagaactgaatctgctcgccgacgccctggaacgcgggaatcgccgagagcatggcgaaggtcaccgtcatcatcggcaccaccgcgaacagcgtcgtataggtcagggctgcagcgctgtgagccccacggtcggccagaaagcgctgcactagaaagcggacaaactcgacgaaatccttgatccgttgctgcatcccatcccctcggtgcctgcgacaattgcccaaacccacgcttgcaggcttgtgacagagcgaaagcctacctgtgcagacagccgcctgcgagcagcgtttcaagccttgccgctttgaaggttagaatgacggcctaccctggcgtgaagcaaaccacaaatgaccgaactgactctctatcacaatccacgctgctcgaagtcgcgtggcgcgttggaattgctcgcacagcgcggcctgacgcccaaggtgatcaattacctggaaacgcccccgtccgctgaagaacttcagcggatcatcgcccgtttgggcattccggcgcggcaactgctgcgcagtggcgaagaagaatacaagacccttggcctggcagacccgagcctcagcgaccgccagctcatcgaggcgatggtcgctcatcccaaattgatcgagcggccgatcctgatcgcaggcgaagccgcagtgatcggccgtccacctgagaaggtgctggagatcctgccatgagcgcgccctatatcctcgtgctgtactacagccgccacggcgccaccgccgagatggcgcggcagattgcccgaggtatcgagcagaccggcctcgaagcgcggctgcgcacagtgccggcagtatcgaccgagtgcgaagcagtagcggccggcatccccgagcaaggtgcgatctacgcgacgctggatgacttgaagaactgcgccgggctggcgctcggcagcccgacccggttcggcaacatggctgcgcccttgaaatatttcctcgacggcaccagcgggctctggctgaccggcgaactggtgggcaaacctgccggggtctttacctcgacgtccagcctgcatggtggacaggagtcgacattgctgtcgatgcttctcccattgctgcaccacgggatgctggtgctcggcctgccctacagcgagaatgccttgctcgagactcgcggcggcggtacgccttacggtccgagccatcacgcaggcgcagacggcaagcgcctgctggacgaacacgaaattgccctttgccgcgccctgggtcagcgcatcgcggacaccgccaagcgcctggagaatgtccgtggctagaaaacccaaaccgcttccaacactggaatggctgacaccgcgggtcaaacttgcccgtgcgatcagcctggccagcttcatcggtctcgctgtactgctgatggtctggaacctcgtattcgccgatctgcacggggcacgaacctgggttgtggtcggcattcagctgatcccgctcctgctggtcgccccgggcatcgtctccggcagcccacgggcgcacgcctggacctgtttcatcgtcaacctgtacttcattcagggcgtactggccgccatcgacccggcccggatgctctacggctggctggaggcgatcatcagcctgaccctgttcattggcgccctgctttatacccgctgggcttaccagtacgaacgcaaggcagcaggggaaaactgagtcgcgtgccggagcaggattactcctgctctggtgccagccgggctccgcagccatgacgatgggccgaagccatcttggccgggcttattggcgtagagaggcctcgcccaccggcgctggcccgaatttcaagacggaacgcgcgcagccatcacggcctgggcgctgctaccaaccgagcgtttccttgagaaacggaatagtgagcttgcgctgcgcctgcagtgaagcctgatcgagccggtcgagcagttcgaacaaggcactcatgtctcgagcgccgcgggtgagaatgaagcgcccgacatcatcgggcaggttcagcccacgccgcgaggcacgcagttgtagcgcgcgcagcttgtcctcgtcggacagctcctgcagctgaaataccagcgaaaggctcaagcgggacttgaggtccggcagctgtatcgcaatctctcgcggcgaagcatcggcggcgagtagcagacgccgtccgctgtcgcgcaatcgattgaacaaatggaacagcgcctcctcccagacggggtcgcccgcgaccgcctccagatcatccaggcagaccagttcgctctgctccagattgtccagcaacgccgggccgtactcggcgagctcggccagcggcaggtaaacggcaagctcgccgcgctgctcgacccgcagacacgcggcctggagcaggtggctgcgccccaccccggcgttgccccagagatagatcagctcgtcagaccagccggcctcgggcgagcagacacgctcgacgtagcccagcgcagcggcattggcgcccggatagaagttggcgaaggtggcatcgtcgcgaaggcggatgcccaagggcagctgaatgggtttcatggttggcggggcggatcgaccggaggctctgcgtaaaggtccgagagtttatagagatcatgcacgtggcgcagcagaaccatgatcaccgcggccaccggcagcgccaacagcacaccggtgaagccgaacagctgcccgcccgccagcacggcgaagatcacggcaaccggatgcagaccgatccggtctcccaccagcaacggcgtcaacagcatgccttcgagcatctgcccgaccgtgaacaccgcggccacgcccagcagcggatacggctccagaccgaactggaacagtacggcgaccaccgccgcgcctataccgaccacgaatcccatgtacggcacgatgctggcaagcccggccagcacgccgatcagcagcccaagctcgacgccgaccagcatgagcccggcggaataaaccacggccagcgccagcatcaccaacagctgcccgcggagaaaggcgccaatgacctcgtggcattcgcgcatcaaagctatcaccgtctcctcccggcgccgcggcaacagcgcccgcaacttggccatgatcaggtcccaatcgcgcagcaagtagaagcacacaaccggcaccagaaagagattcgccaaccatgccagcagcgcaatacccgaggcagtcgcctggctgagaatgatcgcgaccacgtccttggtgctgcctatattcgcggaaaacgcattcttgagctgatcgaaacgccagaagtcctcctccagaccaaattgcatctgcacccagggcagcgcggtggcctgaagccaatcgagccccagcggtgccagctgataaagatgcatcaactgcttgcccagcatcggcaccaataccagcagcatcaacagacaaagcagcaggaacagcgcaaacaccaggatcacgccccaggtgcgcgagagcttccagcgctccagcctgtcgaccagcggatcgcccaggtaggccagcagaatccccaccagaaagggtgagaggatcggcgacagctggtaaaccagccagccgagcagcaagagcgccgccagccaaagccagcggctggtgggggtgatggtcatggtcagtatgccttgttccgttgatcgaggccgaaggggctcggcagacgagagagaagaggcaggtgccgcccggactcggcacctgtccgttggccgcctgaagcagccgggtttctcttaccagcgaaaacgcagcacctcgccttggtcttccggcggcgatggtagcccggcgggccgttccggttcttcgacgggcgtctcggcatcgatcggctgggcgccggtatcagccgcggcatcaacgggcgggacctcggtttcagccggtcgctcatcgacctcgtcagcaggcacttcctgcagacgtgccaaggccagttgtgctcgaagttgctcggggctggcattgaggcgatacaccaggcgatcgctatcgacccgctgcaagcgggcgttgaacggctcgagcagacgatccagttcggcaaaacgctcgacatcggcgcccagcacctcgagcgtgatctccgagaccgctcccggggcgacacggtattgcggtgccaggaacgtactgacggccagcaggatctcatcggccagggcggcgcgcgtgccaccgctcgccttgccctgggtcttcttgtcgccaagccagaaatgccagttcgcctgccagctgtcgtcggagtgtttggccagcacggcgagcaggccatcggcatcgtaacgctcggaaacgtcgcgaagcgcccgaggctcgtctgccgcaaccgcttcagcagtggcagcgatctgctcgccaagatcggccagcggcaaacgcagcggcaaaccacgatgctgtgcggccgcctgcagctcggatgcgccgtcctgcacatcaccgatcagctgcgagccattactcgactccgtcaaccaccaggtcagaacgctgggacgatcgccaccccacaacgacaacccggcgctgcgcagcgcgcgctcggtggtggtcgggtcgaagctcaccaccaccgcaccgtcctcgtaggcatatcggctgatcagttgctgtgggtccttgcgtagctgcgcaacggcggcctgatccgtcttgggatcgccggtcagacgcaacaccaaggtatcgaacgccttgcgcaacgcctcttcgcgctccgcgggctgttggctggcaaccggctcacgcactttgtacaggtcgctgacaggtgccgccaggctgtgagcggaaaccatggcacagcacaaagctataacgcgggggataaggggcatgcggatactcgctggctggccagtcatgggaagcctaccggtcgctcggcggcggccggatgcggcaacgtgaacacgcgttataccttaaacaggcgcttgaatcggggcaaccgccgcacttgcgcgtcataggctcgactcgactcgccgctttagcctacggcagccggatcgggcgtgcgggatggtcgctatgcggcaagcctgataaaatcgcgcgctttccgctgaccggtccggcgccctcgccatgtcgagacagctgcctcgtcccaccggtcgccccgcactctcctcacaggtccggatctctatgagcaagcaaccctccatcagctacaaggacgccggtgtcgacatcgatgcaggcgaagcgctggtcgaacgcatcaagggcgtagccaagcgcactgcgcgtcctgaagtcatgggcgggctgggcggcttcggcgcgctctgcgaaatcccggcgggctacaaacagcccgtgctggtatccggcactgacggcgtgggcaccaagctgcgcctggcgctgaacctgaacaagcatgacagcattggccaggatctggtggccatgtgcgtcaacgacctggtggtctgcggcgccgagccgctgttcttcctcgactactacgcgaccggcaagctcaatgtcgacatcgccgccaccgtggtcaccggcatcggtgccggctgcgaactggcaggctgctcgctggtgggcggcgagacggcggaaatgcctggcatgtacgaaggcgaagactacgacctggcgggcttctgtgtcggcgtggtggaaaagagcgaaatcatcgacgggacaaccgtgaccgcgggcgatgccctgatcgcactgccctcctccggaccgcattccaacggctattcgctgatccgcaagatcatcgaagtcgccggggctgacatcgagaacaccctgctcgacggcaagccgctcaccgaactgctgatggcgccgacccgcatctacgtcaagccgctgctcaagctgatcaaggacaccggcgcggtgaaggccatggcacacatcaccggtggcggcctgctggacaacattccgcgggtactacccgagggcagccaggcggtcatcgacgtcgccagctggcagcgtccggcggtcttcgactggctgcaggagcaaggcaatgtcgaagagcacgagatgcaccgtgtgctgaactgcggcgtgggcatggtcatctgcgtggcccaggaccaggtcgacaccgtgctcgacaatctgcgtgacgccggtgaacaaccatgggtgatcggtcagatcgcggcggccggcgaagctgccgagcgcgtcgttctgaacaacctgaaaagtcactgatgagcgcgacctgcaacatcgttgtgctcatatcgggatcgggcagcaacctgcaggccctgatcgacagcctcgacgccgacaacccggcacgcatctgcgcggttgtttccaatcgtgcagaagccttcggactgcagcgcgcgcaggctgcgggcattaccacgcacgtggtgcggcacaaggactacgccgaccgggaagccttcgatgcggcgttgatggatatcatcgacacgcatcagccaaatctggtggtgctggcggggttcatgcgaatcctcacccccggcttcgtgcgccactaccagggccggctgctcaacatacacccgtcgctgttgccgaaatacaaaggtctggatacccatcgccgggcgctggatgctggcgatcgcgagcatggctgcagcgtccattttgtcaccgaggaactcgatggtggccccgtggccattcaggctgcgtttaccgtcgagcctgacgacagcatcgaagagctcaccgagcgggtgcatgcggccgagcatgtcatctatcctctggccgttcgctggttcgccgagggccgcttgcgcctcgccgaacaaggcgcgatgctggacgaaaccctgctgccggctaccggccatctgttacgaatctaggagatattatgcgtcgcgccttgctgcttgctctcgccgtactggctctgccggtccaggctctagagctcaagcccttctccgccagctacaccgccgactggaaacaggtgccggtcagtggcaccgcccagcgcagcctggaaaagctcgacgctgacacctggcagctggatttcgaagcctccatgctggtggccagcttcaacgagcgcagcaccttcaaggtcgaaggcgacaccttcattccgcagaagtatcggctcaagcgcagcgggctcggcaaaggcaaggtcatcaagcacgacttcgactgggccgcgaagcaggtcgtcggggaagaccgtggcgatcccatcaagctgccgctcaaccgcggcctgctggacaaatccacctaccagatcgctcttcagcaggccgtagcggcgggcgagaagagcatgagctatcaggtcgtcgacggggatgaaatcgaaacctacgatttccgtgtcctcggcgaagagaaggtcagcaccaaagccggacaggtggatgcgatcaaggtcgaacgcgtgcgtgacccgacccagagcaagcgtcagacgatcctctggttcgccaccgactgggattacctgctggtccgcctgcatcaggtggaaaaggatggcaaggaataccagatcatgcttgatgaaggcaccgtcggcggcaaagccgtgaaaggtgactgattccacctgcgccagttcgctggcgcagcttcactcgctgcaataccgagcccatcgatgacttgctaccgcgccctgatgttcgccttgctgccggttttcgcgggctgccaatacatgccctggaaccctcaaccgcccggacaaccgatcgaacggctgcagggagaggtcacgcgtagcgagggcaaactcttgctgcgcacctgccagggcgagcgacaggtagagctgctcgactcgcaaacgacgggtttcggtgacgatgcacaagcgctgtgggctgacggcagcgcgcccttgttcgccgacgtccgtggccgactggtctcacgagccaacggcaacgcacagctgcaattgacccagatctaccgcctcgagggcgatggccacggctgcaacacccgcgagttcgaccagctcaccctccgtgccggcggccacgagccgggctggagtatgcggatcacgaatcagggcatgctgctcgaacgcccggatcaggcccccttggcccttccctttctggaagaacagttgccgggcggacagaccagctttagcagcgaggcgaacaaccagcgcctcgatctatgggtagctcctcaacgctgcgtcgacagcgccactggtgccgtcacccacctgacagccgagctgcgcctggacgaccagaccctgcgcggctgcgcctattacggtggtgcgcgcagcgaatgaatctgtcgaagcgtgaatcagcacgcttcccgaagtctcgaagatcacgaccatgaatgatgacctttccctcctgcagccctatccattcgagaagctgcgcgccttgctcgctggtgcgcagccgccggtcgagaagcgcgcgatagccttgtcgatcggggagccgaagcacccttccccggatttcgtcgcccaggcgctggctgccaatctcgatcaactggcggtttacccttccacgctcggcataccggcgctgcgcgaatcgatcgcccgctgggccgagcagcgcttcggcgtcgcacctggcggtatcgacccggcccgccatgtgctgccggtcaacggcacccgtgaagccctgttcgcattcacccaggccgtagtcaaccgcggcaccgatgcactggtggtcagcccgaatcccttctatcaaatatacgaaggcgccacgctgctggccggtgccacgccgcactacctgccctgcacagccgagaacggtttcaaccccgatttcgatgcggtctcggtcagcacatggcaacgcactcaaatccttttcctttgctcgcccggcaacccgaccggtgcgctggtgcccctcaacacgctgaagaagctgatcgccctggccgaccagcatgatttcgtcatcgctgcggacgagtgctatagcgagctgtatttcgatgaggagcaaccgccggcaggattgctcaccgcctgcgccgcacttgggcgcgatgatttcaagcgctgtgtggtcttccacagcctctccaagcgctccaacctgcccgggttgcgctcaggattcgtagccggcgatgccgagatcctcaaggcgttcctgctctaccgcacctaccacggctgcgccatgccggtgcagacacagttggccagcatcgccgcctggagcgatgaagagcacgtccaggccaaccgacagctctaccgcgagaaattcgacgccgtgctggacatccttaccccggtgatggacgtgcagcgccccgatggcggcttctatctctggccgaaaacgcctgtcgacgaccagcaattcacccgcgagctgttcgcccgtgagcacgttacggtggtgccgggttcttacctgtcgcgcgaggtagacggtgtcagcccaggggcggggcgtgtacgcatggcgctggtcgcgccgctggccgattgcgtcgaggccgctgagcgcattcgcgccttcattgccacgctatgacgaacaagccggacgccaaaacgtccggcttgcgcttcaggcgacgcccggcgggatcatgtccttgccgtagtcgcgcagcttctcgaggttttccggtttcatgtgttccggaatgtccgtggcgttttcatcacgctcgtcacgctcatcgatatcaggcttttcgggctcgttcatggcgtcctccgtcagattgcgttctcttcccagattagctcaccgtcttcactgatctcccggaccttggtcagggccgcctcggcagcgacatcggcttcggacgcgagatcataccgtcggccattggcgaccttgaatacatgggcgttttcgtcactatcacgccgcttgaccgcgatcaccgcctcgaatccctcatcagcgggaacggccgacgaaatggcctcatggttttcgaaatgcttgcgtgccatacatgacctcatcgttgcgattgtgaacaatggacaacgttcggagcgaaaaaggtcgaccgccgtactgccactgaaccgagcaccgttgcagtgactccatcttttaacagtcgacgagaccctgaccatggccatgaacgagacctataccgccagcgcaccttcacgagaagaaatcgacgccctcgacggcttcaccctgatcgaattcggcaccgactggtgcggtcactgtcgcgccgcgcaggcgccattggccagtgttctggccggcaagcagctgcgtcatctgaagatcgaggatggcccgggacgtccactcgggcgctcattccgcgtcaaactctggccaaccctgatcctgatgcgtaacggcgaagaactgggccgcgtggtccgcccgaccagcgcccagccgatcgaggcgctgctgcgtaacattgagggcgcgacaagcggctgaccctcaccaggacacagccccctctggcaagcggcaggcttcgcctcatcgtggcataatccacggtccagtttggccggagaaagcggagcctgttatgcctgaacgaaacaacggactgtgcctgtatggcatcaaggcgtgcgacacgatgaaaaaggcccgtacctggctcgaccagcaggggctgagctatacctttcacgactacaagagcgctggtatcgaccgcgcccacctccaagcctggtgcgaagagcatggctggcagaccgtactcaaccgtgccggcaccaccttccgcaaactggacgatgcgcagaaagccgatcttgaccaagccaaggccatcgaactgatgctggcccagccgtcgatgatcaagcgtccggtcctcgacctcggcgacaagacgctgatcggtttcaagccggatacctacgctgccgagctggcagtcaagaactgaactcgcactcgagacgagtgcgatcgattaaggactcccctatgagcaactccctcttcagcctggcgttcggcgtcggcacccagaaccgtcagggcacctggctggaagtcttctacgcgcagccactgctgcgcccggccggtgagcttgtcgatgccatcgcaccgctgctcggctatcaaggcggcaaccaggcgatctccatcagcaccacccaggccgcgcagctggccgatgcgctgaagtcgatcgacgccacccagcacgcgctgctcacgcgcctggccgagagccagcgccctctggtggtgaccctgctggccgaagatgccgcgctgacctccacgcccgaggcctacctcaagctgcacctgatctcccatcgcctggtcaagccgcatggcctgaacctgaccggcatcttcccgctgctgcccaacgtcgcctggaccaaccagggcgcggtggatctggccgaactggccgaacgccagcttgaggcacgcctgaagggttacctgctggaagtggtctcggtcgacaaattcccgaaaatgaccgactacgtggtcccggccggcgtccgtatcgccgacagcgcccggatccgcctcggtgcctacgtcggcgaaggcactaccgtgatgcacgaaggcttcatcaatttcaatgccggcaccgaaggtccgggcatgatcgaaggccgcgtttcggcaggtgtattcgtcggcaagggctcggacctgggcggcggttgctcgaccatgggcaccctatccggcggcggcaacatcgttatttccgtgggtgaaggttgcctgatcggcgccaacgccggcatcggcatcccgctgggggaccgcaacaccgtcgagtcaggcctgtacattaccgcaggcaccaaggtaaacctgctcgacgagcaaggcgaattggtcaaggtggtcaaggcccgtgaactggccggccagaccgacctgctgttccgccgcaattcgctgaccggcgcggtcgaatgcaaaacgcacaagtccgcgatcgagctgaacgaagcactgcacgcgcacaactaagctgaaaccgatcgaagcgctggaggccgaaggctgaccaaggagcgatccatgggctgctccgccactagcctccagccgcttcgggcacagagccataggacgaaaacgatgtcgcttgtatccccctggcgtgccgacttccccgctctggccatcctcgaggcccagggccagacctatctcgacagtgccgccactgcacagaaaccgcaggctctgatcgatgcactcaccggttattacacctgcggcaccgccaacgtacatcgcgcccagcatcagccaggcgaacgtgcgacgcgggcattcgaggacgcacgcgtcaaggtggccaaatggctgaacgcctcctgcccgaccgagatcgtctttacccgcggcgccaccgaggcgctcaatctgcttgcctacgggttggaacacctgatcgaggccgatgacgaaatcgtcgtcagtgccctggagcatcacgccaatctgctgccctggcagcaactggccaggcgtcgtggcgccagattgatcgtgctgccgctggatgccagtggccgcatcgatatggacgccgcaaggcagctcatcggcgcacgcacccggctgttggccgtcagccagttgtccaatgtgatcggcagctggcagccgctgcccgatctgctcccgctggccaaggctcagggcgccatgaccgtggtcgacggcgcgcagggcgtggtccacggtcggcacgatatgcaggcgctggcctgtgacttctacgtgctgtcgagccacaagctctacggcccggaaggcgtcggtgcgctttacggtcgcggtgagtcactgctcaagctcaagcactggcaattcggtggcgaaatggtccgcatcgccgattaccagcacgccgaatttcatgcagccccgctggggttcgaagccggcacgccggccatcggcagcgtgatcggcctgggcgcgaccttgaattacctgtcgaaactcgacgccaccgcggtcgccggctacgaacaggcgctgcacaaggaactgcttgccgggctggcgatacgcgacggcatcgagctgctcggagggccgcaagctgctctggccagtttcaccgtcgcaggcgtccatcacggcgatctggcccatttgctcaccgaccagggtatcgccgtgcgcagtggcactcattgcgcacagcctctgttgaagtcgctggggatcgaaggcgcgacccgggtctcgctcgggttgtacaacgatggggacgacctggggcggttcttcgacgcgctggaccgggcactggacatgctgcgatgagcgatctccccgaagcggccaaagaagcgctgcagacctttcaacaggcggctggctgggagcaacgcgcccggttgctgatgcagtggggtgaccggctccaaccgctcgccgacgccgagcgcagcgacgccaatctcgtggcaggctgcgacagcaaggtctggctggtgggagaacggcgcgacggccactggcatttccgcggcaccagcgaagcgcggctgctacgcggcctgctcgccgtgctcctggcccgagtcgatggcctggaggcatgtgaactgcaacgcatcgacgtgtcggagtggttcagccagctggggctatcccgtcagctcagcccatcccgagccaacggaatgaacgctgtgctggggcgaatgcgcgcgctggcgtcggcagactgagcaacccctctcaaccgccggccggtccgggcgtccgctcagcgggtcgccgcgcgcccgccaccagcttgtccaccgcgcgcgccgcggccaccagaccaaagctggcggtgaccatcatcgcggcgccgaaaccaccggcacagtcgagttttacgccttcaccgacgaaactcttgctctggcagacgccgccgtccggcttgggatagcgcagctgctcggtagaaaacacgcagggcacgctgtaagtgcgcccgggcgtgcgcgagaaattgtattcgcgccgcagcagtgagcgcaccttggctgcgagcggatcgttgaaggtcttgttcagatcggtgacctggatctgcgtcggatccacctgaccgcccgcgccgccggtcgcgatgatctgaatcttgcgccgcttgcaccaggcgatcagcgcagccttggccggtacgctgtcgatgcagtcgatgacgcagtcgagttgctcggtgatgtattcggccatcgtctctcgcgtcacgaaatcggccaccgcgtgcaccacgcacgccgggttgatcgccttgatccgcgcggccatctcgtcgaccttgggcttgccgacagcgccttccagcgcatgcacctggcgattggtattggtgatgcagacgtcatccagatcgaacagactgatttcacccacgccactgcgcgcgagcgcctcggccgcccacgagccgaccccgccgatgccgacgaccgcgacatgggctctggccaggcgctcgagcccctcggagccgtacagacgggcaatgccgccgaaacgttgatcatcgattgccataagccccccaaaaatatcggccgattatagagcgctgcactgcccgctcccagccaggcccggattcgtggccagccggcaacggcgttcgatgactacagttggacatggcagccgttttcgcgccgcccagtccgccaatttaatttaatatggcgccctttccttcgcccgcccggagccgtgatgagtaccgccgccctctctgccaccctcgaactcgcctgtgagctgatcaaccggccttcggtcacgccgctggacgagggttgccagcggctgatgagcgagcgtctggccgcctgcggcttcgccatcgagccgatgcacatcgaggacgtcgagaacttctgggcgatccgtggcgacgaaggcccggtgctgtgcttcgccggccataccgatgtggtgcccaccggcccgctgcaagcctggcacaacccgcccttcgccgcgcgagtcgacgagaacggcattctccacggccgtggcgcagcggacatgaagggcagtctggcgtcgatgattgtagccgtggagcgctttaccgcagaccatccggcgcacaagggccagatcgcctttctgattaccagcgatgaagaaggcccggcacaccacggcaccaaggcggtggtcgaacgtctgcgcgagcgcggccagcggctggactggtgcatcgtcggcgagccgtcgagcaccagtcaggtcggcgacgtggtcaagaacggccgtcgcggctcgctcggcggcacgctgacggtacgcggccagcaaggccacgtggcctatccgcacctggcgaagaacccgattcacctcgccgctccagcgctggccgaactggccgccgaacactgggacgatggcaatccgttcttcccaccgaccagcttccagatctccaacctgaactccggcaccggcgcgaccaacgtcattcccggcacgctggaggcggtattcaacttccgcttctccaccgaatccaccgtcgaagccttgcagcagcgcaccgcagccattctcgacaagcatggcctggactggagcgtcgactgggcgctgtcgggcctgcccttcctcaccgaacccggcgagctgcttgacggcgtggctgcagcgattcgtagcgtcaccggccgtgaaaccaccccttcgacaagcggcggcacgtccgacgggcgtttcatcgccacgctcggtacccaggtggtcgaactgggcccggtcaacgcgacgatccatcaggtcgacgaacatattctcgccagcgatctcgacctgttgaccgagatctactaccagacgctggtcaacctgctcgcatgctgatctgcccgctctgccaggccgccctcatcgctgtcgacaacggcgtcgcctgcccggccaatcatcgcttcgatcgggcccgtcagggttatctgaacctgctgcccgtgcagcacaagaacagtcgcgatcccggcgacaaccaagccatggtcgaggcccgccggcgcttcctcgacggcgggcactatgcgccgctggccgcacgactggcgcagctggcaggcgagcgttcgccgaggcgctggctggacatcggctgtggcgagggttattacaccgcccagatcgcccaggccctaccggacgccgatggctacgcgctggatatttcccgcgaggcgatcaaacgcgcctgcaagcgcgcgccgcagctggaatggctggtggcgagcatggcacgcgtgccattggccgacggcagctgcgatctgctggccagcgtattcagtccgctggactggaacgaagcccaccgcctgctcacgcccggcggaggcctcctgcgcatgggtccgactcgcgagcatctgtgggaactgcgaggtctgctgtatgacgaaatacgcgattacgacgacgaaaagcacctctcgctgatcccagacggcatgcatctggccaacagcgagacgctatcctacgagctgttgctcgatgacccgcaggcccgggccgatctgctggcgatgactccgcatggctggcgcgcaagcgccgaacggcgcgccaaagtgatcgacacatcgctgaaggttcgggttgcgatacgctacgactggatcgagcgagaccgctagtacattcaagaaaagacgctcctgacgcgggcagctgctaccttgctcccacccgccaaaggctcgcaacctcacagacagggccaccgctcatgcgtcaaccggacatcgagatctacctcagggacgccagccaggacgccgtaacccaatggctcgcccagtcggtcggaccctgcaccccctggcagcccaagggccataccttcaaatgcaaggccggcgacattccggtgacctggttgcccaaggccgtcggcaagtggcacagcctgctgttggaaagcgacttaacgccctgggaggacgacgtcgcctgcgcccgtgccgcctatcaggcattgggtgtggagatccgttgcgcgccaggtggctggcaggaggaggaatcggtcgaggacgccgatcgctggatcagcatcagcgagcgtggcgaagcggaaatcctctggcgtaccgattgagcgacgccggcgtcggtagttcagcttccgcgccggcaggctttcgccccgctcccctttagcgagggggccgggatgagggggcgtcgtgagttatggggcatgcattcccggcagcacgctacgctccgttcgagttattcagcacgcccgatcggaaagaactggccatggctccagacacccagccaactgtcaccctcgatttcatgcgggaccgccagctcgacgagctgatagaacacgttacggtgaatcagcgcttccaggttcgctcgtacgagcacatagggcgccggttcctgggttcgcgcatcggtctcgacccgtatcggatggtcagctccggcttcggtttcgtcgccgacattggtaacgaagcgcaacacctgcgcctcccccgccccttcgaccactagctcgacggctacgaaaggcgcgtcgtcgacggtgatgcccaccttttccaccggggttaccagaaaataatcatccccgtcccgccgaatcacggtggaaaacagcctgatcatggccggacgcccgatcggcgtccccatgtagtaccagcgaccgtcacgcgcgatccgcatgtcgagatcgccgcaaaaaggcgggttccacaagtgcaccggcggcaagcccttgcttcccgactgggcaatctgctcgagcaggttcgcggcttttccagcatcgctcatgtgcgctccttaacgactgaggcctgtcaggcgccgggcgtagtcgcgcaagggcggccccaacaaaacctgtggcgtcgcatcgtaaatgttcagcaatccacctcggctgcggattcgtgccgtatcgaccagataatggtttccagtctcgatcaacatcagctggatcacgccggtatcgacgcccaggcgatccagcgcgcgctggtcattgagttcatcgaagctgccgatacgatcgtccgctgcggcaaatcgcgtgtacagcaagtaatgggcaccggcggcccgcgcttggttcaacgcctcttccaacccggccggctccgcggcgcgtctgaccagcggaaagtactcgacaaagcccttgaaggcctcttcggcgacgacgttcggccgagggtaggcattgccgggcgggacgaagtgtccttgggcgatgtagatgaacgagtcgggctgcagacgccaggaggccgaccgcaccgtttcactgtgatcgagaacgcccgcgtcgctgagctgatagcgcgcaccatcggccagatcactgacgctcatgcagccgctcagggcgagcatcgccacgataaggcaaaccactttcatcttccgctcctgcccgctgactgaaaaccgacgtatctggcgaagcaatgcagtaaccacgccagctctgcatattcgggccctacattggttcgcagcaggcaggcgagcggctgggactggccgcttgaaagggctgttcgggccgaatgcgcagccctattcgccgctcggagcagtgccgtctgacgcggcgctcgctatgggcatcgtcgccagcccggaggacgcgtcgctcgagtcgaagcgtccttgacgcatagacactcgccgtaagcggtcctgtaggccaggctgcgcgctggtccggcgatagcaggctagtcgcgcttgcgcttgttgcccatgcgcacgccgatatccatgaggaactggaagaacccctcctgatcttccaggacgttgctccagaacggcgagtgatacagcgccacggcgccgtgaaccagcgcccaggccgcgcagtaatggaagtaaggcggcacgtcttccagcttgccttcctcgatgcgccccttgatcagttgcgtgaggtgttcgaagttcgacgcacggatgcgatgcagctcctccaccatgtccggcacctggttgcccttgaccaccttttcctcgaggcggtcgaacaagcggtagcgctgagggtcccgcatacggaactcgaagtaggcgcgcgacagcgcttccttgtcctggtcgaggctgggcgaatgcagcagctcgttcagatcgcgctcgtaatcgagcatcagccgcagatagatttcggctttggacttgaagtgcttgtagatggtgcctttgccgatgccgacccggtcggcgatcatctcgacggtgacgctgtcctctccttgttcgaggaacagctgaagcgcggtgtcgagaatttcttgttcacgacggcggaattcacggaccttccgaggttcattttgcataggaggctgcggcttggaaattgaagcagatgattatgcctatctagtcagaaaatgcacggaacatcgcccatgagttcactgaatgacgaatttcctcatatcgaagggttgcgatacctgaatcacgccgccgtcgcgccttggcctcgccgggcgaccgaagccgtgtccgccttcgcccagcagaacatgacgctcggtgcacgggactatccgcaatggctcaccgtggaaaaccggctgcgcgttcgcctggcccggctgttgaacgcgcccgcctcggccgacatcgcgctggtgaaaaacacctccgaggcactttcgttcgtggccttcggcctggactggaatgctggcgaccagatcatcatcagcgatgaggaattcccctccaatcgagtcgtctgggaggcgcttcggcctcgaggcgtggaggtgattcaggtcagcctcaagggcgacgatccggaagctgcactgctcgcagcctgcggtcccaaggtgcgtctgatggcgatcagtgccgtccagtacgccagcgggctgcgcctggatctgcccaggctgggcgaaggctgcgaacggcacggcgtgctgctttgcatcgacgcgatccagcagctcggcgcgctgccattcgacgtacagcagtaccggtgcgccttcgccatggcggacggacacaaatggctcctcgggcccgaaggcctgggtgttttctactgccgcgctgacctgcgcgagcaactgcaactccatgagtacggctggcatatgctcgaacatgccggcgactatgaccgcgtcgattggcagccagcgcatagtgcgcgccggttcgaatgcggcagccccaatatgctcggcgcaatggcgctggaggcaagcttgtcgctattggaggacgtcggtatgcccaatgtgggtctggcgctggccgagcgcatcgaccatctgcaccgggagctatcggccatgccgggagtcgaggccctgagcccgagcgacccgctgaggcgcgccggtatcgtcacgttcaggctggagggctgggataacccggcgctgttccagcagctcaaggcggagcagatcgtctgcgcgctgcgcggcggaggcgtacggttgtcgccgcacttctatacgcgctcagaggtgatcgaacagaccctggcggtcatccgcaacctgcgcgcaacctaggcgatcaaggtgcgcacaactattccaaatccgttttaaaaaggcgctgaatcagccggcaggatcgacgatccaggccaatacttcagtcactggccgcgcaatccccccactgctcggccagctgagggaacgaggacgtgacctcattactcctaatggtcttggcccggctcctcgcgacgccgggttttttttgcgcaagcagcgctcagccgagcgcgggctgtcgtcgcgattgccgaagccggaagcaaccccagatgaacaacgcccatagcggtatggcgatgatcgaggtacgcagcccgggcatggacagcatgatcgcagctatcagcgcgacgaacgccaggcacaggtagttgctgaacggataccagaacgccttgaacgagggatcgacaccctggccaatcatcgccttgcggaacttcaagtgggccaggctgatcatcgcccagttgatcagtagtgccgctaccaccaacgacatcagtaactcgagggcggtctccggcagcacatagttcaccaggacgcagagcatggtcacaagtgccgagaaggcgatagccagcaccggaacgccgcgacggttaaccaccagcaagactttcggcgcatcgccctgctcggccaggccgtacagcattcggctattgcagtagacgccactgttgtaaaccgagagcgccgcggtcagcaccacgaaattcagaatgtgcgccgcggtatcactgccgatcagtgaaaatatctgtacgaaggggctgccgctataggggtcaccggccgagccaagcgtctgcagcaaggtgtcccagggatacagcgccagcagtacgctcagcgcaccgatgtagaagatcagaatgcggtagaccacctggttgatcgccttggggatgactgtcctgggttccgaggcctcggcggcggtgatacccaccaactccagcccgccgaacgagaacatgatgatggccagcgccatgatcatcccgctgacgccgttgggaaagaagccaccgtgactccagagattgctgaagctggcctgctcgccgcctttaccgctcagcaacagatacaggcctagcgcgatcatgccgatgatggcgccgaccttgatgatcgcgaaccagaactcggtttcgccgaaggctttgacgttgaccaggttgatgaggttgatcatcacgaaaaagacggcagcagttgtccaggtcgggacttcgggccaccagaactgcacgtacttgcccacggcggtcagctcggccatacccaccagcacataaagcacccagtagttccacccggaaaggaaacccgcgtaaggcgtccaatacttatgcgcgaaatggctgaaagagccggccacgggctcctcgacgatcatctcgcccaactgccgcatgatcaggaacgcgatcattccgccgatggcatagccgaggatcatcgacgggccggcactgcgcagcacgccggccgagccgagaaacagccccgtaccgatggcgccgcctagtgcgatcagctgtatgtgtcggtttttcaggccgcgttgcagcgtcccggtatgcagcgtctcgttgggcatgcgtcaccttgataggtctgtgacggggaaacgactcggcctaagcgatgcgatcagcagccgagcggaaccatcgtgtccgcataccgtcgtctcggcatgcgcaccgaagcggcgcggattgtacacggcatcggcgcactaagctttgcgcgcagccaatgtcgacgatgcgctcagcgtgccactccagccagtggaaacagctgcttgaagttggcggtggtctgctcggccaggacctgatagtcaacgccgcgcaactgggccaggaacaccgcgacttcgtgcacgtactgcggcaggttgggcttgccgcggtagggtaccggtgcgagataaggcgaatccgtttcgaccagcaaccggtccgccggcacccgacgcgccacgtctcgaagcgcctcggcattgcggaacgtgacgataccggacaaggaaatgtagaagccgagatcaagcgcggccttggccatgtcccagtcttcggtgaagcagtgcaacacgccagcctgcggcagagccgcttcgcgaagcaggtcgagagtgtcggtgcgggccgcgcgggtatgcacgatgacgggcttgccggtgatgcgcgccgcttccaagtgcagccggaacgaggcctgctgcagcgcggcggattcaggctcgtagtgataatccaggcccgtctcgccgatggccaccaccttgggatgagccagttcggtcaacagccagtccagcgccggctcggcgcccggctcgagatccagcggatgcacgcccaccgaacagtcgacatcgacataccgctcggccagcgtctttaccgtggcggcgttgtcggcgctaacgcctatgcagagaaaatgtccgacgcccgcggcgcgcgccgcatccagggcagcgtccagcgagtcgccgtgcgcggtcaggtcgaggcggtcgagatggcaatgggagtcgatcaacataaggaattttcgaacttcagatggcaagccgtaggcccaaaaccagtatgccgcccaaaagctttttcgcttttacctgcagccctgacctggcgccccgcgttacatggtgtgtgtgggacgatcggacttcatagcgccggccaggtaggtctcgatcttgttgcgggcggtcgagtcaccttcgttgaactgcacaccaaccccggcagcccggtttccctgtgcaccctttggggtaatccagacgaccttgccggccaccgggatcttctccggctcatccatcaggctcagcagcatgaagacttcatcgccgagcttgtagctcttgttggtgggaatgaacaacccaccgtgcttgatgaacggcatgaacgccgcatagagcaccgacttgtccttgatcgtcagagacaggatgccgttacgcggaccgagatttgcaggcaggctcatgcggtattcctaacaacagttgcgatggattctagcccggcccgggaaggcttgcccactgcaccagaagcgcttcgagaagcaagacacggttgaggttggcttttcccagcactttctgtcgatgactcagcaaccactcctgcagcgcgagcagcgcgctgagcgaactcttctgcgccaggtattggatgaccttctgcatatcggccgagccaagcccttcttcatcgccggtcatccggtaacgcaaaaccagatgcgcccactcgcagaaccaatcgaggatcaagatcaacgacaacgggttccaggcctccgccagctggctgggagactgctggcgtttgagcagcttctttacaccgtcgaccacctgcactcgcgcttccagcacaccctgtccatgcagctggagggcagccaagggcgaactggccgccaggctcagcagttcttcacgccgctctgccgacagctccggtagcctttcggaaagccagtccaggctctgctggcgattaggcaaagggcaacgctgttgcacgcagcggcttttgatcgtcggcagcaagcgactcggctgatgactgatcaacagcagcacggtatcgcccgcgggttcttccaggctcttgagcaaggcgttggccgcgttcagattcatcgcctccgcaggctccaacagcaccaccttgcgcccgccgagctgagcggtctggctgacgaaaccgaccaactggcggacctggtcgacgcggatggccttgtccacctcttccggctcgagaatgtagtgatccggatgcgtatgggcggccagcaacaggcaacctttgcaacgtccacaggctccgctcggcatcggttgctggcacaacagcagcgccatcaaccgctcggccagcgcgcgcttgccgataccggacggcccatgcagcagataggcatgcgcatgctgccgccgccccgccagcaactgccagaggtcggcctgccatggaagaatgccgtcagccaatggcgctctccagtatttccggcaagagcccatccagatcagcctgaacggaagtcagcggttgccccgcgtcgatgacccgatagcgctgcggcttctggcgggcacgttcgagataggcattgcgaaccgcctcgaagaatcccagtccctcctgttcgaaccgatcgagacgaccgcgcgcagcggcacggctgagcccgatcgccaccggcagatcgaagatcagcgtcaaatccggacgcatctcgccctgcacgaactgctcgagctgctcgatgcgctggaaggccagcccgcgccctccgccctgatacgcataagtggcgtcggtgaagcgatcacaaagcaccacggcgccacgcgccaatgcagggcggatcacctgagccagatgctgggcgcgcgcagcgaacaccagcagcagctccgtatcgctgttcatgggctcgtccgcgggcgtcaacagcagctcgcgaattcgctcggccaagggtgttccgcccggctcgcgggtgagtacgacatccaggccgtgctcgcgaagccgttgcgcgaggtattcgcgattggtgcttttccccgccccctcgggcccttccagggtaataaagagtcctgtcactggatgttctcgattggtgccggagcttgtcggggcggtgggctggaacggtaatcggcgcggcgtttgagctggtattcccgcaccgcacgattgtgctcactcagcgagtcactgaatacatgactgccgtcgccacgcgcgacgaagtagaggctctgcccctcggcagggtgcaacgcggcgtggatggcttcgcgcccgaccatggcgattggcgtcggcggcagcccagtgttggtgtaggtgttatagggcgtcggcctgcgcaggtcgttgcgggtgatccggccctgatagcgctcgcccatgccatagatcaccgtggggtcagtttgcagcaacatgccgcgctgcagacggcggacgaacacgccggcgatttcgccgcgctccgctggtaccccggtctctttctcgattatcgacgccatgatcaacgcctgataaggatccgtgtacggcagcccttcgctgcgggtctgccactcttcgtccagtacggcttccaggcgcgaaaatgctcgctgcagcagctcggtatcggccacgccacgggtgaagctgtaggtatccgggaagaaacgcccctcggggtgcacaccggaatggccgagtcgcgccatcacttcatcatccgacaccccggcgagggtctgctggatcgtaggcagcgcttccagtgctgcgcgtacctgacggaaattccacccttctacgatcgtcagggtgtgctggacgacctccccgcgctgccacaggccgatcaggtcgcgagcggtcatgtcaggtcgcagctggtattcgccgctgtgcaaggtctgtccggaaagcctcaagcgccaatgcagccgcaaccagaacgagccgctcaacgtgccctctcgttccagtcgctggaacacgccgctgggtgtgtcgcccggctgcacttccagcgtccgctgctctgcgacctgtaacggctgctccagcgcggcgtagaccttccaggcaatcacaccgagcgccagcgcggctagcagcgcggcgcccagtagcgcaaaagacagttttcgaatcacgtattactcgatagatcggtcagcaggtgctgaagtttacgtgtgagcggccccaccggccagacgccagcctccaattgccgcacgggccagatgccatacaggctgttgcagacgaagacctcgtcggcggcaagcagactttctcgcgggaggtccacgacgtgggcgtcgatgcctgcctcgcccgcacgtgagaggatttcctcgcgcatcacaccagcgacaccacagcgctcgagcgccggggtgaacaaccgattggactcgacgatgaagatgttgctgaacacgccttcgatgacgcgccccgaggtgtcgcacatcaagccctcggcaaacagcggatcctgccactcgctacgagccaacacctgttccaggcggttgagatgcttgagcccggccagggccggctgctcggccagacgcgtcgcacagggatacaggcgaatgccgtgctggaaatgttcggcagggtaatccggcagcggcgcccccaggagaatgacccgtggccggctgtcgggtggtgggccgtagcctcgtcgcccattgccgcgcgtcagcatcaacttggccacacccgtttccagtgccgcgctgaacgcgatgacctgctgtcgcaccgcctgcaggtcgcaagtgatagcaagacgacgacagccacgtccgagacgaccgagatggcgatccagcagctcaggctcgccgcggatgaccttgatggtctcgaacagaccatcaccatatgccagcccgcgatcatggacaggcaacccatcagcgggctgcccatccacccagctcagtgtcactccgcgaaccggcggaaaaccagcgaaccgttggtgccaccgaaaccaaaggagttggagatggcaacgtcgatggcccgcggtttcgcctcgtgcgggacgaagtccagatcacagccctcatccggctcatcgaggttgatggtcggaggtgcgacctgatcgcggatggcgagcacactgaagatcgcctcgacagcacctgcagcgccgagcaaatggccgaccatcgacttcgtcgagctcacggaaagctcgtaggcgtgatcaccgaatacggtttttatcgccgcggcctcagccttgtcgccggcaggcgtcgaggtgccatgcgcgttgatgtaaccgacctgggacgcatcgatcttcgcgtccagtatcgcgttgcgaatgcaacgagccgcaccggcaccgtcgtcgggtggcgaagtcatgtggaaggcatcggcactcatgccgaagccgatcagctcggcataaatcctggccccacgtgccttggcatgctcgagctcttccaacaccagcgcgccggcaccatcggacagtacgaagccatcgcgccccttgtcccatggacggctcgctgccgttgggtcctcgttgcgcgtggacagcgcgcgcgccgcggcaaacccaccaatgccaaggccgctggctgccatttccgagcctccagcgaccatcacatccgcctcgccgtaagcaatgttacgcgcggccatgccgatgcaatgggtgccggtggtgcaggccgtagcgatggcgtagttgggtccttgcaggcccaggtgaatcgacaggaagccggacaccatattgatgatcgaaccgggtacgaaaaacggcgagatacggcgcggcccctgctcgatcagtgccttgcagctgttttcgatattggtgaggccgccgatacccgaacccatcgcgacgccgatgcgctcgcgattggcgtcggtgatttccagtccggaatcgcgcaccgcctggaagctggcagccaggccgtattgaatgaacaaatcgagcttgcgtgcctctttagcgggcaggtattgctcgacatcgaaattcttgatcgatccgccaaagcgtgtggaataggcggagaggtccatgtgttctatcaggccgatgccactgcggccggcgagaataccctgccagctgcttggcacatcgttacccagcggcgatagcatgcccatcccggtgattacgacgcgtctacgcgacacagcaattctccttacattgattcggccccccttgctcaagcatacgcaacgggcaaggaccagccatcacagacatcgcgcgaagacgcacgaccagctgaatacactaacaaacaaaagccgcactgcctgttcagaggcagtgcggcttactggttcgaagcgggattacaacttactgcgcgtgcgcgttgatgtaatcgatagcttcttgaacagtggtgatcttctcggcttgctcgtccgggatttcggtctcgaattcctcttccagagccatcaccagctcaacggtgtcaagggagtcggcacccaggtcttcgacgaaggaagcgctgttggtaacttcctcttctttgacgccaagttgctcggcaacgattttcttgacgcgttcttcgatggtgctcataccttgttttcactcctatggaaaaatcaggcagctggtctgcgcggtagtgtatagaaagcgttttccgcatttcaagctgaaagcaggcaagcatgaacctgctttcaaccatctgtctataaacagaccgcagttttataacgaaaactaatcagccgttatgactgcatacatgcgttgggcgtcacattagctcatgtacatgccgccgttcaccggaaccgtagccccggtgacataggcagcgccgtcagaagccaggaaagcgacgaccttggcaatttcttccgcttgcccgagacgacccagcgggatctgtcccagcaatgcgtcacgctgagcttcgggaagctcacgcgtcatatccgtatcgatgaagcccggtgccacggaattgaccgtgataccgcgcgaaccgacttcgcgggccagcgcacggctgaaaccttcgagtccggctttggctgcggcgtagtttacctgccctgcgttgcccatggcacctaccacggaaccgatgctgataattcgtccccagcgcgccttggtcatgccgcgcagaacacccttggtcagacggtacaggctgctgagattggtattgatcacgtcatgccattcatcgtctttcatccgcagcatcaggttgtcgcgtgtgatgcctgcgttgttgaccaggatagccggctgcccgaggtgctgctggatgtgctccagcgtggtggcgacggattcgtcactggtgacgtccaaaaccaggcccgcaccctcgataccattctccttgagcgtctcggcgatgcgctcggcgcccgaagaagacgtcgccgtgccgatcacgatggcgccctgacgacccagctccagcgcgatagcctggccgatgccacgactggcacccgttaccagggcgaccttgccttgcagattcatagatgtctccttgttcagaccagcgcgccacgtgtggcggcaaacgcttcgggggtatccagattgtaggtgttgatgccttttacgcagcgcttgttgagaccggaaagcaccttgcccgggccgcattcgaccagatcggtcacgccacgctcgctcagcgcgacaatggtctcgacccagcgaaccggactgtaaagctgagccagcaggtcacgcttgagagtatccaggtccgagaccatcgccgcactgacgttctgcaccaatgggatttcaggcgcctgccaatcgatgcgtgtaattgcatcggcaaagcgctcggctgccggacgcatcaggtcgcaatgcgacggcacactgaccggcaatggcattgcacgcttggcacccttggctttgcacgcctcgatagcgcgctcgaccgcagcagcgcttccggcaatcacgacctgaccaggcgcgttgaagttgaccgcactgacgacctcgccttgcgccgcttcgctacaggccgccaggacgtcggcgtcttcgagccccagaatcgctgccatgccaccggtacccgctggaaccgcttgctgcatgagctgcccgcgcaactccaccagcgacacggcgtcggcaaatggcaggctgcccgccgcgaccaacgcggagtattcgcccaagctatgcccggcgacgaaggccggcttcgcgccgccttcggccagccacaggcgccacagcgcaatcgaagcgacgagaatcgccggctgggtcttgtcggtctggttcagctgagcctccgggccctgctgacaaagcgcccaaaggtcgtaacccagtgccgccgatgcttcagcgaaggtatcgatgatcagcgattgctgcgcgccgtgctcggcgagcatgccaagggactgggaaccctgccctggaaagacgaatgcaagtgatgcggacatgaaacggctctcttgtggttgttcgtcaaaagaatacgccaccaggcgcaccgaattagtcagttggatggctgaccaccggcggcggtcacatcgccggcgtcgttcactgaccgattggtcacgagcaggtgctccaggcggctatgcaattgttccggcaggttgtgccggacgtcctcagcggcccgcaggatcgccgaacgaaaaccttccgcgccggcactgccgtggcttttcacaacgataccctgaagcccgagaaagctggcgccattgtattgagccggtcgcagatcggcacgcagctggcgcagcaacggcaatgcgaccgcgccaaccaggcgcgacatcaacgagcgacgaaaaagcgcttcgacacgcgaagcgaccatgtacgccaggccctcgctggacttgagcaggacattgccgacaaaaccatcgcagaccgccacgtccgtttcgccacgaaacagcccgtcgccctcgatgaagcctcgataattgatgccgctcgcttgctgcagcagaccggctgccgccttgacttgctggttgcccttgatgtcctcggtaccgacgttcaacagcgacacccgcggctgctcgataccgaagctctgcgccgccacggatcccatcacggcaaactggtagagctgctcggccgtacagtcgacattggcacccaggtcaagcagcaggcaagcgccccccagcgtagggatcgcggtcgccatggctggccggtcgacgcccgggagggtcttcagcacgtgccgggcaagcgccatcaaggccccggtgttgccggcactgacacaggcctgggcgcgcccgtcacgcacgcactccaacgccacgcgcatcgaggagcgcggtttgctgcgcaaggcctgggtaggcttttcgtccatgccgattacctcatcggcatcgacgatcgtcaggcgcgcgcgatccacgcccggatgctgagcgatgatgtgttcaagtacggaggattggccaaccaggaccagatgcagcgagggggactcagccagacagagaaggctggccggaacaatgcagtggggaccgaagtccccacccattgcatcgatcgctatgatcggagcagacaaggtttactcgtcagcgcccttgtcgatcactttacgaccacggtagaaaccttccggggaaacgtggtggcgcaggtgaacttcaccggtgctcttttccacggacagggcgttcggctcgagcgcgtcgtgcgaacgacgcatgtcacgggcggaacgggattttttgttctgctgaacagccattgggatcaactcctaaacgtttgggtcacgctttaactgagccagtacgctgaacgggttggaccgcgatacctcgtcctcattcggctcgggctcatcaggcccagccggcggctggcaaacttcttggtcatggagtggaacaatcggaagagcgagcagaagctcctcttcaaccagcgccagcagatccagaggatcctctcccacttccagcacgtcatagcccttgggcaggtgctgactgctcgaaccttcattcactacggcataaacgcactcgctgtgaatcggcagaacaaccggctccagacaacgctggcaaatcatggtgacctcaacatccagcgcactgtgaatggtcactgtgcgctgctcgtcgcgcccgaattccaaactggcgcgcaccacacccttatcgtcctctagaggatcgacgagccgcttcagccctgacaggggcagctcaccctcaagggtggccgctcggtcggcgagcttgcgcggatcaacgtgcggaggtattggtcctttcaacataagcgcggcattctagggatgcgcccctcgactgtcaaaggaattcagccgcacaattgccctccgccgaccatcgatcggacacctatataaaaggaaggaaaatgcgccgtcttctgctggcatcgagctcaccctatcgacgtgaactgctgtcgcgcctgcaagtcgcgttcgaatgggccagccccgacatagaggagacagcgcatcctggcgagcaaccggaacaactggtacgtcgcctcgccctcgaaaaggcccaggcattagccgaacgccaccccgatcatctgatcatcggctcggaccaggttgccatttccgaacacggcatcgtcggcaaacctcacacgttcgagcgagcgaagcagcaactacagagcagcagcggaaaaagcgtcagcttcctgaccggactggcgctactggatagccggaccggccacgcccaggtcgactgcgtcagcttcaccgtgcacttccggtcactcgacgagcaccagatcgaacgctacctgaaagccgaacagccctatgattgtgcgggcagcttcaaggcggaaggcctgggcatcagtctgtttagagccaccgaagggaccgacgccaccagcctgattggattgccgctcatccggctggttgagatgctcaaccacgccggcatcgaagtcccttgaaaacgaccccgagctagcgcagctgtggcccttgcaaccccatcaagaggcccaacttagagccgatactggcacccagcttcttggtgaaacgatccagggcggagtccttaaccgtgaaatccaccagttgttcctcgccaatcacgtcacgcgcgaccgacccggtattgcccagaccgtcgataagaccgagctcgagggcctgctcgccggaccagataagccctgagaacaactccggatgccccgccacctgaagccggtcgccgcgaccctgtttgacactttcaatgaactgccggtgcgtggtagccagcacctctcgccagaatttcgtctcctccggcttttccggctgaaacggatccaggaacgccttgtgctcgcccgaggtataaacccgccgctccacgcccagcttgtccatggtctcgacgaaaccgaaggttgccgccgtgacccctatcgaaccaaccaggctcgacttgtcggcatagatttcgtcagcggcgctggcgatgtagtaagcgccggacgcacccaggtcggtgataaccgcgtagaccttgatgcctggatattcccctcgcaaccgacggatctcgtcatagatgtaacctgactgaactggactgccgcccgggctgttgattcgcagcaccacacccttggtgttggagtcctcgaacgcggaccgcagcgccccaacgatattgtccgcactcgcaggctcctcgtcggcgatcatcccgcgaacgttgatcactgcggtgtggctgccgcttgcggccttgccgtcccccatgtgcaacagcggtgaaaacatcaacagcgcgccaaagagataaacgaacgtcagcagcttgaagaatatcccccagcgccgggctcgccgctgctcctgcacgccggcaagcaaggtcttttccagcagtctccagctgttgcgatcctccctggcatcattcacaggcgctttccattcatccgacatacgcgacctcgacagctgattcagcagaacgcagccagtcgctgagttccgaaaaatgtttgatggttaggcacggtgagcacgcccgcaagacgtcgagtggctgcgcaccgtaggagaccgcaacactgtctacgccggcccggcgagccatttcgagatcgaacaccgaatcgccgatcatcagcgcccgctcaggcggcacgccgcagtgcgagagaatctcgtggagcatcagcggatcgggcttgcttgctgtttcatcggcgcagcgggtcacatcgaagaaatcaccccaaccctggcccgcaagcactcgatctaagccccgccgccccttgccggttgccacggcgagcagatgaccccgatcacgaaaaccctgcagagccgagactacgcccggatagggcattgacggttccacctcgagcgagaggtagtggtcggcataggcacgacgaaacgcctcggccgttcgactatcggtgacgtggggatacagcgcagcgatcgcttcaggcagaccgaggccaatgattcccttgatgacactctcatcgaggaccggcaggccacagctggcagcggcagccgaaatggattggacgatacggccaatcgagtccaccagggtcccgtcccagtcgaagatcagcagttcgtatctactcacccagcctctccagcgtccgcgcccagatatcatcgaccggcacttccaggctcagttcgccaccatcaggcaaaggcaccttcagtgcgtaggcatgcaggaacagccgcttaccacccaagtcccgaatgacaccagtgaactcttcatcaccatatttactgtcgcccgcgatgctatgaccggcgtgacgggcgtgcacgcgaatctggtgggtgcggcctgttaccggcttggcctcgatcagggtggcgaaatccccgaagcgacgcaggacacgaaagagcgtcagcgcctctttgccatcgtccgtaacctcgaccatccgctcgcccgaacgcagcgtgttcttcaacagcggggcactcacctgcttcttgccggcatcccagcgaccacgcacaagcgccatgtagcgcttgtcaacgccgtcgccacgcaacgcctgatgcagatggcgcagcatgctgcgcttcttggcgatcatcagcagcccggaagtatcccgatccaggcgatgcaccaactcgagctccttcgcatcggggcgcaactgacgcaacgcctcgatgacaccgaagctgagcccactgccgccatgcaccgcaattcccgccggcttgttgagcacgataagcgccttgtcttcgtagacgatggccgcctcgaggcgctcgaggaggccttgcgccagcggtaccgcctcgtcccgctcgggcagccgaagcggcggcacacgcaccacgtcgccggcctggagcttgtactccggcttgatccgccccttgttcacccgcacttctccctttcgcaggatgcggtagatcagggttttgggcacacccttgagctgagttcgaagaaaattgtcgatacgttggccggcaagctccggcgagacttcgagcagttgtacgccggaagtctgggaaggggtattggtcatccgcggatgatatcaattttccctgatttgaagcacttaaacattactgttatagtccagacgccgccaaaagtggccaggtcgaggaatgacagcgaaaccgcccttcccgacccagcaatgatcgaggacgtgaggccgtccgacggtgcttttctcaagtagcagaagcaccgaaacaagccttgaagacatgatgcgtgcccccgctggggaatcgcgataatcgataacccgctcccggattctgcgagcggcacccgattttcaaagtatgagtgttgggtggagatgtacagccatcggagtgcgtagcaaaggctttcatagacgcttcattccgtccgctaccgattgctgattcctcctcccgaaccattgcttctgttccgacagcaagcaggagacgtcgtcgcgacgccggcccaactggcctcacatcgctggacactggagtgccttacaaccattcctgactcacctgacaccgaccgcgagagtcgtgtgtgccgaacgccgtttccgctgccctggaaaccgacggtactacatgaaaagaatgttaattaacgcaactcaacccgaagagttgcgtgtcgcactggtagacggccagcgcctgttcgatctcgacatcgagtccggtgcccgcgaacagaaaaaagccaacatctacaagggcaagatcacccgcgtcgaacccagcctcgaagccgccttcgtggacttcggtgccgaccgccacggcttcctccccctcaaggaaatttcccgcgaatacttcaggaaggctcccgaaggccgcgtgaacatcaaggacgtcctgagcgaaggccaggaagtcatcgtccaggtcgaaaaagaagaacgtggcaacaagggcgccgccctgaccaccttcatcagcctggccggccgctatctggtactgatgccgaacaacccgcgtgcaggcggcatttcgcgccggatcgagggtgaagaacgcaacgagcttcgcgaagccctgaacggcctcaacgtcccggctgacatgggactcatcgttcgcaccgccggcctcggtcgctccagcgaagagatgcagtgggacctcgactacctgctgcaactctgggccgcagtaaaagaagcgtcccaggggcggcccgcccccttcctgatctaccaggaatcgaacgtcatcatccgcgccatccgcgactacctgcgccaggacatcggcgaggtactgatcgacagcgtcgaagcccaggacgaagcgctttccttcatccaacaggtcatgccgcagtacgccagcaagatcaagctttacgaagacagcgtaccgctgttcaaccgtttccagatcgagagccagatcgaaaccgccttccagcgtgaagtgaagttgccgtccggcggctcgatcgtcatcgaccccaccgaagcactggtgtccatcgacatcaactcggcgcgcgccaccaaaggcggcgacatcgaagaaaccgcgctgcaaaccaacctggaagcggccgaggagatcgctcgtcagctgcgtctgcgcgacatcggcggcctgattgtcatcgacttcatcgacatgaccccggcgaaaaaccagcgcgccgtggaagaaaaggtccgtgaagccctcgaggccgaccgcgcccgtatccaggttggccgcatctcacgcttcggcctgttggaaatgtcccgtcagcgtctgcgcccgtcgctcggcgagaccagcggtatcgtctgcccacgctgtaatggccaggggatcatccgtgacgtcgagtcgctgtcgctggctatcctgcgcctgattgaggaagaagccctcaaggatcgcaccgcagaagtgcgggcgcgcgtgcctttccaggtcgccgcgttcctgctgaacgaaaaacgcaacgccatcaccaagatcgagctgcgcacccgtgcacgtatcttcatcctgccggacgatcacctcgagacgccgcacttcgaagtgcagcgtttgcgtgacgatagcccggaaatcatcgccggccaggccagctacgagatgagccagaccgaggccgaggaagctcagccgatcagctcgacacgcactctggttcgccaggaggctgcggtcaaaaccgcaccgcaacgtactgcgcccgcccccgctcccactgcagaaccgacagagacggccacgcctagcgtccaggagccgagcctgttcaaggggctggtcaagtcgctggtcggtctctttgctggcaagccgcaagccccaacggtcgaggtcgagaagaaacccgccggcagcagccgtccgcagcgcaacgacgagcgtcgcagtggtcgccagcagaaccgccgacgcgatactcgcagcaaccgcgatgaagagcgcaagccacgcgaagagcgcgccccccgcgaagagcgcccggctcgcgaagagcgccagccgcgcccaccgcgcgaggaacgcaagccacgcgaggcccgcgaaccccgcgagccgatcgaagtgaatgacagcccgtcgcagccgcaaccacgtcgcgagcgcactccacgtgaggatcgccagccgcgcgaagagcgcaaacgcgaactgcgcgcaccgctggatgaacccaatcagaacgcccccgtcgcagcggccagcgaggaagccagcgaacgcaaaccacgtccgcctcgcgaagagcgcaagcctcgcgagccgcgcgctgagcaggttaccgaagctgacgaactgcagcagaacgaggccaccgaagccacacaggacgaacaagactcgaccgaaggcggcgatcgtccacgccgccgttcccgtggccagcgccgtcgcagcaaccgccgcgaccgtcagcgcgatgccaacggcaacgagattggtaccgaaggcgagactggatcggtcgaagccgaagaaagcaatgcaccggtgaaatccgagcaggttgccattgccgcaaccgcagcagcgcttgcggcaaatacggcggacaccgaagccgcagacgtgacgcctgaaagccaggcgaagtcggaagcgcccgcgccaatcgaagccgccgacgagcccgtcacggttaccgaggcggtgagcgaagcagccgctgagccagcgatcgaaactccggcggcgacgatcgaacccgcagcggccgagccagcgcctgagcccgtcagccagccagaaccggttagcgaaagcaatgttgaagaggcacccgccacgccagccattgcgcaatccgctccgaacccggcttcggctccggccgtgcctgcagcgccggctcaaaccgcatccggtcgtgcacctaacgatcctcgcgaggtgcgccgtcgccgcctcgagcaggagcgtctggccaaggaggcagccgaggctgaagcgaaagcggctgaagccaaagctgaaacaaccgaggagctggccagccccgaagtcgtggtcagcgagccgattgccgagatcgctaccttacaggcggagcagccggagcagccgaacgctgagaagcgcgaagtagctgttgaagccgccccgcagtccgagccggcgccggccgaagcacttgcggaaccagcagcagaaccggtcacggcacaaaccgtacagccggtagcggagccgctcgagcccaccgctgaaaagcctgaggagacgacggccaatcctgagcgggacgacgccgacaagcgccaacactgaccgttgcgcacaaaaaagggatgcttcggcatccctttttttattgcccctgtcccgtcctcggtaacgtttatacctttcgcccgagaatcgggaggtctcgctggagcaaggcgtttagcgtaggcagcgtgactgatcgctggcttttaaattggctgtggtcgatcaggtcgaaaagggctggctaacttacaagcaggcgcagttccggtatgacaaccagggcggctctacggtgtcccgccccgaacaaggtgcacactttccgctgatcctcagacgtaatggatgcggtaaaaggcgcagccagcgcgaacacacgatgaatacaagaattcctcggtcatcgctcaggtcggaaacgtgagccaagcgtcgtcctggacaggccacgctggaacgagcgcagccggcacagagcagtcgaccagacgtgagcgatgccccatagatttcgcccagttgaacgatacggacaaccagcccgcgcgctagatgatgtttggctcgatctcgagctgcacaccaaactgctcggcgacatctgcctggatgtcttcggcgagccgcaggatctgccggccggtggcctggccgtagttgacgagcaccagggcctgtagccgatgcacacccacatcgccacgacggtaacccttccagcccgcccgctcgatcagccagccggcggcgagcttgacctgcccgtcatcctgcgcaaacgccaccaaatccgcgaagcgttgcctcaagccatcggccagggctgctgagaccaggggatttttgaaaaagctaccggcattgcccagctgtcgaggatcgggaagtttttcgctgcgtatggcacagacggcgcgactgacatccatcgacgtcggcgattgaatggcatgttgaacaagccactggcgaagaggcccgtattcgagcttgaggttcgcggtgcgttgcagggcgaagcgaacccgcagaatgatgtaacgcccggcctgccgcttgaacaagctgtcccggtacccgaactggcacgcctgcaggtcgaactccacgagccgccctgtttgccggtccagcgcagtcagcccggcaaaaacgtcttttatttcgacaccgtatgcaccaacgttctggattggcgcggcgccaacggtcccaggaatcagactcaggttttccaagccggacagtcccagccccagactgtgcaatacgaacggatgccagggctcaccggcctccgcttcgatcacggcatgctcaccatcatcctcgattatgcggatgcctcgactggccacgcgcaacaccaatgcattcacatccgccgttagcaccagattgctgccaccgccgagtatcagcagcggcacaccgaaaagctgcgcccgggctagcgcttcgccgatctgctgatcgtcatgcgcctcggcgaaataggcactactggcctcgacaccgaaggtattgaattccctgagcgagcggttctgctcgatgatcagactcacaggcgctccctgatctcgtcgagcaaagccatcgacgcatgctccaccagatcgagcacatgctcgaagccttcgtccccaccatagtaaggatcaggcaccgttcccttccccaggctgtaccggcgcaggaaaagatcaagttcagcggatgagttcaacgggcacagcgcctgcaaacgctccaggttgtcgtgatccatggcgagaatgagatcgaagcgcttgaagtcatcgacaaccacttggcgcgccctaagctcactgagatcgtaacctcgctgggcagccgcctggcatgcacgcgcatccgcttgcttgccgacatgccagccaccggttccggccgagccgatggtgatacgactatccagcccggcatcctgcacgcacttgcgaaacacggcctcggcggtcggcgaacggcatatgttgcccatgcagacgaatagaatcctcacgctcaggctccgagcaacttgcggacacgctcgagatcctcagcggtatcgactccgccgggcggcgcctcgactgcctcggcaacgtgtatgcgcttgccgtgccagagcgcccgcaactgctcgaggcactcggtgttttccagccagcaggggccccaggatacgaagtcggcaagaaaccccgcccggtaggcgtaaatgccgatatgccgacggtatggaacgccggatggcagcacgtcacgaccaagcgcgaactcatcccgcgcccagggtagcggcgcccggctgaacgtcagcgccaagccattgatatcgctcagcaccttcaccacgttcggattgaacagcgcttgggggtcgtcgatcggttcggcgagcgtggcgattgcagcctctgggtgggctgcaagattgcgcgccacctgatcgatcaccgcaggcgggatcaacggctcgtcaccttgcacgttgaccactatcgcgtccgccgccaaccccagcttggcagccacttcagctagccgatcggtgccagaattatgttcaacaccggtcagcaccacctgcgcgccgaagccctcgcagacgtgcagaatgcgcgtgtcgtcggtggcgattacgacacgttgagcaccgcttcgacaggcctgctcccagacgtggcgaatcatcggcttaccggcgatgtcctgcagaggcttgcccggaagacggctggacgcataacgcgccgggatcacgacggtataggcgctagtcatttgtccagacgctcatccacatcaagggtacgggcttcgctctcgagcatcaccggaataccgtctcgcaccggaaaggccatgccgtcggccttgcagatcagttcggacttatcatcggtcagcttcagcgggcccttgcacagcgggcaggcgagaatatcgagcagtttggtgtccatgcgcggtccttggatgcagccgaccgcacatggcagatcgagcggcttaggggtgttggggcagcaatcggtccagctgggtatcgaaccaggtcatgaacgccgctgacggctcggcctgcacctgcagatagcaccagcccggcagcgcgaatgcccggcatttgaccgcatccttctcggtcatcaccagcggtagctcggggcggaagctcagttgctccaggctatagcgggcatgatcggcgaaggggtgcggaatcggccgccagtgtagcgcctcgagcgtagtgaagaaacgctgtggattgccgatcccggcaaccgcatgcacctgttgaccggggggaaaatgatctagcggccagcattgcccagttgccagttctatcaagctggacggttgcagggcgaaagcaaaaccggacgggctgtcggcctgcgcgccattgaataacaccgcatcgaccgattcgagccgttcgggcggctcacgcaacgggccggcgggcaagcagcgccgattacccaggccgcgcaccgcatcgacgagcaccaactcgagatcgcgcgccaaccggtaatgctgcagcccgtcgtcggacaggatcaggtcaactgactcttgggccagcaactcgcgaacagcacgggcacggtccggatcgatcatgaccggcgcgccggtgcgctgcgcgatcaataagggttcatcgcccgcctcggctgccgaatcttccgcccggactcgccatggataggatgcgggagaggcaccgtacccacggctgaccacaccgaccttcacgccacgtcggcggcagtgttcgatgagccaaaggatcaacggcgttttgccggtcccgccaaccgtaatgttgcctaccactacgaccggcactggcgcccgataacaatcggccgcgccatccaggaaccgcttgcgtctggcgctgactacccgcctgtagagcgcctcgagcggggcaagcaatgccagagccggatgtccctcgtaccaggcgcgctgcaaacgatcggcaaaagacatcagggctccggctgggcctcgacggtggtgattcgcagatgggcgaagccaagctttccggctgcatccatcgcggtgatgacggcctgatgcggtgtcttgccatcggcgctgatgatcatcggcagactggtgtctccgcccgactccttcgccagcgcgcccatgagtgtgttcagatcgtgcttgatcaacgtcttgccattgagtgaatagctgccgtcgacatcgatgaccacttcgagctgtttcttttccgcctcttccggcggcgtgccgctggcagcctcgggcagatccaccttgagctgcgtttcgcgggtaaaggtggtcgtgaccacgaagaacagcagcaggatgaagacgacgtcgatcagcggggccagtccgatgtcgacgttttcccgcgccttgcgacgaaacttcacgccttgtcctcgcccagatcgacgtcacggtcgccttgcacgacttccaccagcttgatcgcttcctgctccatcccgaccaccagttcctctacgcgacgtagcaggaagcgatggaagaacagggccggaatgccgaccatcaggcccgccgccgtggtgataagcgccttggatataccggaagcgagcatcggggcgttggccatacccgagcccatgaaggcaccgaatatctcgatcatgccaagtaccgtaccgagcagccccagcaagggcgcgatgccggcaatggtgcccagagcattgaggtaccgctcgaggtcatgaacgacgcgcgcggccgcttcctcgatgcactccttcatgatctcccgaccatgcttggagttggccaggcccgctgcgagaatctcgcccaggggagagtccgcacgcaactccttgagcttctggttgctgagcttcttgtccttgatccatttccacacctgaccgagcagatgcgaaggggtcacacgactaggtcgcaacgtccataggcgctcggcgatgattccggcggcagcgacggaacacagaatgatcggcagcataatccagccacctgctttaaccagctcccacacgacgtgaatccccctcgaaaaagtggcgtcactctagcatagggtcgtcaggccgccgacggccccggttctcatttttcccgccagaaccgacgttcggcgcgcaatccgcgcggcgactcgaaacgtccgagacggatctgcagcgcaccctgcttggccgtatcgtaaagctgcgcgccggatgcctcgatccgccgcacgacgtccgggtgtggatgtccgaaggcattgtgcagactgcgcgagacgagcgccccctcggcacctgcagcctcaatgaaggcttcggacgacgaactgtgactgccgtgatgcggcagcaacaaccagcgcaccttgagcggcataccgcttgccagcagcgcctgctcggcggacacatcgatgtcgccggttagcagcaggcgctcgccgttggcctcgaccaacagcacgcaggacgactggtttccattgtgagcctgcgaccagcgccagagcgtgaagcctacctggtcccattcccagtgcaggcctgacggacaggcctcggcgcccagcgacgcgggcagtcgctccggctcgccactgagcacccgtgcgaccggcatctgtcgcaggatcgctgcagcgccgcccgcgtgatcgctatcggcatgactgagcaccatcagatcgagacccgcagtgcctagcgtgcgcagcgaaggcgaaaccactcgctcaccgatatcgaagtcgccgtagcgcggcccggcgtcgtacagcaaagcatgctcatgcgtgcgaaccagcaccgcgagtccctgcccgacatcgaggatccagacgtctgcctgtccgtggaccggcttgttgatcgggggaaacaacagcggtgcgagcagtaccaaccccagcgcccgcaagggcaggccggctggagccaggatcagcagcgttccgagcgtgaccagcgaccaggcccacagcggcaaggaagccggtagccaggccgcttgccagccggcgagccaacgcagcgcatcgaatagataaaccagcagtccgcccgccagccagagcagcgcctcgccgacacctggcagccacaacaaggcggtgcccatcaacgacagcggcacgatcagcacactgaccagaggcaccgcgaacagattggcgaccgggccgctcaagctcaccggcaagcccagaatcagcaggaacggcaatagcccaatcgccatgccccactgcgcgcgccccaacgtctgccaaccaccccaacggcccagccgcccgcggaagatataggcaagcaacgccaccgccagaaaggacagccagaaccccgatcgcagaacgaccaacggatcgagcagcaacacgccatccagcgcaatcagcaacggcaagcaaacgccgagatgtctgaatcgcaagcgccatagcagtaccagcgcgaccatgatcagcgctcgctgaaccggaacgtcgaagcctgccagccagccgtatacaagcgcaccagccagcgccgcgccacaggcacagggcagccaggcgatgcgttgtggccagaagccccaccgagccaacagcgcaaccaggccgtagagcaagcccgccagcatccccacatgctgccccgagatcaccatcaggtggacggttccggtgtcttgaaggatgcgccagtccgccgccgacaggccactgtcgtcgccgaccaccagcgcggcgatcgcacctgaacggccctgggcatcgaccgccaacaggcgttggcgcagctgatcgcgcgcgccctgcccgcccaccgccaacccggtgcgctcgcccgccttgacggttccgctggcaccgattcggcgcgccaggagccaggcttcgtagtcgaatggctgcgggttgaccaaccctcgtggcctcttcagcttggccgcaagacgccagcgctcgcccgcctgcatgaccggcccgccgtaccatgccaggcgcatccgtgaaggcagaccctcatgtcgcgacgaaatatcggtcagctcgaagcgcacgaccccgccgcgaacatccggcagaccggtcacccgaccttcaagccagaacgtgcggccgtcgagcttcgtcggcaggcgatcgctcaatgcccaatgagcgctcagacaggcccagccaagcccgcacaggaaacaaccgatcacgcgccagcgggacggcagcaacagcaacccggtcaggatgactagcgggagcgtagacgggggtggaagttgcggtagaaaacgcagcagtatgaggcccgctgccagcgccagcatcgctgcacgcatgagtactcctggattccattccagcgaccggtgcctgcgggatttcccggctgcccgatcaccatcgccatgccgacgtcctgccggcgccggcgcagtgtagaatccgcgtcacaatcttctctcagcgccgggtctcgtttcaggcataatccggcgcggttcagcccgccagagaatcttcatgccgcgtcgttttttcaaacgctacatgccgcaccccgatcgcatcaagacgcacaagtctctacgatttctcggcacgcttacgcatgatcccaacctgttgcacctcaatcgccactcggtctcccgggcgatggccatcggtctgttctgggcgatgatcccgatgcccatgcagatgctggcagcggcgctctgcgcggtaccggctcgggccaacctgccgattgccgtaggactggtctggctgaccaatccactgacgatgccgccggtcttctactgcaactacaagatcggcgcctggctgatggatacgccggcgcgacctatgcctatggaactgagcctggcatgggttaggcagatgctcgatagccactggcagccgctatttttgggctccttcgtcgtcgccgtggtggccgccctgctcggctatgtgggcactcagttgtactggcgctggtgggtcggccgcagctggcgcaagcgccagctgaatcggcgctaggtgtgcctcactcgtaacgcagcgcctcggcgggctgggtttgcgctgcacgccatgcgggatagacggtcgccaggaagctgagaagcaatgccgccaaagtcaccagcagcacgtcctcgagccgcagctccgacggcagcgtattgatgaagtaaacatccgaactgaagatatgctgcccggtcacccgctccagccaggcgaccagcgcactgacgttcagcgccccgagcacacccagaaccgtgccgatgagggtcccggtcaaaccgataatgctgccctgcaccatgaagatcgtcatgatctgccgtggcgtcgctccgagcgttcgcaggattgcaatatcggcccgcttgtcggcgacgaccatgatcagggtggcgatgatgttgaatgcggccaccgccacgatcagcaggagcagtaccccgatcatggttttttccatcttcatggcgctgaacaggctgccctgggtacgcgaccagtcttcgccccggtagccctcaccgagctcgccgagcagttcggcggtaacctgcggggccgcgtacaggtcggtcagcttgagtctgacaccctcgacctgctccggctgccagcgcagcatccgggcggcatcgctgcggtgaatcatggccaggctaccgtccagttcggctccaaccttgaacacgccgaccacattcaagcgctgcatccgcggtgtaacgccgccaggcgcatcgctgagctccggcacgatgagggtgagcctgtcgcccagcttcaagccgaatcgccgcgccgtcatcaatccgaggatgacgcccgactcacccggtttcaggtcatcgagccgaccggcgatcatctttgaccccagtatcgagacgccatcctcggcctgcggatcgatacctttgacttcgatcggctgcatcgcgcccttataggacaacatgccttcaagctgagtgattggcgcggccccgatgaccataggattcgcccgaacacgctcggccagggactgccagtcgtccacgggctgtccgtcaccggcgatgaccgcatggggcaccatgcccagcacgcgattgctcatctcgcgctggaagccgttcatgaccgagagcacgatgatcatcgccagcacgcccagcgacaagccgatcatcgaggtcagtgaaatgaacgaaatgaaatgattacggcgcttggcccgcgtatagcgactgccaatgaaaatgctaagcggcctgaacattacccagccaccagccggccgtcttccaggcgcaggatgtggtccatctgtccggccaattgcggatcatgggtgacgaccagaaaggccgtgcgcaaggaactgctcaattccagcatgagatcctgaatcccctgcgccgtatggtgatcaaggttaccggtgggttcatccagcaagaccagcgctgggctgttggccagcgcgcgagcgatcgccactcgctgacgctcaccgccggatagctccgacggcttgtgcgccaaccgatggccaagccccacacgctgcaacagctcggtagcccgggcccgcgcgtccggaatcggcgtcttgccgatcagcaatggcatgcatacgttttccagcgcggtgaactcgggcagcagatggtgaaactggtagacgaagcccagcgcgcgattgcgcaacagtccacggtccttctcgctgagagcggagagctcctcaccggccagccagacactaccttcactcggcgtatcgaggccgccaagcaggttcagtaaggtacttttgcccgaaccggagctgcccacgatggccacccgctgccccgggaacagctccaactgaagaccggaaagcacgttgaccgactcgggcccctgctcatagcgcttgcccaggttgcggcaactcagtaccgcaccttccttccgagattcttgatgcatgaccagctcactcatatcgtagcgcctcggcgggctgtgtacgggccgcacgccaggccgggtacagggtggcgaaaaaactcaggacgagcgccgcggcgcagacctgaatcacgtcagcggccatcagacgagacggtaggtaatcgatgaagtagacgtccgcattgagaaacttgtgcccgatgagatgctccagtgcggcaatccagctgctgacgttgagcgctgcgaagatacccagcagcgcaccgaccagggtaccgacgacgccgatcaccgtcccctggaccatgaagatcgccatgatctgtccgggcgtcgcccccagggtccgcaggatggcgatgtcgccccgcttgtcggtgaccaccatgaccagggtggagatgatattgaaggccgccaccgcgacgatcagcagcagcaacaggccgatcatggccttttccatgcgtatcgcctgatagagattgccgtgggtgcgcgtccagtcacgtgagtagaagtcgtcgcccaactggcccgccagttgccatgccgtgcgcggcgcctggaacagatcctcgaagcgcagccgcagcccctgcacctgatccggcttccatcgatgcagacgtgccagatcggagatattggccatcgccacgtagccgtctatttcgccggcgccgacatggaagatgccgcgcacggtgaagcgcttcatgcggggaaaaacacctgccggcgtgaccgtgacttccggagcgacgaaggtgatcttgtcgccgacgccaacgccaagcttgtcggcagccttgtcgccgatgacgatgccgaactcgccggaggccagctcatccagccctccttcgcgaaagaactgcccgatgatggatacgttgggctcgacttgcgggtccaccgcattgatcaatgtcttggtgaccttcccgcgatgcgtcagcagaccctgcatctgaatgaacggcgccaccgccgaaacctgcggatgctgcatcagtcgatttccgagagcctgccaatcgtcgatcggcgtcgggcgttcgatagtggcgtgcgggaccatgccgagcacgcgcgtgcgcatctcgtgatcgaaaccattcatgaccgacagtacgacgatcatcaccagcacgcccagcgccagcccgatcatcgaggtgaaggaaatgaaggaaacgaaaaggctgcgacgtctggcgcgtgtgtagcgcgccccgatatacacggacagcggtctgaacataaatcgatgggttcgctttcgctggcgggaaataacaagctgaatgacgataccaaacggcctgatacactcaagccatcactgcagcccagggatcgacatgcccactgaagacaccgaagatcgccgcgaatactatcgtatcgaggatgtgatcgcactggaaatcctgccgctggaacacctcgaaacagtccccgatggcggcgcgaaccagttgttcagtctgcttggcgagctgcatcagctcgatttcgagtcacagcacctgttgcggcagattgccgaacgcaaccgtacgctggccagttacctcaaggtacagaacaagcgtatcgatctgattgcccaagtgctcgcccgcgacctgctcaaagacatcgggccggtgcgcgaggtggtgctgtccgaaggtgggatcagcttcgtcaacgatgcgccactcgaagaaggctcgacctggacgctgaaactggcgctgatgccgcaatgcctggggctgctgctagccgcccgcgtcgccagctgccaagccttggacgacggacgcttcgccatcgggacgtcgttcgaagcgttgactgatgcacaacgacagctgctcgctcggcatatcctgcagaaacaggcgacagaacgacgcctggctcgtgaaagtctgcaggaactctgaaatgcaccgattattgattccgcttctggccgttgccttttgtgtcccggccgttgccgagacgatccgcatccccgtcggtcagcaaggccagtcccaactggcgctgcccggacgcggcgactcgaagggcacggtcctcgaacactttggccttgccgacgaggaacatcccgccgtcggagtcccgcccattacacgctgggactaccgttatttttcggtgtacttcgagaatgaccgggttatcgacagtgtgatgcaccatcaaagcaccccatccctacagcgagatatcgaaccgtgaccttgatttacggccaccgcggcgcaaagggcgaagcgcctgaaaacaccctcgccagcttccagcgatgcctggcccatggcgtgcgtcgctgcgagctggatttgcacctgtcccgcgacggcgagttgatggtcatccatgacccaaccttgaagcgcaccaccggacggcgcggcaaggtcgtggagcacgacgccgaggagctggttcattacgatgcgcgcagtggcgggcccggctggaaacaaccgtgcccgataccccggctggcggagctgttcgagaaatgcgacttcgagcactggcagctcgaggtgaaaagcgcctcgcgcgtacgcgcggcacgctcggttctggccatcaaggaactggccgaacgttacgggttgctcgatcgaatcacagtcacctcagggtcgcgcgaagtgctacgggcactgaaaaggctgacgccggagctgtcatcagggcttgtagccgaatacgcctggcttgacccattgaaggtggccaatcaatacggctgcgaactgcttgcactgaagtggacgctctgcacccccgagcgcatcgccaaggcacgcgcacagggtttgcacgtttcagtgtggaccgtgaacgaaccagcgcttatgcgccggctcgcggacttcggcgtggacagcctgatcaccgacttccccggcctggcagtggaaacgttggccaagcggtaggctggaggctgaaaggctcggtctttgccaaggcgctcctgcgattcggaacggcaacttacgctaccgtttcgtccagccctccagccttcagcgctcctatcggcttttcaaaagctttcccgattcggccagcgccaatcccggctatcctctccgaccggctcaggccaccggtcggagccgctcaaaaaagccggtttagcccgtcgaacgcggcgacgcgataggcctcggccatggtcggatagttgaaggtggtattgacgaaatacttcagcgtattcgcctcacccggctgattcatgatcgcctggccgatatgcacgatctccgatgcctgatagccgaagcaatgaacgccgagcaccgccaacgtctcgcgatggaaaagtatcttcagcatccctaccggctcggcggaaatctgcgcacgcgccatgcccttgaagaatgccttgccgacctcgtacggaatcttcgcctcggtgagctcacgctcgttcttgccgatcgaactgatctccgggatggtgtagatgccggttgggacgtcgtcgacgaaacgccagctgttgttgtcgacgatgctgcctgccgctgaacgcccctgatcgtaggccgcgctggccagcgacggccagccgatcacatcgcctgccgcatagatgttgccgacatccgtgcggtagtgttcgtcgactttgatctgcccacggctgttcaccttgaggccgatgttttccagcgcaagcttgtcggtgttgccggttcgcccgttgcaccagaggaaggcgtctgccttgatcttcttgccggacttgagatggagtatcacgccgttgtcgacgccctcgacacgctcgtactcttccttatggcgaatcaacacgttgttgttgcgcaggtgataactgagcgcatcggagatttcgtcatcgaggaagctgagcaactggtcgcggttatcgatcagatcgaccagcacgcccaggccactgaagatcgacgcatactccgagccgatcaccccggcgccgtagatgatcaggcggcgcggcgtatggctcagcgtgagaatggtatcgctgtcgtagatgcgcgggtgcgagaagtcgacgtccgcgggacgatacgggcgcgagccggtcgcgatgatgaattgattggccaccagcgtttcgaccatgccgttggcgctgaccacttcgaccgtctgctcatcggcaaagctcgcggtaccgaaaaagatgtcgatgcggttgcgtgcgtagtagcccgtacgggaggtgacctgcttggcgatcacgctctcggcacttttcagcacgtcgggaaaagagaaccagcgaggttcgccgatctggcggaacaacgggttggtgttgtactgcatgatctgccgtaccgaatggcgcagcgccttggacggaatggttcccagatgagtggagttgccgccgacgtgtggcctgctatcgaccacggcgaccttgcgtcccgccttgaccgcattcatcgccgcgccttcgccggctgggcccgagcccaaaaccactacatcgtaattgtagacagccatattcacccctgaacacgcggcaggccaacctgccgctgttaacgaattacgctggccaggaaaaaaaccgtcaggcgtatccggacggtcccggccacaggtgccgagcagcgtcggcacgtcctacatgcaaggcccgaaaccggtgcgctagcgcccctgggccgggttgaagccacttatcagcgtctggtcgcgtcgtaggcgagatctgcttttgaaatctggctttcctgcgcattcacctcctcgcatttctcgcggctaccgccgcagatcgagcactccttctcgatgccgagattggcgatccctccgcatgagccggcgatgggcttgcgacccatgatcacgccgatcgacatacccaacacgaccagtaccatcaccaaaaaaacgatcaaccaggtcattgctctgctcccgcaccgaacagctcatcaaaagcttcggtgctcttgcttacgaattcctgcccttcgcgtaccacgaagaacgctgcgatcctgtgctctgtcgcgtaggccagtccacgctccggaccgagcaccataagcacggtagacaacccgtccgcgcggagtgtcgacggatcgacaaccgtcacggcggcgagatgatgctcgataggcgccccagtggtcggatccagcgtgtgcgagtagcgcttaccgtcacgctcaaagtagtttcgatagtcaccggaggtagaaacgcccagtccatcgagttcgatgacccgctggacgactcgctcattgtcccgcggcgcttcgatcgcaatgcgccatggtgatccatccggcttgcggccctgggctttcagctcacccgtgatttccaccagaaagctgccgacgcccgacgcttcgagcctcgccgtcacctgatcgacggcataaccagctgcgatgctgttgaaatcgacttgaacgttccggtctttgcagagctgttcgccctccaaccgcaagtgatgctggccgacatcctgccgtaccgccgcgatttcctcggccgaaggtacccgctcgccttgtccgcgaggcccgaagccccacaggttgagcagcggctcgatggtcagatccagcgcgccgccgctttcgtcagacagttccctgcctgcctcgagcagggttcgcaccccgtcaggcatggccatgcagcgcccggccggcagctcgttgaacacttctatgtcggaatcggcacggtaggtcgaggcctgcttatcgatgtcggcgagtatcgcctcggtctgctgcctcaattgctctttgtccggcgtgccggtgctcgccacgtacttcaccgtataggtgctgcccatggttggcccgctgaagctttctaccttgtcctgaaacagacagcccgtcagcgccgtcgccagggcgacgacgatgacgggccgaaatgacgctcgaatcatgctagccgccgaagtcgtcgagcaggatgttctccggttcaacgcccaggtcggtcagcatcttgattaccgaggcgttcatcatcggcgggccgcacatgtagaactcgcagtcttcgggagccggatggtccttcaggtagttctcgtagagtacgttgtggatgaaccccgtcggcccctgccagttgtcctccggttgcggatcggacaatgccagatgccactcgaagttctcgttctcggcttgcagttggtcgtattcctcgacgtagaacgcctcgcgcatggagcgcgcgccgtaccagaagctcatcttgcgcttggacttcaggcgcttgagctgatcgaaaatgtgcgagcgcatcggtgccatgccggcaccaccaccgatgaagaccatttccgcgtcggtatccttggcaaagaattcaccgaagggaccgtagacggtgaccttgtcgcccggcttgagactgaacacccaagaggacatcttgcctggaggcagatcatccttgcctggtggcggcgacgcgatacggatgttgaatttgaccagaccgacttcttccgggtagttcgccatggaataggcacgaatcacggtctcatcaaccttggacacgtacttccactggttgaacttgtcccagtcgccgcgatattcctcctggatgtcaaagtccttatagcggacctcgtgaggcgggcattccagctgcacgtaaccaccggcgcggaagtcgacgttctcgccttccggcagcttcaaggtcagttccttgatgaaggtcgccacgttcgggttggagagcacggtgcactcccacttcttcacgccgaacacttcctcgggtacctcgatcttcatatccgccttgaccggtgtctggcaggacagacgccagccctcgccagcctcacgacgggtgaagtgtgactcttcggtgggcagcatctcgccgccaccgctttcgacgacgcacttgcactgggcacaggtgccgccaccaccgcaggcggacgataggaagatattgttcgcggccaaggtctgcagcaacttgccgccagccggaacggtgatggtgcgttcgccgttgatttcgatactcacgtcaccgctggacaccagcttggcgcgcgccgcgagaatgatcaccaccagcgcgagcacgatggcggtgaacatgccaatggcaaggaaaatttcgtaactcatcagttcatcccgtccttacagctgtacgccagagaatgacatgaagcctagcgacatcaggccgatggtgatgaaggtgatgcccagtccctgcagaccctccggtacatcgctgtacttgagcttttcgcggataccggccagcagcatgatcgccaacgcccaggacgcaccggagccaaagccatacacggtactttccgccaggttgtagtcccgctcgaccatgaacagtgtgccgcccatgatggcgcagttcacggtgatcaacggcaggaagacgcccagtgcgttgtaaaggctgggtacgtacttatccaggagcatttcgaggatctgaacgatcgccgcgatcacgccgatgtagctaagcaggcccaggaagctgagatccacttccggcagccccgcccaggacagcgctccggccttgagcagataggtgtagatcaggttgttggccgggaccgtgatggcctgaaccacgataaccgcgatacccaggccaatcgcggtttccactttcttggaaatcgcgatgaaggtgcacatgccgaggaagaaggccagcgccatgttctcgatgaacacggcacggacgaacaggctgatgtaatgctccattagtaagcctccttgctcgagacttgcggcgccatcttgaacgacggcttctcgacctgctcgcgcttccagctacgaatgccccagatgatcaggccgatgaggaagaacgccgacggcggcagcagcaacaggccgtttggctggtaccaaccgccatcgttgaccaccggaaggatggtgtaacccatcagcttgccggcgccgaacagttcacgaacgatgcccagcacgatcagcatcgcgctgtagccgagtccgttaccgagtccgtcgaaaaacgacagcatgggcggattctgcatggcgaacgcttccgcacgccccatcacgatgcagttggtgatgatcagaccgacgaacaccgacagctgcttggacagcgagaaggcgtaggctttgaggacctgatcgaccacgatcaccagcgaggcaatgatcaccatctgcacgatcatgcgaatcgagcctggaatctggctgcgaatcatcgagatgaacaggttggaaaacgccaccaccagcgtcagcgcgacggacatcaccagagcggtcttgaggttggaggtaaccgccagcgccgaacagattccgagaatctgcagaccgatggggttgttgttgaagaccggattgaacaggacttctttgatagtaggttgcgacatggtcaagcctccccagcgcgcaggttagcgataaatggaccgaatccgttctcgcccagccagaagtgcagcaggttgttcacaccgttactggtcagcgtcgcaccggccagcgcatcaacctgatggtcggctttcgggctctgcggatcgacgccgcccttgaccacctggatggccagtttgccgttctcggtgaacagctccttaccctgccactggctgcgccacttggggttatccacttcgccgccgagaccgggggtctcgccatgctggtagaaacccagcccttcgaccgtgttgagatcgcccttgacggccatgaagccatagagggtcgaccacagaccatagccacgcaccggcatgatcagcgtctcgagctcgccgttttcctcgacggtatagacgacgctgtagcgctcgcggcgcttgatcgaggcgatgtcttcatcgcctggcagcgcttgcgacagctgcggatccttggcggcaaccagcgggtcgaaggtgttcggatcgaactcgtcgctgtatttgccggtttccagatcgaccagcttggcaacgatccgctccttatagagcgcctttacctgcttggcagacatacccgcctcgcccaacccggcgatcgccaggatgctgcgctgcttgtccagctgacggttttccagttgtgtcgggcgtagcgcaaccgctgcgcccgaaacgaacaccgagcagaccaggcagaccagcaaggccacgaccagtgtgcgaacggtggattctttttgactagacattacgtgccagcctccgcttgatattggcctgaatgacaaagtggtcaatcaacggtgcgcacaggttggcgaatagaatggccaacatcatgccctccggaaacgccgggttcaccacccggatcagtaccaccatcacgcctatcaaaatgccgaacgcccacttacccgtgttcgtcatggacgccgacaccggatcggtcgccatgaagatcaggccaaaggcgaaaccgccgacgaccatgtgccagtaccacggcatggcgaacatggcgttggaatccgagccgatcaggttgaacagcgagctcagcgcgatcatgccgagcatcacgcccgaaacgatgcgccaggacgcgatcttggtcatcagcaatacggcgccgccgatgaagatcgccagcgcactggtttccccgatcgagccgtgaatggtgccgaggaaggcatccatccaggtgatgccgctggcgatcacgttctccatcccgccggcgaagctgaggctgagcgcggtcgcgccggcaaaaccgtcgactgccgtccacaccgcatcaccggacatctgcgccgggtaggcgaagaacaggaacgcacggccggtcaatgccggattgaggaagttcttgccagtaccgccgaagatttccttgccgatcacgataccgaagctgatacccagcgcgacctgccacaaaggaatgcttggcggcagcgtaagggcgaacagtacggacgtgacgaagaacccttcgttgacctcatgcttgcggatggaggcgaacagcacttcccagaaaccgccgacgatgaaggtcaccgcgtagaccgggatgaagtacgccgcgccctggatgaagttgtcccacaagctgttcggatcgaagcctgcgagcgcgctgatcagcgccatgcgccagccttcctgcgccgctagcatatccgggctctgtgcatagatcaggttggcttggtagccggtgttccacatgccgaagaacattgccgggaaggtgcacagccagaccgtgatcatcatccgcttgaggtcgatgccgtcgcggacgtgcgcggtggtcttggtcacactgccgggacgatagaggaaggtgtccgcggcttcgtagagtgcataccacttctcgtacttgccgcccttctcgaaattgtgctcgatcttgtcgaggaattcgcgaatgcccattccttacccctccttctcgatgcgagtcaggttgtcccgcaggatcgggccgtattcgtacttgccggcgcacacataggtacacagggctaaatcttcttcgtccagctccaggcagccgagcttctgcgcgacttcggtgtcaccgacgatgagcgaacgcagcaactgagtcggcagcacgtccaacggcatgacctcctcgtagttgccgaccggaaccatggcccgtgggctgccgttggtagacgtcgagaaggcgaacttcttgccgcccatcagcttggagatatagatgttgaggatcgaatgcttgtcgctgccggcacgcaggtaatgcagcatttcgcgttccttgccctcacgcaggcaggaaacctgctggtgataacgaccgaggtaggcgaacgcaccgtgtgccgtacgacctccgagcaccgagccggagacgacgcgattcgcgccgggctgcagctcgccagccgtcagctcatcgaggcaggcgcccaggcgtgtacggaccagacgtggcttttcgaccacgggaccggcaagcgaaaccactcgctcgaccgacagtcggccagtggtgaacaacgcaccgattgcgatcacatcctggtagccgatcgtccagacgctcttggtggcgctgaccggatcgaggaaatggatgtgcgtaccggcaagaccagccgggtgtggtccggcgaaactttcgaccgtcaccttggcaagctgtccgcctggcagcgaagcaccctcagccttgcacaggaacagcttgccgagattaccgagcacttgcaggcccgcttcgaattcagcggcacgctcgccgatgatgatggcgggatcggcagccagcgggtgcgtatcgatcgccgtgacgaagatggagctgggtgcggcatcgatagccggaaccttgctgtacggacgcgtacgcaacgcggtccaaagaccggattgctgcagattctcacgaacctgggcgtcaccaagcccttcgagctggcccgcgctgtactggctgaacgtgacttcgtccgcaccatccagatcgatgaccacagactgcagaacgcgcttttcaccgcgatggacagcactgacgataccagcaccaggcgccgtgaaaacaacacccggggtcttcttatccgagaacagcacctgtcccagcttgacccgatcaccgacttgcacttccatggtcggcttcatgccagggtaatcaaaccctacgacggcgacgcttcgcacgggccttccagcctcgatacgctgcgccggcgcacctgcaatgggcaaatcaagcccacgttttatattgatcatcggttcgctaaccactgatttagaagacttttttacgggccgcccggcatggctaaagtcgaattgcacagcgcgcgccgatacgttatcagcgcgacgctatgccgcgggcccaggtagaaatccgcccgattatagaggtcgtaccccgtgactgaccacccaaggtctttcaattttttgactgtggacaagcatcgtcgagcggccaactattgacggggcttgaaaaaagtaacggccagccgggccgaatcgcgccaagaatgcaaaacgggagccgaagctcccgttctttttacagtccgtcgcgttagcgcgggaaggctggcggattgactccagccatgtcttccatcacgcgaacgacctggcagctatagccgaactcgttgtcgtaccagacgtacagaacaacgcggttgtcgctgcagatcgtcgcttcggcgtcgaccacaccggcatggcgggagccaacgaaatcactggaaacaacttcctgcgaattgacgtagtcgatctgcttctgcagatccgagtgcatggccatctggcgcaggtactcgttgatctcttcgcgggtggtggccttttccaagttcaggttcaggatcgccatggaaacgttgggcgtcggaacgcggatggcgtttccggtcagcttgcccttgagtaccggcagcgccttggccgcggcggtcgccgcacccgtctcggtgatgaccatgttcagcgccgcgctacgaccacgacgactgcctttatggaagttgtcgatcaggttctggtcgttggtatacgagtgcacggtctcgacgtgaccgttgacgatgccgtattggtcgttgaccgctttgagcaccggaacgatagcgttggtggtgcaggaggctgcggagacgatcttgtcatcggcggtgatgtcaccatggttgatgccatgcacgatgttcttcagctcgcccttgcccggcgccgtcagtaccacgcgggcaacgcccgggcacttgaggtgctggccgagcccctcggcgtcgcgccatttgccggtgttgtcgaccagcaacgcgttttcgatcccgtactgggtgtaatccaccgaagacggatcgttggaatagatcacctggatcaggttgccattggcggtgatggtgttgttctcggcatcgatatgaatggtgccttcgaacggaccgtgtaccgagtcgcgacgcagcagactggcacgcttgaccaggtcgttgtcggcacccttgcgcacgacgatcgcgcgcagacgcaggccatcgccaccgccggtcttttcgatcaggatacgtgccagcaaacggccgatgcgaccgaagccgtagagcaccacgtcagtgcccttgtgcacgccggtggtgttgcgcttgccagcgacttcagccagctcgtcacggacgaactggtcgagactgcgaccgttgccctcggccttgaacttggccacgaccttacccaggtcgacagacgccgcgcccaggttcatgtcggccatggtcgtcaggatctgatgcgtttcgttgacgcagagttcggcttcgtcagcctggcggtgacgcgcgaatcgatgcgccttgagcagtgcgatgaccgagcgattgatcagaccgcggccatagatggaagtcaccacgttgttgttacgatacagctgaccaatcagcggaatcatcgcttcggcgagggcttctcgatcaatccattcaccaagacactggtcgggcttctgagtcacgggcagttccttccaacatgtaggggctgataaaaagggctacattatgccggcgcaccctagcgccggcaatctgtgcagcggaaacactgacagcgcgccgcgcggatagttacaatccgggcggtccattttttcgaccggagccacgcccactcgtgtccgtattgcgccttccgcccatgcctgccgccagcggcaagcaaacctggggcaaccttcctggagccgcgctgagcctggccattgccgaagcggccagcaacgcagagcgattcacccttcttctcacggccgacagccagagcgccgagcgcttgcaggacgagctcgcttttttcgcgcctggactgccggtgctgcacttcccggactgggaaaccctgccctacgacgtcttttcgccgcaccaggacatcatttcgcaacggatcgcggcgctgtaccgcctgccagagctgacccacggcgtgctggtagtccccatcaccacggcgctacataggctggcgccgaaacgctttttgctcggttccagccttgttctggatatcggccagaagctcgacgtggaacagatgcgcacgcgcctggaggcggccggctatcgctgcgtcgatacggtctacgagcatggcgaatttgccgtgcgcggcgcgctgatcgacctgttcccgatgggcagcgccctgccctaccgcatcgacctgttcgatgacgagatcgaaacgctgcgaaccttcgatccggagaaccagcgctcgatcgacaaggtcgagtcgatccgcctgttgccggcacgtgaatttcccgtccggaaagagtcggtaaccggcttccgagcgcgcttccgtgagcgcttcgacgtcgacttccgccgttgcccgatctatcaggacctttccaccggcatcacgccggccggcatcgagtactacctgccgctgttcttcgacgagacctcgacgctgttcgactatctgccggaagacacccaggtcttctccctgcccggcatcgagcaggctgccgagcacttctggaaggatgtgcgcagccgttacgaggatcgccgtgtcgaccccgagcggccgctgctgccgccggccgagctgttcatcccggtcgaggattgctttgcccacctgaaatcctggccacgcgtcgtggtcagccaggacgatgtcgaaaccggcatcggccgcgagcgcttcccggccagccgctttccggaactggccatagacgccaaggccagcgaaccgctgggcgcgctgcggcgcttcctcgacgagtttccgggccgcgtgctgtttaccgccgaatcggcgggccgtcgcgaagtgttgctggagttgctggcgcgtttgaagttgcgcccccatgaagtgggcggttggccggaattcgtcgacagcaaggagcgactggcaatcaccatcgcgccgctggacgacgggctgctgctgcaggacgtggcgctgatcgccgagagtccgctgttcggccagcggatcatgcagcgtcggcggcgcgaaaaaggccgtgatgccggcgagaacgtcatcaagaacctcaccgagctgcgcgaaggcgccccggtggtgcatatcgatcacggtgtcggccgctatcagggccttgtcaccctggaaattgaaggtcaggccgccgagttcctgatgttgcaatacgccgaggaagccaagctctacgtaccggtttccagtctgcatctcatagctcgttacaccggcagcgacgatgccctggccccgcttcaccgcctggggtcggaaacctggcaaaaggccaagcgcaaggcggccgagcaggtccgcgacgtggccgccgagctgctggacatctatgcccgccgcgccgcgcgtgaaggccacgccttcgccgatccacaggtcgattacgaaaccttcagcgctggctttccgttcgaggaaacgccggaccagcaggcagccatcgaggccgtgcgcagcgacatgctggcgcccaagccgatggatcgcctgatctgcggcgacgtcggcttcggcaagaccgaagtggccatgcgcgccgccttcatcgcggtgcacagcggcaagcaggtcgcggtgttggtgccgactaccctgctcgcccagcagcactacaacagcttccgcgaccgcttcgccgactggccggtgcgtgtcgaggtgatgagccgcttcaagtcggccaaggaaatccaggcggcggtgcaggaactggccgaaggcaaggtggatatcctcatcggcacccacaagctgctgcaggacgacgtcaagttcaccaacctggggctggtgatcatcgacgaggagcaccgcttcggcgtgcgtcagaaggagcagctcaaggcgctgcgcagcgaggtggacatcctcaccctcaccgccacgccgatcccgcggaccctgaacatggcggtcgcgggcatgcgcgacctgtcgatcatcgccacgccgccggcgcgccggttgtcggtgcgtaccttcgtgatggagcaacaggacgcggtaataaaagaggcactgctgcgcgagctgctgcgcggcggccaggtctactacctgcacaacgacgtcaagaccatcgagaaatgcgccgccgacatcgccgcgctggtgcctgaggcccgcatcggtgtcggccacgggcagatgcgcgagcgcgaactcgaacaggtgatgggcgacttctaccacaagcgattcaacgtgctgatcgcctcgaccatcatcgagaccggcatcgacgtgccgagcgccaacaccatcatcatcgagcgtgccgacaagttcggcctggcacagctgcatcagctgcgcggccgggtcgggcgcagtcaccaccaggcctatgcctacctgctgacgccgccgcgcaaggccatgaccgacgacgcacagaagcgcctggaagccatcgccaacgcgcaggacctgggcgcgggcttcgtcctggccacccacgacctggaaatccgcggcgcgggcgaactgctgggcgacggccagagcggccagatccaggcggtcggcttcaccctgtacatggaaatgctcgagcgcgcggtcaagtcgatccagaagggcgaacaaccgaacctcgaccagccgctgggcggcggaccggagatcaacctacgcctgccggcgctgatccccgaggactacctgccggacgtgcatgcgcggctgatcctctacaagcgcatcgccaacgccaccgacgaggacggcctcaaggagctgcaggtcgagatgatcgaccgcttcggcctgctacctgagccgaccaagaacctggtccgcctgacgctgctgaaactgcacgccgagaagctcggcatcaccaagatcgacgctggcccgcagggcggccgcatcgagttcgccgccgataccagtgtcgatccgatggtgctgatcaagctgatccagagccagcccaaacgctacaagttcgaaggcgcgacggtgttcaaattccaggtaccgatggaacggccggaggagcgcttcaacacgctcgaggctttgctggaacgcctgtcagcggacaagagctgagcatgccgaggttgcacatgatgtccacccgaattgccgcgaacgatgcccggtagctttctcgcctcgttgccgacgggctggtcgctgctgttttcggacaacgcaatgatgcgcggcgagcagtacgccgacgaacagcgcatcaggatcctcagggaggacagccacttcgtcgaatcgacctgcaacggctccagaggcagcctgtatcggcaatcgctgcagctgtcgcgcgacagcaggctcagctgcgtatgcagctgcccggtggggctgaactgcaagcattgcgcagccctcatcttcacgctgcaaagccaggccagacagcggccggcggacgaagccgtgccagacgacgggggatttccgggcacgctggaacgctggctgtcgcaactgcccaacgcgctgggcggcgactcgcaagcaggcccgggctggtgtcttcactacctgctgaccccagacacccatgtcgaaaccttcaaggtgcgcctgcgcaaggatggcagcccgggcgagcggcagcccttttacggcatgcgtgaggcgagctttcggcaaccgagcttcatgaccccgctggatctgcgcatcgcggctctggtgtcgctgatccgcgtatccggtagcggcttcatgctcgacggtgagaatggcggcgagacgctgcgcctcatcctcgaaaccggccgcgcctatctcgattgggataaaccggctctgcagcctggtcggtcgcggcaggcacgcttccactgggcgcaacgccctgacggcgcttaccagcccgaactggtcatgagcgacgaacaagccaagcgactggaggccatcgatccgctgtattacctcgacagggagcgaaacgaagtcgggttgctggaccacggcctgccggcgccactggcccggcacctgctcgaagcgcccccggtgccgtccgcgcaggcagcactgttcagcctgacgctgaacgagatcgcgccacagttgccggcaccggccaaggcggtggaagagcggaccgatgacgtcgcgcccgtcccgcgtctgacgctgggcagccatcacgccgtcaactaccaaccgagcagcggccgcatggtgggcgagcaccagcaccgtgccggcctgagtttcgtctatggcgcgacggcgctacacggcaaggccaagcccggccagcgcgtacgccacgtcgagaacggtcgggtgatgagcattcttcgccagcctgacgccgagcaggcgctgcgccaacagatgacggcactcgggttccggccggcgctgcgccaaagccaggcgctgcccaaggactcggcggaaatgttcgaactgcccagcgaggcggcctggctgcaattcgcccagacgcagctgccggcattacgcgaccagggctggcagatacagatgcagccgggcttcgcctacgatctgacgccggtggatgcctggtacgtggacgtcgacgaggcgcccgagcacagctggttcgatctggagctgggcatcatcgtcgacggcgaacggatcagcctgctgccggttttgctcggcctgatccgccgcagcccggcgctgctatcgccccaggcgctggcgcagcgcgacgacgacgaaaccctgcgcgtccagctcgacaagcgtcgcgacaatgacgagctgccgctgcaagtcctgctgcccttcggacgcctgaaacccatcctcgccaccctctcggaactctatctgcgcgagcagccagctggcgagccgctgcgcctgggacacgccgatgcggcgcggctggcgcagctcgatgccctcgaaatgcagtggcatggtggcgaacacctgcgcgaattcgcccagcgtctgtgcgactatcgccagcagtccgtcgcgctgccgagcagcctcgacgcccaattgcgcccctatcaggtggacggtttgcgctggatgcagacactgcgcgtgctcggcatcggcggcgtgctgggcgacgacatggggttgggcaagacgctgcagaccctcgcccacctgctgctggaaaaggaatcgggacgcatggatcgcccctctctggtggtcatgccgaccagcctgattcccaactggcaggacgaagccgcgcgcttcgcccccggattgaagatcgccaccctgcacggcacggcgcgccagcagtatttcgagcgcctcggcgaattcgacgtgctgctgaccacctatgcgctgctgccccgcgacatcgagcggctcgcggacacgccgctgcacgtgcttgttctcgacgaagcgcagaacatcaagaacgccagcagcaaggccgctcaggcggctggacggctgaacgcccgccagcgcctatgcctgaccggtacgccactggaaaaccacctgggtgagctctggtcactgttcaatttccttatccccggctggctgggcgacgccaaacgcttcacccgcgaataccggactccgatcgagaagaacggcgacaccgaccgcctgcaacacctcaccgcgcgcatcaagccgttcctgctcagacggcgaaaagaacaggtagccagcgagctgccggccaagaccgaaatactgcactgggtggagctgagcccggcccagcgtgatttctacgaaaccgtgcggctcgccatggacagccgggtgcgcgaggaaatagacagcaagggcctggcgcgcagccagatcgtcatactcgacgcgctgctcaagttgcggcaggtctgttgcgacctgcgcctggtcaagggtgacctggccaaacccgctcgcggcagcacctcgggcaagctcgaaagcctgatgcagatgcttaccgagcagcttgccgaaggccgccgcgtcctgctgttctcccagttcacctcgatgctggcgctgatcgaagaggaacttcgcacccgcgccatcgactacgtgcagattaccggcgacacccaggaccgacgcaccccggtccggcggttccagaacggcgaagtgtcgctgttcctgatcagcctcaaggccggcggcaccggcctgaacctgacggcggccgataccgtgatccactacgatccctggtggaacccggcggcggaaaaccaggcgaccgaccgcgcccatcgcatcggccaggacaagccggtgttcgtctacaagctgatcgcgcgcgacacggtcgaggagaagattcaacagctgcaacgacgcaaggcggacctggcggcgggcatcctggatgccggaaacaccgccaactggcaactggatcccgccgacatcgaagcgctctttgccccgctgccataggaagtcgccgacatgcgcagactcgctacgcccgccgacttcgaccgcgtctacgacatttacatgcatgacgaagtggtgccctatctcggcttcgaccccatgccgcgcgaggccttcggcaaggtcttcgatccgctgttcgaaagcggatgcttctacgtatacgaattcgatgagcagctgtgcggcttctatcaggtgcaacggcatattggccgcgcggcgcatgtcgcctacctcggtacgctggccgtggcgcctgaggtcaagggccgcggcgtggccagggcgatgctggaggatgccattgtccggttgcatcgagccggcattcgcagagtggagctgaccgtcgaagcggataacccgcgcgccatcgccttttaccagcgcctcggtttcggccacgaaggcacccagcgcgccgcgtacaaacgcgccgccgacgaccgctacgtggacgagctcatgtacggcttgttgctggaagactgaagcagataaagcgcagcgcccgttatcagccccgggcgccgcttggtacggtcagcctttgagcttgaccgtcgtctgggccaccagctcgccctgataacgggcaatggtcagttccttggtcgacggctggcgcgagccgtcaccaccggcgatggtcgaggcgccgtagggcgtgccgccattgacttcggagatatcgaagaactcgccgataccatagccggtcggcacgatgatcattccgtgatgggccagcgtggtccaggtcgaggtgatggtcatttcctggccaccgccggtgccggtggaggtgaatacgctggcgaccttgccgtgcaacgcgcccttggcccagagcccgccggtctggtcgaggaagttgcgcatctgcccggacatgttgccgaagcgagtcggcgtaccgaagatgatcgcatcgtaatcggccagctccgcgggactggcgaccggtgccggttgatcgaccttgccgccggcattcttgaacgcgtcctgcggcatggtttccggcacccgcttgaccgtgacttcggcgccgtcgacccgccgcgcaccttcggccaccgcattggccatggtttcgatgtggccgtacattgagtgatacagcacgagaatcttcgccatttccattttcctcttggttgggttgtgttccggtttgattcgtcagcgctggtttaacgcacgtccaccagcacgacttcgctatcttcaagcgccgtgatgcgcaacctggcctcatcgcgcacggctaccccatctccagcgttggcgctctgtccgtcgatctcgatacggccgctcgcagccaccaggtagaccttgcggtccggggcgatctcgtattcggcaacctggccggcggaaagtgtcgcggcggccaggcgagcatcggcgcggatcggcaaggcatcgccgtcctcggccatgccgctggcgagggtgatgaaatgtccggcgcgctcgccggcggggaatggccgcgtgccccaggacggcggcaggccggactggtccggatagatccagatctggaaaagctcggtggtttcgtcttccaggttgtattcactgtgcgcgatgccggtgccggcactcattacctgcacgtcaccggcctcggtccggccacggttgccaagactgtcttcatgggtgatcgcgcctttgcgtacataggtgatgatttccatatcgcggtgggcatgagtcgggaagcccgaatgcggcgcgatgctgtcgtcgttccagacgcgcaggtggccccagtgcatgcgcgccgggtcgtggtagtcggcgaaggaaaagtgatgacgggtgtccagccaaccatgctgggcaccgccgaggtcggcgcggggacgaatgtcgatcatgagcaaaacctctgacaggtgaccgactcggcgccaaacgcgccgagcgatgaagtgaggtcatcttctattggatcggcgcgtatatggttggatatttccgtaccaaccaatcgtaaatttcgatatttgcgcgtcccgctaccaagccatgcgatccatctggtcaggccagaaacgccagcgcttcatcgagcagcagttccggcacttcctccggcaggtagtggccggccggcaacgccctgccctgcacgtcggacgcaacacgacgccactccgccagcgggtcgaagcaacgctcgatgacacccttgacgccccagagcacgagtagcggtgcttcgatcatccgcccagccgcacggtcctcgcgatcatgctcgaggtcgatgccggcgctggcccggtagtcttcgcaaaatgcgtgaatggtgccgggcagcttcatgcagcgcaggtattcggcgaatgcggcctcactgaacgggtgcacatgatcggcacgcgtggccacggcggtgcgcaggatcagttcgggatcggcctccagcagcgtctctggcagcggcgccggacggatcaggaagaaccagtgccagtaggcacgagcaaaggtttcgtcggtctggctgtacatcgccagggtcggcgcgatatccaggaggatcagccgccgcaccgactcgggatggtccatcgccaaccgatggctgacccgcgcgccgcggtcatgggcgaggatatcgaagcgctggaagcccagcgctcgcatcagctccacctggtcacgcgccatctcgcgcttgctgtaggcgatatgatcctcgccgccttcgggcttgctgctatcgccgtagccacgcaggtccgccgccaccacggtgaagcgctcggccaactgatcggcgaccctgtgccagatgacatgggtttgcggataaccatgtagcagaagcagcggcgggcctgagccgcccttgcggtagttgatccttacatcgttgacgtcgcattcgccgcgctggaattgctcgaacatcggaccgctcctgagagaagagtcctaagcctaggcgcagatccgtcgagcgcaacgggtattgattgatcagcccagggccagcggcagaaacagcgcaatcaggatgcccaacagactcatccccaacgccgcaaaggcgccgcactcgtcgccctcctccagcgcccgcgcggtgccgatggcgtgggcgttgatgccatagctcaagcctcgcgcggccgggtgctcgaccccggcccagcccagcagcaaaggcccgagcgcggtgccgatcacaccggtgagcatgacgaacaccgccgccagcgatgccaggccgcccagctgttcggccaccagcatggcgattggcatggttgccgccttgggcgacaggctcatcagcaccgtcagatccgcgcccaacgcatgggcgatcaccagggtcagggagacgccaagcaggccgccgctgaccagcgtgacgaggatcggccagaacagctgccggatgcgccgaatatggcggtacaaaggcaccgccagcgccacggtcgccggcccgaccagcaccgcgatcatcgacgcgtcggcgcggtagctcgcgtagtcgataccgcacaagtaaagcgtgccgactaccagcagcatgccgaccatgaccggttgcagcaccagccagccgctgcgtcgatagagtgccagcgccagctggaaggcgatcagcgtcagcgccacggaaaacagcgggtggtccagtgtcatggcccagacgctacgccagtcgacagcgctcatgctcgctcctcgcgccggcgatccatgcgcttgatcagcacctgcatcaaccaaccgcagaacggcaccgtcaccatcagcgacaggaccagccctgccgcaatcgccggcaggtttgccagcaaggcctcgctgctggtcatgatccccgccgccggcacgatcaacagcagcggcaggtactgaaacagcagcgcagcggttttttccagcggttcgggaacgccgcgacgcagcaataacactccgaaaagcagaaccaggccgatgatgggcccaggcagcgccggcaccagcgagagatgaaccacgctgccaagcagctgcagcacgaccagccaggtcaggcctttgagaatcatgggaagtcctattacggcagaacggaacgggcaatgatgcagggaatgatcgccgacagcacgcatcgtcggccccgaaggactatcacctgcctcgcgcccttcgaaacaggtgcagatgggcgttaaaaaaacgcatcagctggtcgcacggctgtggcctggcgtcgcacacggaaagccccgtgcatgccgtccgccctccggcgaacccgacacaacccaacggcgctgcggcgcacggcttgacccgtcgttcaggcgcggctcccggcgaggccgcgaagcatctgatccgtatttttccgcgttagctgagtctgttatgcaacacaaccggatcagatcatcggcgccgcctgttcagcctgataggggcacaccatgaccgaacgcattcctgccgcgatcatcgacacggtcgacccgcgcaaaccgctccgcctgacgcccgcgctggcgggcgggcccatccacacgcgcagcttcactggcctcttccgcaatctgcgcctggtcggtgcgggctttctgttcctgctctacttcggcacccagtggctgaactgggaaggtcgccaggcggtgctctgggatctgggcaaacagcaattccacatcttcggcgctacgttctggccgcaggacttcatcctcctgtcggcattgctgatcatcgcggcgttcggactgttcttcgtcaccgtcctggccggccgggtctggtgcggctatgcctgtccgcaaagcacctggacctgggtgttcatgtgggccgagaaggtcaccgagggtgaccgtaaccagcgtatcaagctggacgcggccggctggtcgctgaacaagctgctgcgtcgcggtgccaagcacggcctctggttagccgtgagcctggcgacggcgatcgccttcgtcggctacttcaccccggtgcgaacactcgtcagcgagctgttcagcctgcaattggggatgaccaccgccttctggctgttcttcttcacggcggcgacctacatcaacgccggctggctgcgcgagcaggtctgcgtgcacatgtgcccgtactcacggttccagagcgtgatgttcgatgccgacaccatgacggtcgcctacgatgccgcgcggggcgaacatcgcggtgcccgccgcaaggacagcgatccaaaggcccagggtctgggcgactgcatcgactgcaccctgtgcgtgcaggtctgccccaccggcatcgacatccgcgacggcctgcagctggactgcatcagttgcggcgcctgcatcgatgcctgcgacagcgtgatggacaagatgggctacgcccgcgggttggtccgctacagctccgaacgtgcgctcgaaggcggacagacgcggctgctgcgaccgcgccttgtcggctacgccaccgcactggtggtgatgatcggcgcattcatctgggcattggatacgcgaccgctgctctcgcttgacgtaaccagggatcggacgctctatcgcgaaaacatgcagggccagatcgagaacatgtacagcctcaagctaatcaacaagacccagcaacggcacagctatcggatcgcgttgcaaagcgggccattcgagctgcaggggcccggcgaagtcagcctggcgcccggagagattgtcgatctgccggtcagcgtggcgctggtcaatgatagcgaaagcggccgatcacagcgtgcgttgcacttcgttgcccttgaagcgggcaacccggcgagttcggtcagtgcacaaagcaccttcatcgcaccccgggttcggtagcatgggccaatcaaccatcgccatggccggccagcagcgccgtagggtccacccgccacgatgaaacgctacgagagatttgccgaagagatcgccgagctgatccgcagtggcctgctggcgccgggcgaacgcgtgccttcggtgcgccacgccagccgcacctacggcatcagccccgccaccgtgtttcaggcgtattaccagctggaggatcgcggcctgatccaggcgcgagcgcgctcgggctatttcgtccgcgaacacgccaagcgtccgctgcccgagccggaaatcagcccgcgcctgagcgagactacggacgtggccgtcagcgaactggtgttctcggtactggcctcgctgcgcgacccggataccgtgcccttcggctcggcctttcccagtccggacctgtttcccctgcagcgcctggcgcgctcgatggcgcaaaccgtgcgcgacatgccggcgagcgatgtggtcgccgacatgaccagcggcaacccggcgctatgcaggcaaatcgccctgcgctacatgctcggtggtgtgatgctgccaatggaggagctggtgattaccaccggcgccatggaggcgctgaacctgtgcctgcaggtcgtcaccgagcccggcgatctggtggccatcgaagcgcccgccttctacgccacgctgcaggtgctcgaaaggctaaagctcaaagccgtcgaaatcccggtgcatccgcgcgacggcatcgacatgggcagtctggccagcagcctggccaacctgccgatcaaggcctgctggttcatgagcagcctgcagaatccgctcggcgcaagcatgaccgaagccagcaagcaggccctttacgacctgctgcgacaccaccaggtgccgctgatcgaagacgacgtctacgccgagctctacttcacccgcgagccgcccaaaccggtcaaaagctacgaccgcgacgggctggtgatgcactgcggctcgttctccaagagcctggcgccgggctaccggatcggctgggtagccggggggcgctattccgagcgcatcagccggctcaagctgatgaccacgctatctccttcgctaccggcccaggccgccattgccgactacctgcaaaacggtggctacgaccgacatctgcgcaaactgcgccatgccctggagcgtcaacagagcgaaatgctcgccgctgccgcccggcactttccggcgagcactcgggtgacccgccccaacgggggctatttcctgtggttcgaattccccgagcaagtggactcgctcaagctgctgcaactggccctcgcccagggcatcagcctcgcacccgggccgattttctcggcgacgcggcgcttcggcaactgcgcgcggcttaaccacggctatccgtggagcgcgcgcagcgaagccgcgatggctttgcttggccggatgctccggtcgttttgacagccggacgccgtgcggcgcggcgatgtaggttacgtcagccacttgtaggaacgcaggcgacctggccaggtcatggcggtgagcagctagatctcgattgtcccgtgcagatactggacggcgtggcccgacacccgcacgcgcgcaccttcgacccggcagtacagctcgccgctgcggcgcgaggcctgcagcgcgaccagcgacgtccgccccaggcgctcggcccagtacggcgcgagtccggcgtgaatggagccggtcaccggatcctcgtcgccgccgttggctggccagaagtagcgcgagacgaagtcatgctggcggcccggcgcggtcaccaccacgtccagcggcgcgagcgtcttgaacagcgccaggtcgggcgtcagcaagcggacctgcgcttcatcctcgaacacggcaaaccaggcctgggggctcctcagcacctgatacggcttaacgcccaggccgtccagcaacgcggccggcgggctgtcgacgggctcgggggctcgattggggaagtccatttccagtcggccgtcatcgagctgcacgactggaatatcccctactgccgcggctcgaaaggtcaacggcgcagtggccagcccctgttcgagtaatacgaaggcgctcgccagggtcgcatgaccgcagaagtcgatttcggtcagcggtgaaaaccagcggatacgaaaaacgccgtccggctcacgaagcacgaaggcggtttccgagaggttgttctccatggcgatcgcctgcatctgcgcatcgctcagccagtgctcgagcggcactaccgcggcggaattgccctggaatcgctcacgtgtgaacgcatcgatctgatagatagccagctgcatgccgcaccgcctcgcgttcatggcgcctgttgtcggcgcacggagcgagcagtttcgctgagcgccaggcagtcggcaactgcctggcctgttgcagtaacgggcgccttcagcgcttggaggcggcgctcgcggtcaatctcggctggttaggctccgtaccctgttggcacagcgtctgcgcaccactcagcagataaggctgcagtatcggcgccatgcccttgagtacctgcaccggcagcgccgaagtgaagcggaagctgtcggccccctgccccggcacataagcggtcagggtgccgaagtggttcggcccgaggtagaagacgaacgtggcggtccggttcagcgccagcgagctgatcagccgccccccggcgcccacggtctggatacggttgtcgccggttccggtcttgccgccgaccttcagcggctcgccgctggcctgcaggaagctgccgttcagacgacgcgccgtcccgccttccactaccgtggccagcgcctggcgcaacgcggcggccacctccggatgcagcacccgaacaccggcgtcaggccggatccccaagcgcgtctcatagggtgtggcattggcgaaatgcaggctgtcgatgcgtacgctgggcaggcgaataccatcgttgacgatgatgcccatcagctcggccaaggccgcaggacgatctcccgaactgcccaacgcggtggccagcgacggcaccaggtgatcgaagggataacccaggcgctgccatcgtctatgaatatcggtgaaggcctcgacttcgagcatgatgcgaatacggctgtcgcgggcactcttgtaccggctgcggaacagccagccgtagacttcctggcgttcggcggtgctcgcgtcgatcacctcggagataccggcgtccgggtgcttgatcagatagcccagcagccagagatccagcgggtgaacccgggcgatgtagccctggtcgggcaggctgtagctgcccggcgagtatcgggtgtagagcgcgtccaggtccttttcgctgagatcgctgccggccaggcgcgtggtcagaaagcggtcgaacgtggcgcgatcggcctccggcaccaaatagcgatgcacggcggccaaccgccgcggcgtcggccgcatgccgtccagcaacgcttcgatacgttcatcggcactcttgccgcggtatttcttccagaaccgctgaatgaacaccgacccttcgcgatcggcaaaccgccgcaggtattcgcggcgctccgggttgtcatcgcttttcagcaactcggcgccgttggaggtctggtaggtgctgtaactcaccaggtcgcgcatcagcctcacgaacggcaggttgatcgactcctgcaaggcctcgcgcatggttggcaggcggccgtcgtcctgatggcgaaaattgccgaaatggtgcatgccggcacccgtgaagaagcgctcgttggggttcgccgaatagcgccgttccaacgccgcgtcgagcatgtccggaagattgcgatcgtcatgctggatcaggtagcccaacgcccagcgcgtcagcgggtcgactgcctcggccttgcgcagcgtggcgacatcgctctgcgcgtaacggtcgtgcagttcggcgatgatctccaggtaggtggtcagcacgcgcagtttggcggtggaacccagctccagcttgctgccttcgttgatatcgaagggctggttggtgttgtcggtctgtacccgcacgcggaaaccctgctcgccacgctcgaacagcgtgaagctgtagcgcacgtcgccagtgcgctcgggcgacagcatgcgctcgccgaacaacccgacctggccggcaaagtccggctcagccagacgatgcaggtactcggtgacctgggattgcagctcgccatgtaacggcgtggtggccgccagatcgagccggtcgagctggtacaacgagacgccgagcaaactgctcagacgcatgcgcgccgcggtgatgcccttgctcgacggcacctcacgaatccccggctcgctgcgcagatcgcggaatgtcaccttctgttgcagtgccgcgttgcgcagccgcgtgccgatcacaccaccgttggccagcaggcggatatggctgtcggtcaactcggccatgtcggcgcgccccgcgcccaggtagtaggacggccgacgttgggcgatcagcagcgaaagtacctggcgcaacgccagcccctgcgcctcgtacgggacgtcggcgttgcgccgggtgtcgagcgcgcggttgacctcggcgaagtcggcgccgaaccacaggcgcaggccgtcggcgattccgtgcacttcgccatggccgtacgcagccgacagcggcacgctgttgaggtagtcccgcacgatccgcttgcgcgttgtcagtgtctggcggccctcacgataagtacgcacgctcgctgacaccatctgccggatcttctcttcggcacttcccgtgcggccctctggagagtgccggtacttctccacctgagtcgccagcgtgctgccgccggcagcctgcaccggtagccccagctgtttctccacctggctgatcgcggccatggtgaaacgcggccaatccaccgccgggttggcgccggggcggtcggcgttgagcaagccgcggtcttcgatgaacagcaggctcatcgcgatgatcggcggaacgtcatcgaacgactcgtagtactggtgcggataactgttggcgtatagcggttccccacggcaatcgtcgatggtcaggccggcctgggacttctccgggtagggcacgaaaaagccgtggctgacgtaacgctgcagcgccggtgagaatcgtacttgctgctggatatcgaacccacgctcggtcagccgctcgatgaaggtcggcaaggcggcgtagcccagtcggcggtcgaagggcccggcttcggggaactgaatgctgctactggcaccggtctcgagctggaaatcgagcttctgcgcgtagcggctcagccatagcgcctgcagcttggaggtgtgcatctcatgccaggcggcataaccaccgccggccagtagagaaacactcagcaacacgcccatgcggcgcgccagacggctgccgtgtgtgggtggtctaccgggtttgctggagggggacacgcgtttgctgtcacccgcccgggatgaatcggtctgccatactgcgcccatcttttctggcctggcttccttgggaaatcacaggcttaagcttagcgggtggcacttcgttaagcctgcccgaacggacgaacggagaggctcgatacgccgttcggcagcgccctgccaaatgcgccgcgaccgtctagctcactcgatccagcgcgggtagaagccgagccgtgactgcagtcgactgtcctgcatttgcagcacgtcgaccggcagcggcggtgggtttcgtgcggcatccgcggcgtcccctcggaagaagaaacggcgtccatcgtccagcctcagaaacagccccagcgcaccgtgccccggcagtttcaccatcaccatccggccgtcgccaaacaggtcgaggctctcctcgaagccgtagaacaggcggcgttcgaagcgcagcggttgccatttgacaccatgggcgaactgcaccggcaggacggccggaggcttagccgtatgggcgtagtcaatgctctcctggctggccagtaccggcagatcggcaaaatccaccaatccggaggcatactcccaacgggcacaccccagcaccactcggtcgatgcccagatcatcgctcagttgatcgcgcgccggccgcacggctgtgtagcgcttggttcgccaggggatttcgctgtccagctgcgcatcgatctggcgccccagcccggtaccgaacagcagccggctgccgcggtgctcgatcagcaccgcgatatggttgaccgtgggcggctcgacccagtctccatcgcgccaggcgaattcgccgctggactcggtctgtcccgtgcgaatcagactgaaacgcagctccgccgcctgcgcgcttgccaccagcataccgagcaacaacccgatcaaactcatgcgacgcatgattcacactcctgttccaggctggaacggtgacggagtcgtacccgaagtagcgtattgctccggccagatcagctcgtccggcgacttttgaagcaggtcaccgctggcgaaaccagcgaacagcagcccgcagcggggttcacggaccgggctgccgaacatcgatgcatgcggctgcccctcgccgtccgccacagcgaccagcaatgccggcaacggtgcaaaagcctcgcaatgttgctcgggcatgaacgcgcggatcatgtgagtgccgatctgcttcgccgtgccgcgggcgccggcgcggctttgaaggcactgctcgccggcatgcaaggggctgctcatgggtggcctcctattccaggccaggcatggcgaggtaaccgggcagttcgcggatgcgcgagcaccacgcgcgtacagctgggtaccgtgccaggtcgataccgccttcgccggccaatcccgcgtaggggtaaaccgcgatgtcggcgatcgtcggagtggacgttccggccagccaggtgtgttcggccaggcgctgctcgagcaattgcatcgcggccagcgctcggctcgatgtcagcgcttcgtcgatcggccggccgaacaagcgcgctacgcgcgccgtggccggaccatgatgcatttcgttggcggcgaagctcagccagccaaccacactcgcctgggtgatggcatcgagcggaaaccaggcctcatcggcgtagcgccgcgccaggtagacgaggatggcttgcgagtccgccacccggatatctccatcctccaggaccggcacttgtccgcgcgggttgaggctgagaaacggcggctgcttgtgctcgcctttcaacagatctaccgggaccagttcgaccggctggccgatcaggccgagaaacaggcgcgccttgtaacagttgccggaaagggtcaggtcgtagagtttcatcgtgtcgctccgtgaaagatgggtgggtgtaccgaggcacgcctagataatagacagacctgtctgtacacttcaagcaccactttcgccgagacgcgattggagggaacgaaatcgctcccgcataatggccgtcgaaggagaactacatggctacgaacaagcgcgacctgctactcgggactgccgagcggctgttctacacagagggctaccacgccactggcatcgatcggattctcagcgaatccggcgtggccaagatgacgctgtacaagcacttcaaatcgaaggaagagctgattctcgccgtgctggatgcccgtcaacagccgatgctggcaagattgcgcgcagcgcgcgaaaagctgccgccccgcaaggcattgctggggatcttcgacggcttgaacgagatgattcacagcccgaacgcgttctgcggttgcctgttcatcaatgccgcggccgaataccatgaccgcgaccatccgatccatcagcgctcggccgcgtacaaggggcaattccagacgcatctacgcgagctgctggaagcgctcgatgtagcgcagccggagcagctggcacggcagctgcaatttctcatcgagggcgcgctgagcatggcgcacatcgaagggcctggcgatcaggcgttgctggccaaagcggcagccgagcaattgttacaagccgccggcgtctaggcgccggcggcataccacgtcagcgcgcttccttgacccggaaccaggcggcatagagcgccggcaggaacagcagcgtaagcgccgtggcaacgatcagcccacccatgatggccaccgccatcggcccgaagaagacgctgcgcgacagcggaatcatcgccagcaccgaagccagggccgtgagcacgatgggccggaaacggcggaccgtggcgtcgatgatggcattgaagcgatcctgtccggcagcgatatcctgctcgatctgatccaccagaatcaccgaatttcgcatgatcatcccggacaacgcgatggtgccgagcatggcgacgaaaccgaacggcttgccgagcaacagcaggaacagcgcaacgccgatcagccccagcggagcggtgagaaaaaccatcgccgaacgcgagaagctcttgagctgaagcatcagcaagctgaccacgacgatgacgaatagcggcatgccggcgttcaccgaggcctgtccgcgactggagtcctcgaccgtgccccccacttccagcagatagccaccgggcagcgcgctgcggatatccgcaagcgtcggctcgatctgcttcaccagcgaggcgggttgctcatcgccataaatatcggcccgcacggtcaccgtcggcaggcgattgcggtgccagatcacaccttcctcgaagccatactcgagggtggcgacctgagacagaggcacgctgcgcccgctggccgtaggaatcgccagactcggcaacatcgacagcgtctcacgttcacgcgaggtgccgcgcagcaggatctcgatcagctcattgtcctcacggaactgaccggcggtgaccccggtaaaggtgcgcctgaggaagttggacagctccaccgtgctcacacccagcgcccgtgcacggtcctggtccacattcagccagacgaccttgctcggctcctgccagtccaggtgcacgttggccacgtacgggttttcgcgcacctttgccgcgacttcacgggccagcttgcgcacgatatcgatgtgctcgcccgttacccggaactgcaccggataacccaccggcggtccgttttcgagccggctgacgcggcctcgcagcgtcgggaaatcctctcgcaaccgctcgatcaaccagctacgcagcgcttcgcgctgctcgatactgtcagccagcaccacgatctgggcaaagctggtggccggcaactgctgatccagtggcaggtagaagcgtggcgagccactgccaacgtaggcgacgtaattgtcgatgcccgcgcgcgccttgagcatgtcttcgaggcggtgcacctcggcttcggtggccttgagcgacgcaccctccgtcagcttcaggtccaccatcagctcaaggcggccggaggccggaaagaactgctgcggaacaatgcggaacagcccgaccgcgccgacgaaggccagcaacgtcagcacgatcaccgtcttgcgtcggcgtacgcaccagcgaatcacgcgtcgaacccgttgatagaaaggcgtcgagtaaggatcgtggccttgttcgttgccgccatgtttcagcgcatggcgcttggcaagatccggcagcaacttctcgcccagcagcgggacgaacatcaccgccgcgatccacgaggcgatcagggcaatggtcacgacctgaaagatcgagcgcgtgtattcgccggtactcgactgcgcggtcgcgatcggcagaaacccggccgcggtgatcagggtgccggtgagcatcgggaacgccgtactggtccaggcatagctggccgccttgagccggtcgaagccttgctccatcttgatcgccatcatctccaccgcgatgatcgcgtcgtccaccatcagcccgagcgccagcaccagcgcgcccagcgagattttgtgcaggccgatatcgaggtaatgcatggtcgcgaaggtcatcgccagcaccagcggaatcgacagcgcgacaaccaggccggtacgcacgccgagcgagaagaagctcaccagcaacacgatcgccaacgcctcgaccagcacccgcacgaactcaccgacgctggtcttcacagcggccggctggtcggaaaccttgcgcagctccatgccggccggcaactcctgttgcagccgggagaactcgctttgcagcgcctctcccagcatcaggatgtcgcccccggccttcatcgacacggccagcccaatcgccggttcgcccatgaagcgcatgcgcggcgccggtggatcgttgaagccgcgatagacttccgccacgtcgccgatgcggaacgtgctgccggccacccgaatcgggaaatcgcggatttccttgaccgtctcgaagctgccggtcacccgcagccgaacgcgatcgctcggagtttccacgaaaccggcggacacgacggcgttctgcgcctccagcgcctgccgaaccgcttccagcggcaggcccagccccgccagcttgacgttggaaagctcgatccagatcttctcgtcctgcaggccgatcagctcgaccttgccgacattcttcacccgctgcagttgcagctgaatacggtcggcgtaatccttgagtatcgcgtagtcgaagccctggccagtcagcgcgtagatattgccgaaggtagtgccgaattcgtcgttgaagaacgggccctgaatgtccgcgggcaaggtatgacggatgtcgccgatcttcttgcggatctgataccagaggtcgggtatctgctccgaatgcatcgagtcgcgggccatgaaggtcacgttggactcgcctggccgcgagaaggaaacgatgcgctcgtactcgccggtttccatcagtttcttctcgatgcgctcggtgacctgccgggaaacttcctcggccgtggcgccgggccactgggtctggatcaccatggccttgaacgtgaaaggcgggtcctcactctggccgagcttgctgtacgacagcgcgccaacgacggccatcagtagcatcaggtagaggacgatctgccggttacccagcgcccaggcggagagattgaagcgcatagcgattactcctgcgccgccaggacgaccggacggttgtctcgatcgatggccctcaccggttggttgtcgtgaagcatctgcacgccggccagcactacccagtcatcggcctgcaagccgctgagaatgggcacccaggtttcaccgaaaggcccggtctcgacattgacccgctccagtgtcgcgtccggcttcacccgccagacgaaggcctcgccgcgctcggcggtcaccgccgaaagcggcacggccaacggcacctcgccgttgcgacgtatcgacaccaaggcgctctgccccagttctgcgggcacttgcgcgtcatcgaaggcgacacgtgccgagtaggtacgcgattgctggtcagctgccggcgacaactcgcgaatctgccctgggtactgcttgcccggctgcgaccagatttccaccgagaccttctgacccaccgagtggcgatccagtgcctgctccggcaggttgatcgccacctcacgctcgccgtcagccgccagcacgaatgccgtttgcccggcggcgactatctggccgacctcgatccgacgctgagcgatgacgccatcgctgggcgcccgaagaacggcgtagtcgacttgattgcgcgccacatcgaactcggagcgtgcctgttgcaagcgcgcctgggcggagcggtaggcgttttccgacgcatcgaactgcgaccggctgaccagttgccggtccatcagcgtcttgtagcgctgatgttcggcacgggcgacgcgcagattggcctcggcggcggcaacctgggcgcggatgccttcgagtcgtagctgcacgtcctgcggatcgagccgtgcaagcggttggtccttgcgcacgcgatcaccggtttcgaccagccgctcggcaaccttgcctgcgatccggaaggccagctcgggctcgtagcgagcgtgcacctcgcccggatagctttcgaaggcctcgcctgccggttggggctgaaccaccattaccggacgcgtcgagagttgctcaggttcgctatcgccacaaccggctagcagggcgaaaccaatggcaccgaggaagggcaaggcacgtcggatcacgtcggatctctctctgtcatacgtgggttctaatacttatactgcgcggtatagtaaaaataccgaactcaccagtctagtattaaaagcgcacatgacagccatccccaccgtaccctctggtccgggccgcccgaaggatcccgcgaagcgcgaggcgatcctcgcggccgcacagattctgttcctcagcaacggctacgaaggcagcagcatggacgccatcgccgcgcaagccggcgtctccaaactcaccttgtacagccacttcaaggacaaggaggcgctctttggcgaggcagtgaaaagcacctgcgaaacacgcctgcctcgcaagctgttcgtgatcgaggatggcagcgcgattagcgaggtgctgttgaatatcggtcaagccttccaggcgctggtcaacagcccggagtccgttgggctgcatcgcgtcatggtggctatggcaacgcagaatccggcactgtcacggatgtttttcgaggccggcccgcagcgcttgctggtggacctggagcgtctgctgatccaggccaaccagcgcggcatgctgcacgcaaacgagccaatgcgtgcagcagagcatttctgttcgctgatcaagggtgctgcgcattttcgtttgctgatcggatgtgcggagccgccaagctccgaggaggcggaccgccatgtgcaggactgcatcgacctgttcatgcgcgcctacggccctggcgaaaccaccgcgacctgagccgcagcggacgaggccggggcgacacccgccgctggcctacgacgggcgtccgcagcaagtggttcagtcgttgctcagcgcaccgatccggtggatggagagatccgccccgttgaactcatcttcctggctcagccggatgcctacgctccccttgagcaggccgtagaccagcaatcctcccgccagggcaatcagcacgccaagcgccgagccaaccagttggctgagcaggctgacgccgccaagaccgcccgctgcctgctgaccgaagatcccgcaagccaggccgccccagacaccacagaggccgtgcaatggccacaccccgagcacatcgtcgatcttccacttgttctgcgccgcggtgaaagtccagacaaacagggcgccagccatcacgccggtcaccagagcaccaaccggatgcatcacgtcggagccggcacacaccgccaccaaccccgccaacggtccgttgtgcagaaagcccggatcgttgcgcccgacgacccaggccgcggccgtaccgcccaccatggccatcagggagttgatcgccaccagcccgctgacgccctcgagcgtctgggcgctcatgacgttgaagccgaaccagccgacgatgaggatccacgaccccaacgccagaaacggaatgttcgaaggcgcgaatgccaccacccttccgtcgcggtagcggccgttgcgccgccccagcagcgtgaccgcgccaagcgccagccacccacccatgccatgcaccaccaccgatccggcgaagtcatggaacggggcaccgaaacgtgtttgcagccaggcttgcagaccgaaattgccgttccacatcaggccttcgaagaacggataaacgaaggcaacgatcagcagcgtcgcgcacagctgagggccgaaacgcgcgcgctcggcgatccctcccgagatgattgcgggtatcgccgcggcaaaggtcagcaaaaagaagaatttcaccagcgagtagccgttctcgacgaccaactggtcggccggatgcatgaaggtcaccccgtaggcgacccagtagccgatgaaaaagtacgccagtgtcgacacggcgaagtcagcaatgatcttcgacagcgcgttgacctggttcttcaggcgtaccgtaccgacttcgagaaaggcgaaccccgcgtgcatcgccagcaccatcaccgcgcccatcaggaggaacagcgtgttggcaccatgcaccaatacttctaccgcactactcggattttccattgactgctttcctgccgagtgaaacgcaccaaaacggccagcctcaccagatgcgcgcaccatgatgtgtcacgacccggttcgaggttcgccaccgttcaacgcgggtggtagtgcaggctcgtcgcccgtatctgcgattgccttctgtttcattggcttagcgcaaccacccagcggtacctatgcccagccgacgccccattcgagggcaaggccagcaccagcgcaccagacggctgcaaggtttgtaccagcgaaacggcatccgtgagccaagttggcgcaggcagcgccgagggtgcgcagtggccaaaggcgctgccacgtgagaacgagaggccgagctaggccgaacgggggctacagggcggaaaggatgcggtactcgtcctgcgccagttgatcggtcatgccgctgacgaagtcgagcagcaaccggcagcggtaatagaactcccaaagcggccagtcgggcgcgtcttcggcatgcgctctcatcgcctcgtcgtaggccttgatcaactggctgggtaaccgccgggccagcatctgcaggtagggttcgctgcgacacttgccctcggtcagcgcctggaaagtggccggggccacacgcagcaagggtgcataggcatcgagcaggcccttgagaatgcgataaccctgcaactgcagcgtctccacctcgcgatggcagaagacccgatccatcgcaacgtccttgaacgtctggacgatggcattgcacaggcttgcatcttcgagcaacgcccgatccagggtgccgtggtacaccgcctcgatgttctcgatgaactgctgggccgcgtgctgcaccagtgggtggaccaggttcacccgcagccagatgaagaactcgccgaccttgttgatcggctccttctgcgcacgcgattcggcataggccaccatgctgcggaagctgcgaccggtagccgcgatcggctcctccggcgagccatgctcggcgaacttggccagcagcagttgcgacagttgctcgatggtgaagatgcccttctctaccgaatcctcgatgtcggccagacaataggcgatgtcatctgccgcctccatgatgtatgcaaccggatggcgggtgccgggctgcaggtccagcgcggctcgcagatcgttgatgaaaggctcctcggacagatagaagcccggcttcttgtgcagataagcgcccggcgtccccttgacgggctttgccgcataggccgcacggacgtacttgagcaggccggccgtctgggtataggtcaggttcaatcgcaacagactgaccaccagccgaatcgcctgggcattgccttcgaactgcttgagatcggcgagcatgcgctggcgtagcgcggcatcgccctgcccaaccggtacggcaacgtcgaataaggactccaggttgtcgccgaaccactcgccgatggcgaattcaccaaaatggccgaatggcgggttgccgatgtcgtgcatcaggcaggtcatttccaccagactttccagcgcgccttccagcccgtcgagcccgaattcgctggccctggcgccgagctgcttgtacagcgtgcggacgatgaagcgcccggtttgctgcacctccagagaatgcgtcaggcggctacgaaccgcggcattgcgctccagcgggaacacctgcgtcttctgttgcaaacgacgcaccgctgccgagttgatgatgcgcccgcgatcgctttcgaattgatcgatgaccagcgccaggtcaccctcggatgccttcgatcccggctccgcacgaccatggcgccgctggcgggaaatcttgtccttgaaattgactggccggggcatgtgacgctctcgctggtgaaagtaccgcgagcctagcgcggcccgccggctttaccaagaccgccggacgcacgtcgagcccggtcgtttagaatccacgacccagccacgagcgaagccatatgaaccggtcagaatttcaccagcaaaatgccgaacgagcgactgccgacgcgcagcgcttgcttgcacaacggccggcactggggccgcgctggctggactgggtggccgccgagctgtatcgactcagcccgccggaatacgccgcgatggttcgccgcgagctggcccgcctcaacgaagattgaccgctcggcacgtctcggcagtcgaacgccggcgtgccgacgcagggtatcgagccgatttgtccggccgatggggagcgcagcagatgcatgaagaaacgaacaggcaatggccggttgaggggccttttctgcgcgagcaactgtcacgcctgcccggcaccgagaaatccaccggcatcgacaagcggctggcgctgcgacctgtcaggctcgattacgaaggtctgcgcggtgaccgggtggcggatagacgttttcacggcggcccggatcgcagcctctgtcactacccggcccaacactacaggcattggcgcagcctctatccgcacctgcagatcggccccggcgcgttcggcgagaacctctcaaccgaaggttttcacgagcatcaggtgtgtatcggcgaccgctttcgctggggcgaagcattgatcgaggtgagccagccgcgttcgccatgcatcaatctcgatcgtcgccatgatgcccgcggcctggcaggtcagctggccaggagcggcaggaccggctggctttaccgcaccctggaacccggcgaggtcgccatcggtgccccgctctgcctgatcgaccggccacatccgtccgtcagcgtcgcgcatgtctggcgcagcttcatcgacgaaacgactgccgacagcgggctggcccagctcgtcgggctcgagccgctggcgctggaatatcgcaaacgcttccgccagcgcctggactcgaggcgccgtcagcaggatcagcaatcattgttctgaccgggtcccgccagatggccgtgccagtgcgcggaggcagttgagttcggtcgtcgaagcagccgatagcagcgtgaacaacgcgcgcgaggttaccgaccggtcagccggagccgcccgtgaaaacgcaaccggcagcgccgagttggcttgcctgggcaatgagccgcgcgtgctgaacaggcgcattagcgggggcgccgcgccgcaaaagcgtcgctatccaaccctgccaatcaggcgtagtctcgactcatcgcaatcccgatcatccagattccgatcatccacgctcagcgaggtaccgcagccacacagcagaccaccgcagggaggcacaactcagccactcaccgcgaggcgtcatcatgagcaagggtatggatacaaagaagaacgtgaaaaagaagccgctgaagaccgcacaggaaaagcgtgcggccaaacgggataaagccaacggaacgacctctctgctgggcacccacgctgctcgctgagcctgtcgtgaatcgccagcgccccgcccccgtgcggggcgttttgccgtcaggccggtgagccaccgaatgctgtacgcaagcgaccggccagccagcccccgcccacgttgacgatcagtcccagcatcaccagcagcgccccgacggcctgcaacaggcccagatgttcgtccagcaacaacgcagccgaggtcagcccgacaaccggcaccagtagcgagaacggcgccacggtattggctgggtaacgcgacagcagtcggctccacaatccgtagccaaggatggtcgccccgaacgccaggtacaccagcaccaagatcgagttcaggccaattccctgtagtgcacttgcgatcagctgcggcccttccagcagccaggacagaacgaagaacggaatcggcggtatcaggctgccccacacgaccagcccaaccagattcaccttgccaaccttgcgcgtgacaatgttgcccaacgcccacatcgacgccgcgcaaatggtcaacacgaagccggccagcgtcatgctgcgatcgccttgcagaccaatcagcaacagtccgccggctgcaatcaacagtccgatcagattggtcgcccgcaatcgctcaccgagcagcagcgctgcgaagaacagggtgaaaaacgcctgggattgcagcaccagcgaagccagcccggccggcatgccggccttcatcgcggagaacaggaacgcgaactgccccagcgagatggtcgtgccataggccagcaaccagcgcagcggcagttgcgggcgcttgatgaagaaaatggccggaaacgccgcaagcaggaagcgcaggcagccaagcagcatgggcgggatatcgtccagccccaccttgatgacgacgaagttcatgccccagacaatgatcacgaccaaggccagcaacaggtcctttggcgacatggctgtttctccgcaggcaaagaagccattaaagcccgcacccggcgttgccgcacacatacagcgagcgggcaaataggccatacagtcgaccactcgctcaggccgtgcctgtagcagcagcaacggctagaatcgacatccaacggtggacacacccaatcccgcatccgacacgagagtaaccatgggcgcacagtggaaagcgaaacataaggaagcggctgccaacgcgaagggacgcaccttcggcaagctgtcgaaggaaatcatgatcgccgctcgcagtggcgccgacccggacatgaaccctcgcctgcggctggtggttgaacaggccaagaaggcctcgatgcctcgcgagaccctggagcgcgccatcaagaaaggcgccggtctgctgggtgagagtgtcaactacgagcgcaccacctacgagggtttcgcgccgcaccaggtgccgctgatcgtcgagtgcttgaccgataacgtcaaccgcaccgtggcagagatacgggtgctgttccgcaaaggccagctcggcgcatccggctcggtggcctgggacttcgatcactgtggcctgatcgaagcgtcgccaaccgccgctgatgccgacccggaactggccgctatcgaagccggcgcacaggacttcgagccggccgaggacggcgcgacactgttcatcagtgacgtgacggacctggacacggtctgccgtgccctgcctgaacaggggtttgccgtgcagtcggcgcaactgggctatcgtccgaagaacccggtcaccaccctgaccgaggcgcaactcgaggaagtcgaggcgtttcttgcagctatcgacgcccacgacgacgtgcagaatgtctatgtcggcctggctggctgacagtccaactgtcgcgtaagcgagtcagaacgaggcaagccgatgagcaacaaaccaaacacgccctacgcccagcgcgagcagggctatcgcgaaaaggcgttgaagatgtacccctgggtctgcgggcgctgtgcccgggagttctcgggcaagcgattgagcgagctgacggtccatcacaaggaccacaaccacgataacaacccggaagacggctccaattgggagctgctgtgcctgtattgccacgataacgaacacgcgcgctataccgacaaccagtactatgccgaagccaagcctggcagcgatctgggtccgaaagaaaccttcaaggccttcgccaacctgggtgacctgctcaagggcaagcaggactgacccaggccggcgaggcggtgccggttacttcaccagcagtaccggtaccgagacctcgtgcacgacacggttggcgaccgaccccatcagcatgccgctaaaactgcccatgccgcgggtgcccatcaccacggtgtcgcaacccaggcgctgaaccgcatcgttcacctgctgggccacgttgcccaggatggcgtgggtctcgtgcgcaatgccggccgtctgcagcgccgtagcggcttctgccagggtgcgtttggatttttcgagaaagctcctgttcagttcctcgaccgtgtccgaggtgacgaattcgccatagagtacgggctcctgctgcacattgagcacgtgcacctgaggcggtttcggcgcttcggcggcaaaatcgatgatgtactgaagggctcgtttggcgttgtccgaaccgtcataagctagaagaatgttgcgcattgcgggcctccatcgactgttgaatacagcatagaccaacgcccttccaagccggtgtgccaggatccgatccattgccctggatcaatttcgcgccacggctatttcactgcgaaccaaggcacagccatgcaaccattgcacccagttccgttcggcgtcggtgacgcttcctatcaggccgccggcggtgaagccggcatcgagcggctggttgccgacttctatcgaatcatggacgagaccgaaagcgccgcctgtgtgcggcgcctctacccggcgcagctggatgagccacgcgcgcggctggcggcatttctctgtggctggctaggcgggccgcgtcgttacgcagaacggtacggcagcatcagcatcccgcagttccatacccgctggatgatcgcagaagccgagcgcgacgcctggctcgagtgcatggctcgcgccatcgaccggcaaccttacacaccagcgttcgccagctacctgctgacgcagctgcgggtgccggcagagcgcattatccaggcgggccgaccgggctgcccggtgtctcgctgatcccctgcgatcgtggcctgcacgcaatagtcgaaccctgagccggccgctgcgtcatacccagtgcagggtcacgatgcgcgtcctgcgctaatcggatgacgaacagcgccgccaggtaatgacatgaagatccgcttcgcttcggtcaacgaacacaagatccgcgatgccgctgaatttctcggacacagcggtatcgagatcatcccgtttccggtgcgcatcgtcgaaacgcaaaccgaagatctcggccaactgatccacgacaagctcctcgatgccttcaagctgatcggcaagccggtattcgtcgagcactccggtctgttcatcaacagcctgaacggctttcccggtgggcttacgcagacgttctgggatcggctgcatgcggtgcgtttctccgaactgatcggcaacctggacgatccctcagcggtggcacgcacgctgatcgggtactgcgacggacgcaagcggcacgtgttcaagggcgaagtgaccggcaggatttcccgcgagccggcaggtaacgagggtttcgaatgggacaacgtcttcatccctgacggctacgcctgcaccttcgcccagttgggcggcgtgcataacgacctgtccatgcgccgacgagcgctggaagcattcgtcgctcatctgcgcgcggtctgagagaggtactcgatgcagaagctcctggaggcgtaccggcataaccgcctgatactttttgttggctcaggcgtatcggccaatatcgggctgccaccctggcgcaacctgatcgatgaaatcgcgctgcagctcgattacgaccccgacgtcttcgacacctacggaaacttcctttcgctcgccgagtactaccgcatcaaaaaaggcaatatcggccccctgcgcagttggatggatcgcgagtggcacaagaacatcgaaatccgcgactcggagatccaccggctgatcgtgcagggccgattccctgccatctacacaaccaactacgaccgctggctggaaaatgcccatgacgctcacggcgtcagctatatcaagatcgccaatgcaggcgatctggtaaaggcgcgcgacggagtcagacagatcgtcaagttccatggcgacttcgacgatgacgcatcgatcgtgctggatgaaacgagctattacgagcggctgcaattcgaaacgccgctcgatatcaaattgcgcgccgacaccctgagcaaagccgttctgtttatcggctatagcctctccgataccaacatccgactgctgttctacaaactctcgaagatgtggaacgaacacgagaccttaggtgttcggccaatatcctacgtgttttcgcacaaacccaaccctgtgcaggaagagatactcagccaatggggaatacgaatgatcacatcggaagatgacgaaccgggacttgctctgcagaacttcctgaaagaactggtagaaggctgagcgccagccgagcacgacgcgatgcaaacaaacgaaacgatataggaaccgaagaagagcgcaacaggcgggaagtgcgatgccgcttaaggcatcgcactcgttgcgtctcaatagttgtagccgatacccacgctatagaagaaggcaccgtcatcgtagcgatcccgagcatcgctcccgctcttgaacaggaactgatattcagccatcgcggtaatgaaggttttgtcctgaacccagtatttgacgcccagttcaggcccacccatgaatgtctcgtccacctcttcgccatacagcccgccaaggctcacacccacgaatggacgcgccttgccactgccgaaatgatagtcgtagaacactcgggtagagccatcgaactggacgctctctccttccgaatcccgcgcgttgacggtttgccgaacgccccacatggaggactcgtccagataagtaccccaactaccttgtacggagaacactgtatcgtcgaagtccttgtcgctactgcccgcaccgctcaatgtaacttcgcgatcgcccgccaccggagcggcaactgcgaaggcgggaagcatggcggcaaccaggagggaagttttgaaaagtcggttcatgacaacacctcttgttcttactatggcgaaatacgcatcgacgctccacgcgctgcgtattactagtgacatgagcgaatcccgactgttcactttattttaagtacatcacccaagtagctggtttaaataactttttaattttttagccgtttcgttagttaactcacttcgatctttaaacttacgccaacgcaactaacgaaacggcgataaaggtacggaacattcgatcaggcggggtcggtttggctggccgtcacttcttcaggcaagcattcatcttccggatccgtatcgaagtctcgccccatgacgatgcgcaaccagaccggtatgagcacaagcccgacgccaaggcatagccagctgatcagcgcgcttccatccggcggtgggaacatcaagcggcccacacccaccagcaacgagaacagcgaaacagccgtgaccgtcactgcaaacagacgcttgcccaacgctctgatcgacacgctcgcactgaccccattgagcatcgcggcatgccgccagaaaccgaaggggcgcacccgatggtagaaacgcttgagcgtcgcatcgtccgtcgcaggcgttatgaaggtgaccaggatggcggcggtcgtggtggtcaacgccatgatgcccaggcgtatccactcctgctcgggatcggtgcccaggtaatagagcagcaacggcgccgtgatcagcgagacggccatcgcggtcagctccgaatacagattgatccgctcccagagccaccgcagcaccagcaccgaacccatgccggcgccgaacagcaaggaaatgaaccacgccgtctggatcgatcccaggttggccatgatgatcatcgcaatcaccagtatcagcacgttggacaggcgcgccacgaccaccagctcgcgatctcttggcttgcgcttgagcacgtgcggcgcgaaaacaccgccatacacgtcgttgctccagtaggacgcgccccaattgagatgcgtatcgaccgtcgaggccagcgccgcgagcaagccgaccagcatcaggccgcggacacccggcggtagtaggtcctcgatcccctggacgaacaacgcctcgcgccccgccgcgaagccatcgccggccatttcggcgggtgtgaacggatagagcaccagcagcccgacggcaatggccatccagaacaggctacgcaggaaaatctgcagccaggtgaacaccaaccccgcgatacgagcgtcccggtcagtcggacaggccatgcttcgctgcgccagatagccggtaccgtcggagttcatctgaaagaaccactgcaacccgacgatcaccagaaatggcatcaacgcctcgccggcattagatggtggagcgaacgacagcatcttgccggcctggtcggcgccatagagatcgacgatgcgatccgtcaagcctcccagcccgccagcggcatcgacgacgaaccaggcgtaaagcaaggttccgatcatcgccaggctgaactgcacgacgtccgtttgcaccacggcacgaagcccgccggtgatcgagtacatcgcggtaaacgcgagtatgagcagaatcgatatgaggttattggcgctcatcatcgccggatccagcccggtgatgctttcgcccagctggatgccgctgctgctgatgaacgcaacgatgggatcgtacaagcccgccggtagccagagatgccacggcagaaacacctcggcaatacgaacggcggccaccagcaccatggccagcaccacgcaattgatcaccgtcccgtagtagatggccttcagcaagcgcaaaggcgtaacgcctttgccgctgtaacgcacgcgggtcaactcggcatcggtcaacactccggctcggcgccagcctgcggcgaagacgaacgccatcagcaaaaacgcaagcccgtagatccagagtcgccacaacgcaaaaatgccggcggtggccaccaggccggtcaccagaagcggggtgtcggcggcgaactgggtcgcgcccatggagaagccggccttccatccctttatggttctgccggcgagaaagtattcgtcgagactctgagaggccttgccgcgtgcgcgcaggccggagccgagaccgtacaggatgaatgcggccacgatcagtagatccaacatattgttatgtcctttgttggaggggctgttgtgtttaagaacctgcgcaacggcgaaaaattgcagtcgtcggataaacggatggtgggcgcagtcgatgtcccggcgaggcctaccggcccggccaattcagccaaatcggttaccatgtccagcgccttcggggatgcccatgttcgactaccctctgcgtcagttgccgactgaatccagccccttgctcaagaagttctatcgcgcccatcgcagccacatgcgcgtgccggccaatgcgcgcggctgggtcgctgagcactccgggatcgtggcaggcttgtgcttgacgcccgtggagcacgggcattggttgacggggttgctggtggcgccgaagcagcgcaaccagggactagcacagcggctggtgaagcgcgcgctggccagctgcgatgggcctgtctggctgttctgtgagccaaagctgagcgggttctacatgcagctgggctttcatgagtcggcgcgattgcctgaatcactcgcctgccgcctgcaacgctacaaccgaaacaagaccttcctggcgttatgtcacgataactagagatcccatatgttcactcccattctgaaaattgctgcagcttgcctgttcgacgagagcggccgaatgctggtcgtacgtaagcgtggcagccacatcttcatgctgccgggcggaaagaccgaatcgaacgagacaccgctgcagacgctctgccgtgagctcgaagaggagatcggcctgagcatcgaggaatcacgtctgcagcccctggggcattttcaggcgcgcgcggccaacgagcccgaccactgggtagaggccgaagtgttcgttgggtatttgacagatgaagtagcgccgcaagcagaaatcgaggcgctggactgggtggagttgcatctatcgccaagcatcccgctcgcgccgctgctgcgcgagcggataatccccgcactgctcctgcgctcttcggcggaaggtgccgcgatcaggaccccaggttaaggagaaatgggatcgcttgcgggaaaggtttcttccaatgcttcgtccagctggtcttcgtcggcttggtccggactccgctcgatttgctcgtcctggtcctcggtcgggtgacccggttcactcggcgttgtgccattcatggtgaattcctctgattgggtatcagagcgttaggccgcctggcggagcagtcgttcgggcattccgtcgcaccatcaaattggaggcaaaaaaaaggggcggggttaaccccgcccgcctccttccctacttccctttatttcctgctcatcgtcctgatgaaccgcatcctgcggtggatcctgaccgatatccttttcggctgtgcttgtccttaagcacggagccgatattaaggctttggacgaccacggcaactcgaaaaaatccgcgatggccattggcttatatttttactacttgtaaatccgcttctttttcaatgagttacggaccaaaaatcgttgcaaagacgtcatcgtcagctttttttcaggctttgcttacacctcgtgtaagtaaatgcttacacgctagcgagctttttgggaaaaccgttacggcgggggggttaacccgtatgccgacggcatcggcacgacggggtcttgggaggcggccccatacctctacaggtaaagggccgtcgctcttagcggaaaagggattcgctggacaggccgttacgctcgagaatctcacgcaaccgcttgagcgcctccacctgaatctgccgaacccgctcgcgagtcaaacctatctcctgaccgacttcttccaacgtgcagctctcatggccgcgcaaaccgaaacgccggatgactacttcgcgctgcttttcggtcaggtcggacagccattggtcgatgctttcggaaagatcgtcatcgagcagcagatcgcaagggtcgctgggccggtcatcggtcagggtgtcgagcagggtcttgtccgtgtccggaccgagcgaaacatccacagaggtcactcgctcgttcagccccagcatccgcttgacttcggcaacgggcttttcgagcagattggcgatttcttccgggctaggctcatgatccagcttctgggtcagctcacgtgcggcacgcagatagacgttgagctccttgaccacgtgaatcggcaggcgaatggtgcgcgtctgattcatgatcgcccgctcgatggtctgccggatccaccaggttgcataagtggaaaagcggaagccacgctccgggtcgaatttctcgacggcgcgaatcagaccgagattgccttcctcgaccagatcgagcagggacagaccgcgattgacgtagcgtcgagcgatcttgaccaccagccgcaagttgctctcgatcatccgcttgcgccccgcagggtcacccttctgcgcaagacgcgcgaagtgcacttcctgttcaggggtcagcagaggcgaaaaaccaatctcgttgaggtaaagctgagtagcgtcgagcgcgcgcgtgtagtcgatgaatttgtgttgcgttgcggtctttgacttggtgccaaccgaaccggcacgggagatctcggtgatcggatctgcgtccgcggacggttccatgagtagaacggcatcgtctacgtcaaactccggcacttcttttttgagagccattattgttttcctgttctgagttcgacaacaggctcaggcggcgcactccttggcatcgctcaagcccatcctagtgccggaacaggttggctcagatcatcgctttggcaggtattgcagcgggtccacgggtttgccttggcggcgaatctcgaagtgcagcttcacccggtcggttccagtcgatcccatctcggcaatggtctgcccagctttgacttgttgcccctcctgcaccagcagcctacggttgtggccgtaggcacttacataggtatcgctgtgcttgatgatcacaagttcgccgtaaccccgtaaaccactgccggcgtacacaacagccccatcagaagcagctaaaacaggctgtcctaattccccggcgatatcaatgcctttattcaaactaccgtttgaggagaatcggccgatcacggtgccgcctgttggccaggcccaaccgcttgcggagcgagccactggctggaccttggtgctcgctacaggcggctttgctaccggttcgctgggcttcgtcaacggcggaggtatcggcaccgggttggtcaccaccgacggcctggcatcgggcgctggcgcggccggcggagtggccggacgagcggtcacggcacggggcgccttgccgctgaaacgaatcgtctgccccggatagatgacatgcggcggcgggatgttgttgaccctggccaagtcgcgccaatcccagccaaagcgaaaggcgatcgaccagagcgtatcgccacggcgaacgacgtagtggccgctgttcacccggtcacggctattgcggtcgaccacactgaccccaccggacggcgagctggcgcaacctgccagcaatgtccccgccagcatggcgataagcgcgcaccggactgacgaactgcgtatccaccgcatgctgcctatgagcttcaatgcccgccccctatgatcgacaagtcggttcagacgctttgcgcaactggctggccgcgcccggcgaaccactcgagcccaagcaccagcgctacaccggcgacggccagcaggatggccaacatgagctgtggatcctgtccggtcagatcgccataagtgcccggcaacagattctgctccagcagcggcacgcgcaggccatgcgagtcggtgcgccaggtcaacgtctctttccatggccagaccttgttcagcgaacccagcatcaatccggtgagcaacgccagggtcagatcgcgccagcggtgcaacacccagccgagcagccgcgcgaagctcagcagaccaatcaggcagcccgccgcaaaggtcaacatgatcgccatgtccagcgccttcacagcgccgagaatcacggggtacaacccaagcaacaccagaatgaagctgccggaaatacccggcagaatcatcgcgcaaatggcaatcgctccagcgaagaatatgctgatcccgcttgttccccactgcactggcgaggcaacggtgatccagtaggcgaagccgatgcccagacagaggcttagcaagcgagacagactgcggcgctgtatttccttgccgaccaaatgcaccgacaccaggatcaggccgaagaagaacgaccacaccggaatcggatgatgttcgagcagataagtgatcagcttcgccaagctgaacacactcgtcaggatgccggcgaacagaaccaggagaaaggttgcgttggcggtacgccaggcctcggcgacgcgacccttgagcagcggcgcaacggcattcggcacggaagcgatggaacccagcagctcgtcgtagataccagtaatgaacgcaacggtgccacctgaaacgcccggcacgacatctgccgcgcccatggccatgcccttggcgtacaacaacaacgcgtttttcatgcttccttccgctgagatcaaactacaggtccattgagcagcggcacgaagcgcacggtatccagcaggtggcgggaaaaaccgtcttcctctcgaacgatcagcatcagttgctggacttcaccaacccccaccggaatcaccagccgcccaccgggagccagttgatcgagcagggcctgtggcacgtcggctgccgccgcggtaacgatgatgccattgtagggagccaatgcaggccacccttcccagccatcaccccagcgaaagaccacattgcgcaacttgagttcgaccaggcgctctttcgccttgtcctgcaatgcctgaatgcgctctaccgaaaatacccgctcgaccagttgcgccagcaccgcagtctgataaccggagccggtgccgatttccagcaccttgtccagcggaccgtcggcgagcagcaattcgctcatgcgcgcgaccatgaacggttgcgagatggtctggttatgaccgatcggcagcgcggtgtcttcgtaggcccgatgggacagggcctcatcgacgaacagatggcgtggggtgcgtcggatgacctcgagcactcgcgggtccgagaggccttcctcgtagagccgctgaatcaaacgatcacgggtccgctgcgaggtcatgccggtgccatgccgcagcagatcgtcttgtccgcgatgattcacaacacatcctccaaccagtgatcgagccccttgaatgcttcgtggaacgtccgatcgagttgcagcggggtgatcgacacataaccctgcatcacggcatgaaaatcggttcccggcccgccgtcctcgacgtcgccggcgaccgagatccagtagccgtccttgccgcgcgggttggcctgcttcaccggcggcttggcacgccgacggtggccgagacgggtcagctggataccgcgaatgtggtcgagaggcaggttggggatgttgacgctgaggacggttcgcggcggcagatcaagcgtctgctgtcgctcgacgagcttgcgtgcgatataagctgccgtcggcaggttgtcggtcagccgcgacaccagcgagaacgcgaacgccggcttgccggtgaagcgaccctcgatggcggcggccaccgtgccggaatagagcacgtcgtcacccaggttcgcgcccaggttgatccctgataccaccatgtccggcgtctcttcgagcaggccgttgatgcccaggtggacgcaatcggtcggtgtaccgttcacgccgatgaaaccgttcggcatggtggtgggatgcagcgggcgatccagggtcagcgcactgctggcgccgctcatgtcctgaatgggggcaactaccttgcactcggcataatccgccagcgcgtcataaagcgcggcgagcccaggtgcatacaccccgtcgtcgttggcgatcagaatacgcatcagatgtccgtctgccctgccaggctgaccagttcacgtaccacagcggtggcaaagcacccggtcggcaggacgaattcaagttgcagaatgtcaggctcgggataatgccatgacaagccgccaatggggaggcgaagaatgcgccgttcatgcttcattccggcttctgcgagccacttggcgattgacggctcggcagcgccgacggcggcctccagcgcctggacaccagccgttgccggcgactcgccagcgccccacagcggaccggtagaatgcaggtcaagcacggccaggcgaggatcgttgcactcggcctcgccggcgggaaagaagctgcggctatcggtaaatgccagcaggtcgccgacacaggcgcggttccagctgccggcggccacccgctcggccagtacccgattgaacagatagctgcgccctgctgacagcagccgcgagcgcaaattgcgttgcaccggtagttcctggcgctcggcatattcacgggcgccatggacgttgccgccttcgaagccgaatcgttgcaagccgaaataattgggcacgccgtcgcgcttgatccgttcgaggcgggtgtcgagctcggcgcgatcggcctgcaattcggtcagacgcaaggtgaagccgttcgccgaatgtgcaccacgttgcagcttgcgctggtggcgtccggccttgagaatcttcagcgtgtcgtcttcggccctggccagatcgggatcggccttgccgggcagatgcaggctgaaccactgacgggtcagcgcctgtcgatccttcaatccggcatagctgatgttgcgagccggtattccggcggcccgagccaaacgtcgagcggcctcctcggtattgagattgcgcttctcgacccacaaccagaggtgttcgccggtacccgacagtgggatatccagcacctcatcgacctgaaagtcttcggcgaccgccttgagcacggccgacccacaggcgcctccatgggcccgcgggccgagcagctggtcttcggtcatgcgctgaccagcaacgcgacggcatgcacggcgatgccttcttcgcgcccggtgaagccgagcttctcggtggtggttgccttgacgttgacctgatccagttcgatgcgcagatcttctgcgatcaggccgcgcatcgactcgatatgcggcgccatctttggcgcctgcgcgacgatggtggcgtctacattggcgaccttccaccccttggcctggacctgctcgagcacatggcgcagcagcacacggctgtcggcgcccttgaatgccgggtcggtgtcggggaagtgcttgccgatatcgcccagcgcagcggcgccgagcagcgcgtcgctcagcgcatgcaacagcacgtcaccgtccgagtgcgccaggaggccgaatctgtgaggaatccgaacgccgccgagagtgacgaaatcgccttcgccgaagcgatgtacgtcatagccgtgaccgatacgcatagttgaccacccagaagaatccagccggggattctacaggacccggccagcggttgaagtcatcgcctgcccgcccggatcgacacgagcgataagcaccatcaaccggatcgattcggtatcgttttttaacgatatatagttcgccccatcgcgatataccgaacggaccacgacatgcccgacgacctcgacgacctcaccaaggcgatcgcccaccccctccggcgagaaatcctgcactggctgaaagagccggaacgctactttcccgagcagcatcactcgctggagaacggtgtctgtgccgggcagatcgaccaacgcgccgggctgtcgcaatccaccgtctcggcccatttggccaccttgcaacgcgccggactgatcaccaaccgcaaggtgggccaatggcatttcttcaaacgcaatgaaccggccatcgcggcctttctggctcgcctcgccgagcaactctgaatgttcaccgcccccgaacctgaaacaggagcagcatcgctatgcccacacttttcgatccgatcaagatcggcgacctggaactggccaatcgcgtcatcatggctccgctgacccgctgccgcgccgagcctggccgcgtacccggcgagctgattgccgagtactacgctcagcgcgccaacgccggtctgatcatcagcgaagccacttcggtcacgccgatgggcgtcggctatccggacacgcccggcatctggtcgtccgaacaggttcaaggctggaaacaggttaccgacgcggtacacgccaagggcggcaagatcgttctgcagctgtggcatgtcggccggatatccgacccgatctacctcgacggccaactgccggtcgctccgagcgcgatcaagcccgccgggcatgtcagcctggttcgcccgatgaaggatttcgagatgccgcgtgcgctggaaacggcggagattgcgggcatcgtcgaggcgtaccgcaagggcgccgaaaacgcccgcgaagccggcttcgacggcgtcgagatacacggtgccaacggctacctgctcgaccagttcctgcaggacagcaccaaccagcgcaccgatcagtacggcggttccctggaaaatcgtgctcggctgttgctggaagtgacggatgccgcagtcggcgtctggggtcctggccgggtcggcgttcatctggcgccgcgtgccgatgcccatgatatgggtgattccaaccgcgccgaaaccttcggctatgtcgctcgcgagctgggcaagcgcggcatcgccttcatctgcacccgcgagaaggccggtgaggacagcctgggcccacagctgaaggaaatcttcggcggtgtctacatcgccaacgaacgcttcaccaaagaacaggccaatgcctggctggacgaaggcaaggcagacgccgtcgcctttggcattccctatatcgccaacccggatctggttcagcgtctacgccaggatgccccgctcaacgaaccgcgtcccgagctgttctacgcacagggcgccgagggctacaccgattatccgtcgctctagctccttgcgatggaaaggcccgaccgggtaaccggccgggccttttttttggctcaggggtggcttggcaacgcgtggatgaggcttcgccgtcagccaccctacgccttcaacgcctgtgcatgatggcgcagatgatcatcgatgaagctggcgatgaagtagtaactgtgatcgtagccaggctggatgcgtagcgtcagcggatgctcggcagccttggcggccgcctcgagcgcctggggttttagctggctggtcatgaagtcatcgcggtcgccctgatcgaccagtatcggcagtttctcctgcgccttggcgacaagggcgcaggcgtcccactcgcgccagcgcgaacgatcgctgccaaggtagccgctgaacgccttttcgccccatgggcaatcagcaggattggtgatcggcgcgaatgcagacagcgactggtaacggcctggatttttcagggcgcagaccagcgcaccgtggccgcccatggagtggccgctgatgccgcgcttgtccgacaccggaaagttcgcctcgatcagcgcaggcagctcgtcgacgacatagtcgtacatgcggtagtgctgcgcccaaggtgcttcggtggcgttgagatagaagccggccccaagcccgaagtcataagcagcgtccgggtcatcgggcacgccagcaccacgcggactggtatccggcgcgacgatgatcaagccaagctctgccgccaaacgatgcgcacccgccttctgcatgaagttttcgtcggtgcaggtcaggccggacagccagtagagcacgggtagcttctcgccctgctcggcctggggcggcagatataccgcgaagatcatgtcgcaattcaaactggtcgaacggtgccgatagcgcttgtgccagccgccgaagcttttctggcaggaaatgttttcgagggtcatgaagactccttggctgcaggccacaagccgcagcctgcaggcaaagcgcgtctgacctgcagcctgaagcctgccgcctgaagccgtcagaaatgaataacggtgcgaatgctcttgccttcgtgcatcaggtcgaaggccttgttgatctcatccagccccatgttgtgagtgatgaaggtgtccagcgggatctcgcccttctgcgacttttcgacgtagcccggcagttcgctgcgccccttgacgccgccgaaggcgctgccgcgccagacgcggccggtcaccagctggaacggacgggtgctgatctcggcgccggccggcgccacgccgatgatggtcgactcgccccagcccttgtggcagcactccaaggccgcgcgcatcagttgcacgttgccgatgcactcgaagctgtagtcgacgccgccatcggtcatctcgacgatcacttcctgaatcggcttgtcgtggtccttcgggttgacgaagtcggtgatgcccagctcacgcgccacggcttccttggcagggttgatgtcgatgccgatgatgcgcgaagccttggccatcttggcgccgatgatcgccgccaggccgatgccaccgagaccgaagatggctaccgtagcgccctcttccaccttggcggtattgagcaccgcaccgataccggtggtgacaccgcagcccagcaggcagaccttgtccagcggcgcttccttcggaatcaccgccacggaaacctccggcagcacggtgtactcggaaaaggtcgaacagcccatgtagtggtacaccggctgcccctggtaggagaagcggctggtaccgtccggcatcaggcctttgccctgggttgcgcggaccgagctgcacaggttggtcttgttggatttgcagaatttgcactgaccgcattcggcggtgtagagcgggatcacatgatcgccgacagccaccgaagtcacgccttcgcccacggcctcgacgataccgccaccctcatgcccgaggatgcaggggaacacgccttccgaatcctgtccggacagggtataggcgtcggtatggcagacacctgaagcgacgattcgtaccagtacctcgcctgccttgggcggctcgacgtccacttcgacgatctgcaaaggttgatttggggcaaaggcaactgccgcacgggacttgatggtcatgaacgcttactcgcgagtggatgaagtgcgagcagtgtagtttgccctacctgaagggttaatacggcatttatggaaacattgttgccacacagggataatcccaaacatgcacccttccgatatgaggagtcgatggtgaatcgctgggaaggcctggacgaattcgtcgccgtggccgaatgcggtagcttcatgcgagctgccgagcagttgagggtttcttcctcgcatatcagccgacaagtcgcccgtctcgaggagcgcctgcaggcgcgcctgctctaccgcaccacgcggcgggtctcgctgaccgaagccggccacacctttctgagccgctgccaaaggctgatcgaggagcgcgacgaggcctttcatgcggtcagcgatctgcacgcggcgcctaccggcctgctgcgcatgacggcggcggtcgcatatggcgaacgcttcatcgtcccgctggtaaacgacttcatggctcagcatccacagctgcgggtcgaaatcgagttgtcgaaccgcaccctggatctggttcaggagggttacgatctggccatacgcctgggtcggctcagcgaatcgcggctggttgcgacgcgtatcgcgccacgtgccatgtatctgtgcgcggcgccggcctatctggaacgctacggacgaccgcataccctgtcggaactggcgcggcacaactgcctggtcggcacggccgatacctggatgcttcaggtggacggacgtgaacaccccttcagaccgaccggaaactggcgctgcaacagcggccaggcggttctcgatgcggcgctcaggggcttcggcctttgccagctgcctgactattacgtccaggaaccgctacgtcgtggcgaactggttgccttgctggaagccaaccagccgcctaacacggccgtctgggctgtctacccacagcgccgataccccttgccgaaggtccgcctgctggttcacgccctcaaggaaggtctggccaagcgtccggagtaccgcagccaacgcgactgagttgcgactgcaccgcatgtccgacgccagtggccaggcggaacccggcttaacccaccacgtctgaagttgtgaagccggcgcctccggccccctgcttgagcgagccggcgattcgatcaggaggacaacatgcagattctggtgaacagcaatcacagcgtcaacgtgaccagcagcctcgaggaacaggtcaaggcggcagtggaaagcgagctggagcgtttcgatgatcagctgacccgagtcgaagttcatctcaacgatgagaacagcggaaagagcggccctcaggataagcgctgccagatggaagcccgggtgaaaggccacgagcccatctcaaccagccacaaggcggactcgctgacacttgccatcgatggcgccgcggaaaaactccatcacgcgctggcccatgcgctggacaaactcaaccatcactgaaccgacctgaaccagaccgtcatctcatcagggaacgaaccatctgactacgagaggccgtgtatgaacagattgctcgatcgtgaaaccctttcccaattgctggccaaacgccaaggcccctgcctttcgctttatcaacctacgcaccgcagctttccggagcgccagcaggatccgatccgcttcaagcatctggtgcgccagctggaagactcgctcaagcagcaaggtcgtgccgaccaggccaagacgctactcaagcgattccatgcactgatcgacgacgtcgatttctggaacaccaaccgtgatgggctcgccgtgttcggtgccgccgattatttcgaggtgttccgcctgcagcgcagcgtgccggaactcgcggtcgccaacgatcgcatgcacctcaagccgttgcttcgtatcgcccagtctgccgatcgttatcagattcttgcgatcaccctcgactcggtccgcctgttcgaaggcaatcgtgacggcatcgacgaggtcccgctcgccgacggcgtaccgaagacgattgaagaagcgttgggtcgcgaactgaccgagaaaggccagacgggctttccccaaggctttagtcgcgccagtgagcgtggcgactcgatgcagatggagagcgggggtgccggccggcaggacgagatcgaccgcgatcgcgagcgcttcttccgcgaagtggaccgggcgatcctggagcaccacagccgcaagtcccggttgccgctcatccttgcagcgctcccggaacaccagtcccatttccgcaaactcagccacaacgagttcctgcttccagagggcatcgagagtgacgcatcgctgttgagccatgacgacctacgcgcgaagagctggatggtgatgcaaccacgctacatccagcgcctggagggcttcctcaaccagtacggggagtcgcacggacaaggcttggcaaccgatcaactggagcagataggccaggccacgatcgaaggacgtgttgcgaccttgctggtggaagccgaacggcagattccgggcgttgcggacaaggaacggggcaaggcattggccgtcgacgacgattcggccaccacgccggacctgctcgatgaactgaccatctggacgctggagcaaggcggcgaggtgatttcagtccccaccgaacgcatgccgactcaaagcggcgcggccgccatctaccgctactagccagaccggcgcacgccaggagggttgacgctctcctggctcaccgccagagcggagcgttatctgccatcagagccgccagcgctgttccagccactgcaaatcttccggccgcgttaccttgaggttgtcagcgcgtccctcgacaagcttcggcgaatgccccgcccactccagcgccgatgcttcgtcggtaatcgcaacgccagcggccaacgcttcggccagcgtctcgcataaggtaccgagccggaacatctgcggtgtgaacgcctgccatatcacgctgcgatcgaccgtctcctgaacacgcccgtcagggccagcccgcttgagcgtatcgcgagcaggcacagcgagcagcccgcccaccggatcatccgcgagctcggccagcagcctgtccaggtcctctcgcgccagattgggccgcgccgcgtcatgcaccagcacccaatcctccttctgtgcacccagctcgaacagccggcgcagcccggcgagcacagaatcggcgcgctcgcctcctccatccgcccgctgcacgcgcgggtcgttggcaacggaaagattcggccagtacggatcatcagcggccaggctgacgaccagaccctggagccggggatggtcgaggaaacggccgagggtatgttcgatgatcgtcataccagccagtggcaggtactgttttggtcgatcggcgcgcatgcgactacccaccccggcggcgggaatgacgacccagaaagacggaagcatgatcagatcactcggcgagctggtagagggtctcgccctccttgaccatgccaagctcatgacgggcacgctcctctacggtctccatgccccgcttgagctccttgacctccgcctcgaggatgcggtttcgctcgagcaagcgctggttctcgccctgctgttcagcgatctgcttgttcagcccgctgacctgggccaggctcccctcgcccacccataggcgatactgcaagccacccaacaacaggagcaagacgacgaacaaccagtagggactgcgcatggaggacatggaacgaattcgattggtttcggctaacgatgtataggcagcggacagaatcatgctcggccttccttggctaatgcgcctttgtacggcggaccttagcagtgctggccgccgaccacaaaaaagggcgactaacgccgcccctttctagcacgcccggtatcaaccacgaaactcggcacggcccttgtagggcgcttttccgccgagctgctcttcgatacgcagcagctggttgtacttggagacgcggtccgaacggcacagcgagccggtcttgatctggcctgcagccgtaccaacggccaggtcggcaatggtgtgatcctcggtctcgccggagcggtgggaaatcacagccgtgtagccagccgccttggccatctggatggcttccagggtctcggtcagcgagccgatctgattgaacttgatcaggatcgagttggcgatgcccttatcgatgccttccttgagaatcttggtgttggtcacgaacagatcgtcgccgaccagctgaaccttgctgccgatcttgtcggtcaggaccttccagccagcccagtcggactcgtccatgccgtcttcgatggagatgatcgggtaacgctccgacaggcccgccagatagtcggcaaagccggtcgcgtcgaaggccttgccttcaccggccaggtcgtacttgccgttctcgaagaactcgctggaggcgcaatcgagcgccagcgtgacatcgtcacccagcttgtagccggcgttggcaactgcttcggcgatcgcagccagtgcgtcttcgttggacgccaggttcggcgcgaaaccgccttcgtcacccacggaggtgctcaggccacgagccttcagcacggccttgagatgatggaagatctcggcgcccatgcgcagcgcatcggcgaaggtcttggcaccgaccggctgcaccatgaattcctggatgtcgacgttattgtcggcatgctcgccgccgttgatgatgttcatcatcggcaccggcatggagtactggccgggcgtaccgttgaggttggcgatgtgcgcgtacagcggcaggtcctgatcctgcgcagcggccttggcgttagccagcgacaccgcgagaatggcgttggcgcccagcgaagccttgttctcggtaccgtcgagttcgatcatggcgcggtcgagcgccttctggtccagcggatccttgcccagcagcagatcacggatcgggccattgatgttgctgacagctttcagcacacctttgcccatgtaacggctcttgtcgccatcgcgcagttccagcgcctcacgagaaccggtggacgcaccggacggcgcgcaagcgctgccgacgataccgttatccaggataacgtccgcttccacggtggggttgccacgggagtcgagaacctcacgccctttgatgtcgacgatctttgccattttttattaacactccgtagatagcttcaaggcttcaagcagtttcgattggcgaaaaattcttgatcaggtcatccagctgcttgagctgggtgaggaatggttcgagcttgtccagccgcaacgcacagggtccgtcgcacttggcgttttccggatccgggtgcgcttccaggaacaatccggcaagcccttggctgaggccagccttcgcgagatccgtgacctgagcacgacgaccgccggccgagtcggcacggccgcccggcatttgcagcgcgtgtgtgacatcgaagatcaccggatattccatccgcttcatgatgtcgaagccgagcatgtcgacgaccaggttgttgtagccgaacgacgaaccacgttcgcagaggattagctggtcgttgcccgcctcctcgaacttggtgaggatgtgcttcatttcctgcggcgcaaggaactgggctttcttgatgttgatgaccgcaccggtcttggccatggccaccaccagatcggtctggcgcgacagaaaggccggcagctggatgatgtcgcagacctcggccaccggctgcgcctggtacggctcgtgtacatcggtgatcaccggcacgccgaaggtcttcttcacctcctcgaagatgcgcatcccttcttccaggcccgggccgcggaacgagtggatcgaggagcgattggccttgtcgaagctggccttgaagatatacgggatgccgagcttctcggtgaccttgacgtaggtttcgcagatctgcagcgcgaggtcgcgggactcgagtacgttcatgccgccgaacagcacgaatggcttgtcgttggcgatctcgatgttgccgacgcggatggttttctgactcatgccttgcccgccttgtgatccagcgctgccttgacgaaaccgctgaacagcggatgcccgtcacgcggcgtcgaagtgaactcggggtggaactggcacgccacgaaccacggatgatccggcgcctcgaccacctcgaccagcgcgccgtcaccggagcgaccggtaattttcaggcccgcggcctgcagctgcggcagcaggttgttgttgacttcataacggtggcggtgccgctcgacgatgcgctccttgccatagcaggcgtacacgttggagcccgcctcgaggccgcattcctgcgcacccaggcgcatggtgccgcccagatcggacgcatcggtgcgggtttccacgttacccgtagcgtctgcccactcggtgatcagaccgacaacgggatggctgctgtccttgtcgaactcggtagagttggcatcggtccagcccagcacatcacgggcgaactcgatcaccgccacctgcatgcccaggcatatgcccaggtagggaatcttgttctcgcgcgcatatttgaccgtggcgatcttgccttccacgccgcgcaggccgaaaccgcccggaaccaggatcgcgtccatgccttccagcaggccggtgccctggttttcgatgtcttcggagtcgatataacgcaggttcaccttggtacggctctggatgccagcgtggctcattgcctcgatcagagatttgtatgcatccagaagttccatatacttgccgaccatggcgatggtgacttctttttccgggttcagcttggcatcgaccacgcggtcccattcggaaaggtcggcgccaccgcactccagcccgaagcgctcgacgacgaaatcgtccaggccctgcgcatgcagcacgccggggatcttgtagatggtgtcgacgtcttccaggctgatcaccgcgcgctcttcgacgttggtgaacagcgcgatcttgcggcgggaagatacatcgatcgggtggtcggaacggcataccagcacgtccggctgcaggccgatggagcgcagctccttgaccgagtgctgggtcggcttggtcttggtctcgccggcggtggcgatgtagggcaccagggtcaggtgcatcagcatggcgcgcttggcgccgacttcgacacgcagctggcggatcgcctcgaggaagggttgcgattcgatatcgccgacggttccgccgacttcaaccagcgcgacatcggcgtcgccggcacccttgatgatgcggcgcttgatctcgtcggtgatgtgcggaatgacctggatggtcgcgcccaggtagtcgccgcggcgctcgcggcgcagcacgtcttcgtagacacgcccggtggtgaagttgttggccttggtcatcgtcgtgcgaatgaaccgctcgtaatgccccaggtcgaggtcggtctcggcgccgtcgtgggtgacgaacacctcaccgtgctggaacgggctcatggtgcccggatcgacgttgatataagggtccagcttgagcatcgtgaccttcaggccccgcgcctccaggatggccgccaatgaagccgaggcgatgcctttccccaatgaagaaacaacaccacccgtgacgaagatgtagcgcgtcatgaaaaaccctagaagtctgcgttaagcggtcagcgccgccggggaaaagcgaaggtgccattgcgccagaggcggcaatagcggaactgccacggttttcgtagaaagccgcagaagctgtattgggacgggagcgtagtctacttgaaagaccccatcagctcaaacctggcgtcggccggcggcgcccagatcagtgacattgcctgggcattcaactgcggcaggtttgccacggcaatcagctggtcatcacgatagagcaatggcagacgcgcgcgcgcgaagcccggcaggcctgcctcgttcaacaaccgtttgagatcacggcggccgcggccgggcacgttcattgattcgccgcctcgacgataacgcacctgcagcggaccctcaccagcatgacattccaagcgcacacagccattgccaggcagatgcaatgggctatccggccgcagccagtcgactggccccgtcggggcaaccagccaggaaccggaaagccaccagatgcgcccgccccccctatgcagctcgccagcggccagccgccagacaggcgcggcatccgaagcggcgtcacgcaacgcatcccagccggcccaatgatcactgtcggggagagccgtccaattcgctagccaatgccgcagcgcatttcgctggcgtgcagggcttagcgtgctgagcgaagaaaggcacaggttcggtaccgatagccatggatggcggcccaccacctgggcctggcgcaagtcgatctcggccaggtcgttcagcagatgctgcgcctcactcaaatgcgtagcggcgcgcgccatgctgactgcagcccgcggccaacgctgtcgcaggagcggcatgacgttatgacgaagataattgcgcgcatgatcagtgcactgattacttggatcctcgacccaggccaacccgtgagcttgcgcataagcatggagctcggcacggtccacattcagcaatggccgaaccagccagccgctacccaatgcccgggtagcaggcataccggccaacccgcgcacaccggcgccgcgcaacaggcgaaagagcaaggtttcggcctgatcatcccgatgctgggcggtgagcagtacctcagcggggttcaaatgctcactgaacaccgcatagcgcgcctcccgggccgcacgctcgaggctcgggccaggcgcaaccttcacttgcgcgacctgtagcgttatccccaaccgctcgcagatctcccgacaatgggccggccaggcatcggccgccgattgcagcccatgatgaacatgaatcgcgctgatcgccggtagtcgctcgcgagtcgacaagcgcgctagcagatgcagcagtaccgtcgagtccagcccgccggaaaacgccacgagccaacgcggcgcggtacgccagggttgcagggcatcaaataggcgggactcgagagacatggatagccgtgttgcgagcactgggatatgggattacaggtgtcagcataaaccggaaccagacgccagcccgccgattgcaggcaccgccctgacgtgccgccgcgcttttgtgacgcgcacaaaaaacggcgggaggacccgccgtttttagcgacccgacgacgggtcaggcgataccgtagctcatcagacgctcatagcgacgggtaagcaaggcttcggtgtcgagccccttgagcatgtctagctgagcggtcagctcctcgcgcaaggaagcagcggtcgacgcaggattgcgatgagcgccgcccaaaggctcggaaatcaccttgtcgacgatacccaaatccttcaggcgctcggcggtgacgcccatggcctcggccgcttccggcgccttgtccgcggtacgccagagaatcgaggcgcagccttcgggcgagatcaccgcataggtggagtactgcagcatattcagctgatcgcagacaccgatggccagcgcaccgcccgaaccaccctcaccgataacggtggcgatgattggcgtcttcagacgcgccatcacgcgcaggttccaggcgatcgcctcgctctggttgcgctcctcggcgtcgatccccgggtaggcacccggcgtgtcgataaaggtcaggatcggcatcttgaagcgctcggccatttccatcaggcggcacgccttgcgatagccttccggacgcggcatgccgaagttgcggcgcaccttttcacggacctcacgccccttttgatgaccgatcaccatgaccggctcgccattcaggcgagccgtgccgcctacgatagcggcgtcatcggagaagtggcggtcaccatgcagctcttcgaactcggtgaagagatgactgatgtaatccagcgtgtaggggcgctgtgggtggcgggccaggcgggcgatctgccagctggtgagattgccgaagatgctctcggtgagcgactcgctcttgtcttgcaggcgggcaatctcgtcgccgatgttcagcgagttgtcattaccaaccaggcgcaattcttcgatcttggcttgaaggtcggcgatcggctgttcgaaatcgagaaaattcgggttcataggcatccgtcatgcgtcgacggccaggaggccgggaggctgttccgttttttgcgccctaccttacgggacggacgcattcaggtcgaacaaaatgttcgcaatcatgacccgatcaacgatcgggccggtcgggcggcactcggcctgcgagccagcatcggcgcgcagttccgctacgtcccgctatcggtattgcagaaagacgttgtcgcgaccgaactggtcacgcaatgcctgaatcaagttgtcggccgggtcgatccgccagctttcgccaaactgcagcaaggcccgcgcatcgttgctggtgtactccaatgtgatcgggcaggcgccgcggtggcgtccgcagacatcggccaaccagcgcacccgatcccctttcagtgcatcgccggcaaccttcactctcaggctctcggccagcccggtgcgcgcctcttccaggctcatcacccgcttggcccgcaggcgcaggccaccggaaaaatcgtcattgctgacttcgccctccaccacgaccagcgcgtcggtctgcagcaacgcctgcgcgctgttgaaggcttcggcgaagagtgacgcttcgattcgcccggaccggtcatccagggtaatgaagcccatcttgtcacccttcttgttcttcatcacgcgcaggttgacgatcagcccggcaatggtctgctcgccccgcgccggacgcagatcgatgatccgctggcgggcgaagcggcgcacttccccttcgtattcatcgatgggatgaccggtcaggtagaggccgagggtgtccttctcgcccttgaggcgttctttcagggacagctcgcgagccttgcgatgattggcgtatacgtccgcctccggctcggcgaacagcccgccgaacaggtccatgtgaccgctatcgagactgcgcgctgtctgttcggccgcctgaatcgcttcttccatcgccgagagcaacaccgcacggttgcgatcgatgttcgcctgataggccttgggttcatcggagaaatacggaccgagacgatccagcgcacccccgcggatcagcgcttccagcgtgcgcttgttgattcgcttgagatcgacgcgactgcagaagtcgaacaggtccttgaacggcccgccctcgttgcggcactcgcaaatggcctcgaccggcccctcaccgacccccttgatcgcacccaggccgtaaatgatccggccgtcctcgctgaccgtgaacttgaattcggaattgttcacatccggcgcatcgatgcgcagcttcatgctgcggcactcttcgatcagcgtgaccaccttgtcggtgttgtgcatatccgccgacaacacggctgccatgaacggcgaagggtgatgcgccttgagccaagccgtctgatacgagaccaggccataggcggccgagtgcgacttgttgaaaccgtagccagcgaatttttccaccaggtcgaagatgttgccggccaggtcggcgtcgatgccgttcttggcgcagccctcgatgaagccgccgcgttgcttggccatttcctcgggcttcttcttgcccatggcgcggcgcagcatgtccgcctggccgagggtgtaaccgcccatgacctgggcgatctgcatcacctgctcctgatacaggatgatgccgtaggtgggcgccagcaccggcttgaggccctcgtactggtagtccgaatgcgggtaggagatctccgcacgtccgtgcttacggttgatgaagtcgtccaccatgcccgactgcaaagggccgggacggaacagcgcaacgagtgcgatgaggtcttccaggcagtccggcttgagcttcttgatcagctccttcatgccgcgcgattcaagctgaaataccgcggtcgtctcggctttctgcagcaacgagtaggtcggcttgtcatccagcgggatgaagtcgatgttgaccggctcgagtcccttgcgcgcctgctcgcggttgatcgtctccagcgcccatttgatgatggtcagggtgcgcaggccgaggaagtcgaacttcaccagaccggcctgctcgacgtcgtccttgtcgaactgggtcaccaggctgccgccttcgtcgtcacaggcgatcggcgcgaaatcggtcagtttggtcggcgcgatgaccacgccaccggcgtgcttgccggtgccgcgggtgatgccttcgagcttgagcgccatgtcccagatttcccgcgcgtcttcatcgacggcgagaaaatcccggagtggctcttccatctcgtaggctttctcgagggtcatgccgacttcgaagggaatcatcttcgacagacgatccgccagaccgtaggacttgccctgcacccgcgccacgtcgcgcactaccgccttggccgccatggtgccgaaggtgatgatctggctgaccgcgttgcgaccgtacttctcggccacgtaatcgattacgcggtcgcggccgtccatgcagaagtcgacgtcgaagtcgggcatggaaacgcgctcggggttgaggaagcgctcgaacagcaggtcataggccagtggatcgagatcggtgatcttctgcacataggccaccagcgagccggcacccgagccccgtccaggccccaccggcacgccgttgttcttggcccactggatgaagtccataacgatcaggaagtaacccggaaagcccatctggatgatgatgtccagttcgaaattcagccggtcgatatagacctgcttcttcgcttcgtaatcgggcgtgtccttgggcagcagcacttcgaggcgctcctcgagaccgtcgaacgagaccttgcggaagtactcgtccatggtcatgccggccggcacggggaaatccggcaggaagtaggtgcccagctgcacttcgatgttgcagcgtcgagcgatctcgacggtgttctccagcgcctcgggcaggtcgctgaatagctcccacatttcctccggcgacttcaggtattgctggtccgaatagttgcgcggccgtcgtgagtcgtcgagggtccggctttccccgatacagacgcgcgtttcgtgggcctcgaaatcttcctgcttgaggaagcgcacgtcgttggtcgcgaccagcggtgcgttgcaacgctgcgccagcgcaacggcagtatgcaaatgctcttcgtcatttacccggctggtacgttgcacttcgaggtaaaaacgctgcgggaaggccgcctgccattcggcgagcagttcctcggccagtgcttcctcaccgtcgagcagcgcatgaccgatctccccttccttggcgccagacagtgcgatcagcccttcggcagcggtcttgacccagtctcgctcgatgatgatctgatcgttgcgctgcccctcggtccagccgcgcgaaaccagctcggtgagatttcggtaacccttgccgttcatggccagcagcgtcatccggctgagtgggccatcctcttcgcgactggccagccagatgtcggcgccgcagatcggcttgattccagcgccctgagcggctttgtagaacttgaccagcgagcacatgttgctctgatccgtaacggccaccgctggcatccccgcccctgcaaccgacttgaccaaaggtttgacgcgaaccaacccgtcgaccagggaatactcggtatgcaggcgaagatggacgaatgaaacaggcatgagcggaccttggactggcgaaacgacaagccggaaattgtaccggaaagcctgggtgatttagacggctggcaatcggttaccttgccagcgaagggtcggttcagacgggcagggcaaccgtggcgctgttggaatcggcaagaccgaccgcctccagcaggttacgaaccggggcgaacgagcgtcggtgaatgatggtcgggcccaagcgctgcaacgcctccaggtgatgcggcgtcgggtagcccttgtgggccgcgagcccgtaaccgggataacacaggtcaagcgcgcacatttcccggtcacggctgaccttggccagaatagaggcggctgcaatggccggcacctgcccatcaccctggattaccggcgcgctgggcacagcgagctggggacagcgattgccgtctatcagggccaaccgcggcgttacactcaagccttcgaccgcgcgctgcatcgccagcatggtggcatggaggatgttcagtcggtcgatttcatgcacctcggcgcgggcaatgcaccaggccagcgccttctcgcatatctcgtcgaacaaggcttcacgccgtgcctcggtgagcttcttcgaatcgttgagcccttcgatggggcgccgcggatcgagaattaccgcggctgtcactacgggaccgcacagcgggccacggccgacctcgtcgacaccggcgaccagctcttcgaccagattgaaatcaagccccatctgcatcagttcgccccgaccaattcgagcaccgcaccggcggcctgactcgatgcatcacaacgcagggttcgatggatggcatcgaacccctcggtctgtacgtcaccattatccagcagaggcgacagcaatcgagccatcgcgtccggcgttgccgcatcctgcagaagctccggcaccagaaggcgctgagcgagcagattgggcagcgccacatagggacttttcaccatgcgcttgagaatacggaaggtcagcggcgcgacgctataggccaccaccattgggcgcttgtacagcaaggcctcgagcgtcgctgttccggaggcgatcaatacggcgttgcacgcagccagcgccgcatgggattggccgtcgagcaaggtcaacggaagatctcgacccgccagtatctgctccagttgctcacgacgctcaggactggcgcatggcaccacgaagcggataccggggcgcatggaacgcaggcgttcggccgccgccaggaagagcgggccaaggcgccctacctcgccaccacggctaccgggcatcaacgcgacgaccagcccgtcctgcggcagtttcagctcggcacgcgccgcggccctatcaggtaccagcggaatggcgtcggccagcggatgcccaacgaagcgcaccgccacttggtgggcatcgtagaacttcgcttcgaagggaaacagcgtgagcatcaggtcgcaggcatcgcggatcttcaacacgcggttctgtcgccaggcccataccgaagggctgacataatgcacggtcttgatgccgttgcgcctcagcttgagcgccagatcaagattgaagtccggcgcatcgataccgatgaatacatcgggacgcacatcgagaaacgtcttgagcaaccgtttgcggcgcgccagcagttcaggcaaacggccgagcacctcgaccagccccattaccgccagccgctcgagcggaaaataggatcgcagcccttgagcttccatgcgaggcccaccgatgccgatgaatcggacgtcagggtggcgcgccttgagcgcctgcatcaagcccgccccaaggatatcgccggacgcctcgccggccaccagcgcgactgtcagtggcctggacatggtcagcgcgtaatcccgcggctggacgcttgcaccgaatcccggaacaacgcgacctcggggaacgcctgagcatcggcagccagcgccgccagcgcggcctcgacggtcagtcccttgcgatacacgatcttgtaggcgttgcgcagggccagaatggcttcatcgctgaagccgcgacgacgcatgccttcgaagttcatgctgcgtgcttcggccgggttgccgaatacggtgacaaaggctggaacatccttgccgatagcggtgcccatgcccgaaaagctgtacgcaccgatgtggcagtactgatgcaccagcgtgtacccggacagaatcgcccagtcgccaacgtgcacatgcccagccagcgcggtgttgttcaccagaatgcagtgattggcgatcacgctgtcatggccgatgtgggcataggccatgatcaggttatggtcaccgatggtggtttcgctgcgatcctgcaccgtcccgcgatggatggtcacgccttcgcggatcacattgtgatcgccgatcaccaggcgggttggctcgcccttgtatttcagatcgggcgtatcttcccccaccgaggaaaactggaagatccgattatgccgaccgatgcgggtcggtcctttgatgatcacgtgagatgcgatcaccgtaccctcgcctatctcgacatccgggccgatgatcgaccaagggccaacctggacgtcatccgccagtcgggccgcaggatcgacgatggcgcgagggtcgatcaaactcatatcttctgttccgcacaaatgatttcagcggagcataccggcttgccgtcgacactggcacggcagtcgaacttccagatgccgcgcttggcactgatgaacgacgcctcgagaatcagctgatcgcccggcacgacgggctggcggaagcgcagcttgtccgaaccgacgaagtagtagagcgtgccgtcggccggcttgacccccatcatcttgaagccaagcaggcctgccgcttgcgccatcgcctcgatgatcagcacgccaggcatgatcgggtgctgaggaaaatgcccattgaagaacggctcattgatcgtgacgttcttgaaggcgcgaacacgcttggcttccgtgtccaactccaccacccgatcgaccagcaggaagggatagcggtggggaaggtattcgcgaatttcgttgatatccatcatatggagaaaaagcccgttaggattgtgggagccagcacggcaagcagtcgtacaacccgctagcgaaagcctctagcaggggccatcagacgatagggtcaggcatcagaagacgtatccccgcctggggtcacgctagccagacgtttttccacttgctgcaggcgacgagccatgtcatcgagatgacgaatccgagcggcactcttgcgccactcggcggctggctgcatggccgttcccgaggaatagctcccgggttcggtgatcgaccgggtaaccatggtcatgccagtgatgaacacgttgtcacagatctcgatatgcccaacgagcccaacgccccccgcaatcatgcaattgcggccaatcttggtactgccggatatccccgtacagccagccatcgcggtgttgtcaccgatctggacgttgtgagcgatcatgatctgattatccagcttgacgccattaccgatcaccgtgtccgagatcgcaccacggtcgatagtggtattggcaccgatctcgacatcgtctccgatgcgcacaccaccgagctgggcgatcttctcccaactgccctgctcgttggcgaaaccgaatccctcaccgccgattaccgcacctggctgaatgaccactcgctcgccgatgatcacgtcatggcagagcgtcacccgagcagccagacggccacccgcgccaatacggctacgcgcacccactaccgattgagcaccgatttcgacccccggaccgatccaggcgtccgcctcgatcactacctgggcaccgatgcgcgcagaaggatcgatttcggctcgaggatcgacaatggcgctggggtggatgcccacgcccgtgactggccgcgtttcgaacagatgcgagagacgcgcataggccagatacggattcgggaccacgagcgcagcgcccgcatagccctcggcatccttcgctgtgagcaacacagcaccggccttggtcgtggcgagatactttcgatattgagcgttggccaggaagctcagttgttcagagccggcatcctgcaacgttgccagccccgacacctgcagcgaggcatcgcctcgcagttcggctccgagccgctcggccagggcgccgagcgtatacatgactccgctcatcaacgcagctggttcatgcgctcgatgacttggcgggtaatgtcatattgcggtttgacatccaccactgcgccgcgctcgagcaccaggtcgtaatcacctttcttgatgacttcttccaccgacttgtccagcttgggcttgagctgcttgagcatgtcgcgatcggctgcggccttggactcgttgagctccttggaaaggaactggaaatcccgtgccttctgcttgaattccagctcgagacgctcacgctcggcctgttgcatcttgtcgccgtccttgcccaggcggtcctggatgcgcttggcatcgctttccagacctttgagcttttccagttgcgggccgaacttcttctcggcatccaccgagtaacgcttggctgcgtccgattcgagcaaagccatctggtaattcatcaccgcgatcttcatttcggcgaacgcgggggttgccactagagctgcggcaacgacaagcaattgggtcaacttacgcacggtatacaccactcttcaggaatgcgctggagcgtcgctccaggggattaaaaggtttggcccagcgagaactggaagacctgggtatcggcgtcatccggcttcaccaccggcatcgccaggctgaaactcaagggccccatcgcagtgatccaggtcaggccgacgccaaccgagctggccatgtcgccaaaatcgatatcgctgcacttggtggaacccgacgggcaattggtatcgtagacgttaccgacatcccagaacaccgaggtacgcaaagaacgctggtccttgacgaaaggcatcgggaatagcagttccattcctccctggatcaatacgttaccaccgtagggcagcgcgtcctgatccggatcggcaatagttccctcgtttccggtcacgtcctcgccacggctcggcgtactgcgtggaccaaggctgctgtctttgaagccacgaaccgagttgaagccaccggcatagtagtgctcgtagaacggcaagcgcgacgttgagccataggcatcaccatagcccagctgagtgtgcaggcgcatggtgtaggtcttgctgaccggcacgaatagctgggcattgtagtcgagcttgtagaacgacagatcgctacccggaatggtggtttccagcgagaggctctgggaatgaccgcgagtagccagcacgcctcggttgagcgtcgattcggaccagcccaccgacgccttgaagttgaggtagctgtcgccctcctccttcatgaagtcgaagatctcgtcgaccgtgtaacgaccactgtcgatggtgtcctgctgggcagacagaccgaacgacagacgcgatgtctcgctgatcggatagccgatattgacgcccgcacccagactgtcgaccgagtagctggaaacatcgtaatcgagctcgtcgtagtcggtggtccggtagaaggcgttgtagccgaggctgacgccatcttcggtccagtaggggtcgacgaagccgaagttgtagcgcgactggtattcgctgcgggtcaaacctacgctgacgcggttgccggtacccaggaagttgttctggctgatcgagccgccgaggatgagaccggcgttctgcgcgaagccgatgctggccatgatcgaaccggacggctgctcttcgacgctgtagttcacgtcgatctggtcatcggtgccaggcacctgaggcgtttcgacgttgacttccttaaagaagcccaagcgctcgaggcgggttttggactgatcgatcagataggtcgaggcccagccgccttccatctgacgcatctcgcggcgcagcacttcgtcttcggtcttggtgttgccccggaagttgatccggttgacataggcacgcttgcccggatcgaccacaaaggtgatcgcgacggtatggtcctcgtcgttggtttccggcacgccgttgacgttggcgaaggtgtagccctcgttgcccaaccggcgagtgatcagttcggacgtggtggtcatcaccttgcgtgagaacacctgcccctctttcgccagcagcaaggtctgcagttcttcctgcggcaccttgagatcgccgctcagcttgacgtcgctgacggtgtagcggtcgccttcggcaatgttgaccgtgatatagacgtctttcttgtccggcgtgatggatacctgggtcgaggtgatatccatgttgatgtagccacggtccaggtaataggaacgcagacgctcgaggtcgccggagagcttctcccgcgcatacttgtcgtcgttgcggaagaacgacagccagttgctggtcttgagctcgaacagatcggtcaggtcctcctcggggaagaccgagttaccgaccacgttgatgtgcttgatagaggctaccgagccttcattgatattgatcttcagcgctacgcgatttcgtggctgtggcacgacctcggtttcaatcgtcgccgaataacgaccctgggcgacgtactgacgttgcagctcgttacgcaccccttcgagggtggcacgctggaaaatctcgccttcggcaaggccggactgctgcagaccggagagcaggtcctcggtcttgatggccttgttgccttcgatctcgataccggaaatagacggacgctcgaccacgttgatcaccagcacgtcgccttcacgaccgagctgaatgtcctcgaagaaaccggtgcggaacagtgcgcgggtagcgtcgaccaggcgactgtcatcggctgcctggccaacgttcagtggcaacgcgccaaagacgctaccggcagaaacgcgctgaagaccattgacgcgtatatcggagatggtgaaggactcggcgtgaacttcggcaatcatcagtgcggagataaccgcaggtagcagcagacgtttcatgaagtcctttcttttcaaacctgatcattgaacctgcgcttggcgcggcgacatcaaggtatatggcagttaaaggcggccaaggtcgttgaccagcgcaagcagcatcaccccaacaaccaggctgataccgatctgtactccccagccctggaccctgtccgacaacggacgtccacgaacccactcgaccagatagaagagtagatgcccaccatccaggacagggataggcaatagattgagtactccaaggctaatgctcaggtaggcgaggaagttgagaaagtcgcccgcgccggactgtgcagaagcgcccgccactttagcaatggttatcgggccgctcaagttttttaccgagagctcaccgaagagcattttcctcatggaatcgagcgtcagcacgctcatcgtccaggttcggcggaccgcttcgccaactgccccgaccggcccgaaattgacgttgcgcagcatctcttccggccattccccaccggcaaccccggcacccaggtagccgcggcgcgcctgcccttcgccccgctcggccaacgtcagaggcaactcgatgagctggccgttgcgttcgacctccaggcgaacggcctgaccacctagcggcctcacgcgatcgataacgtcctgccattctgtcaatggctcgccatcgagactgaccaggcgatcacccagggttacgccggccgcctgagcggggccgtccgggtccagttgggcaacgatcggagcgatttgcggacgccatggtctgatacccagcgagccgatcggatccggctcctcgactcccttcaaccagtcgctcagttccagacggatccgttgcgtctgatctccttccgcgcggcgcacctgcatttccagcgagccgctctcgccgagacgcctgatcaattgaagattgacatccgcccagccagtcgtcggcttgccgttgatctcgacgatctcctgaccggccatcagcccggctcgctcggccaggctccccggctcgacagcgcccaccaccgggcgcacctgctcggtgccgagcatcgccagaacccagaagaacaccagcgccagcaggaaattggccaacgggcccgcggatacgatggcgaaacgctgcttcacggtcttgcgattgaacgcctggcccaacagtgccggcggcacctcggcctcgcgctcatcgagcatcttcacgtagccgccgagaggaatagccgccaggacgaactcggtaccctgacggtcgtgccagcgaaacagcggtcggccgaaccctaccgagaaccgcaggactttcacgccgcagcgacgtgcgacccagaaatgcccatactcgtgaaaggtaaccagcacccccagcgccacgagggtgccgatgatcatgtacagcgcgcccatagtttcctctgcctcgaaaggcttatttagcagccaccgaacccggcgacttcttcgccacgcacgacctgctgaacgctaggctgcattagcgatcacggtcttgcaaccaacgcgcagccgctgttcgagcccgtgcatcggccgagagcacgtctgcgagacagcgagccggcaccgacgcctccagcgcgagaacgtcctcgatgatactcgcgatttcggtgaagcgaatgcgaccgctgaggaatgcatcaaccgccacttcgttcgcggcattgagcatcgccggtgccgtgccaccttcctgagcggcttgtcgggcaatgcgcaaacacggaaatctgttctcgtcgggcgcttcgaagtccagccgcccggtcttcagcaaatcaagcgccgatacgccagagtcgattcgctccggccaggccaatgcatgggcgatcggggtgcgcatgtctgggttgcccaactgggccaggaccgagccatcgacatagtcgaccatcgaatggatgacgctttgtggatggatgactacctcgacctggtctggacgcgcatcgaacaaccagcacgcctcgatcagctcgagccccttgttcatcatgctggctgaatccaccgatatcttgcgccccatggaccaattcggatgagcacaggcctggtcagccgtaacggcagccagctgatccaaggggagctggcggaagggaccaccggacgcagtgagcagaattcgccttacgccaatgccgctgagcccctgcgaatagttggtgggcaagcattgaaatatcgcgttgtgctcactgtcgattggcagcagcaccgcgtcgctgtcgcgtagcgcctgcatgaacaaggcgccggacatgaccagcgcctctttgttcgccagcaacactcgcttgctcgcctgaacggcagccagcgtcggtcgcagacccgcggcaccaacgatcgccgccatgaccacatcggcctcggggtgcgccgcaacctcgctcaacccgccctcacccaccaacacacgagtcttgattgagtcgctatcgagccggcgctgtagctcgcgcgccttgtcagtgtcacccaccacggcatagcggggacgatgccgacagcacaactggtgcagctcggcgacccgactgaacgccgtgagtgcgaatgcctggtaccgatcaggatgacgcgcaatgacgtccaaggtgctcagtccgatcgatcccgtcgcaccgaggaccgtcacttgcaaagggccgctcaccaggcaccccatccagccagccacaacagaacagtgaacaccggcaccgcggcggtcaggctgtcgatgcgatccatcacgccgccatggcccggaagcagctggctgctatccttgatgcccgagctgcgcttgaacatgctttcggtcagatcacccacgaccgagatcaccacgaccagcgccgcgccgagcagggccaacgccagctcccgcggcgaccagccgtgatacaaaccgacacacagggtgatcaacaagctggtgatcaggccgccaatcaggccttcccagcttttgcccggactgacccgcggcgccagcttgcggcgtccgaaggttttgccggaaaaataggcgccaatgtcggcggcccagaccagcaccatgaccgcgacgatcaaccagttgccttgcggccattgcttgagcaccaccaacgcctgccatgccggcaacagaatcaacgcaccgatcaccaggctgcctagcgatccgccccagtagcgctggctgtccggataaccgatcaccaacgccgtcgcggccaaccaccaaatcacgcttagcggaagcaaccaggcggtaagccccggcaaccgatacagcaccagcaccaacaaggcgatcagcaacgcatagccgactcgcgcaacctgattggcaaatcccgccagacgcgcccattcccaggccccgagaaccacaacgacgccaatgaaggctgcaaacgcgggcccctcgagaagaaagaagccgatcagcgcaatcggcagtagcactgccgcggtgatgatgcgttgtttcaacattctgctcggacctccgtctcgacctgatcgccggtcttgccgaaacgccgttgccgcttggcgaaatccgccagcgcggtgcgcatggcatcgtgcttgaaatccggccagaacaggtcggagaagtacagctcggcgtaggccagctgccacaacaggaaattgctgatgcgacgctcgccgccggtacgaatgcaaaggtccggcaccggcatgtcgcctgtcgccagatagctctggaaaagagccggcgaaaccttgtccggatccagcaggcccgcctgtgcttcacgcgccatgcgctgtgcggcctggaggatgtcccattggccgccgtagttcgccgccacttgaagcacgaagcggccccgcccggcagtcatctcttcggcttcgagcatcgccgcctgcaactctggatgaaagcgggagcggtcgccgatgatccgcaggctgatgccgttctcgttgagcttgcgcgcttcccgacgcaacgccgtcaggaacagctccatcagcgccccgacctcgtcggccggccgctgccagttctcgctggagaaggcgaacagcgtcagcacctcgacgcctgcctcggcgcagacttcaatgactgcgcgtaccgcgtcgacaccagccttgtgacccgcgacgcccggcaaaaggcgccgctttgcccaacgattgttgccatccatgataactgcgacatgacggggtacattccgcccggcagtccgcctgaccttttccatgaaacgactctacctgcgctcaatcacgctgcgaacaatgggagaaacagccaatggcagtttccggggatacggctgcataaccccttgcgccccgtccccagcaggatcggagcgctccgacgcgagcagtacggacgaggtccagtacagcaacgtcaaacagccatcaggtctgtttccttgccttcaagcgccttgtcgatttccgcaacgtacttgtcggtcagcttttgaacgtcatcctgagcgcgacgttcctcgtcttcgctgatttccttctctttgaccagatccttgagctgagcgagcgcatcacggcgaatgttacgtacggcaacccgtgcgttctcggcctcaccacgcgcctgcttggtatagcccttgcgcgtttcctcggtcagcgccggcatcgggacgcgaatggtcgtgccagcggtagccgggttcagcccgaggtcggaagtcatgatggctttttccacggcctggatcatgcctttgtcgaagacggtcagtgccagggtacgcgagtcttcggcgaccacgttggcaatctgacgcaacggcgtatcgctaccgtagtaagacaccatcacgccgtcgaggatgctcgggtgggcgcggccggtacgaatcttggcgaaggcatgccccagggattccagggttttcttcatgcgctcctgggcgtcttgcttaatctcgttgatcattgggtcagttcctcgatcagggttccttcagcgccgccgagcacgatgttgagcagggcgccgggcttgttcatattgaacacccgcagcggcatgttgtggtcgcggcacaggcaaatggctgtcagatccatgacacccagcttgcgatccagcacgtcatcataggtcagctgctcgaatttctcggcattcggatccttgaaaggatcggccgtgtagacgccatcgaccttggtggccttgagcacaacatcggcatggatctcgatggcacgcaagcaagcagcggagtcggtggtgaagaacggattaccggtaccggccgagaagatcacgacctccccgctcttgagatgacgcatcgctttgcgacgatcgtaatgatccgtcaccccgaccatggaaatcgccgacattaccaacgcgggaatattcgatcgctccagggcgtcacgcatggccagcgagttcatcaccgtggccaacatgcccatatgatcaccagtgacacgatccatgccggcagcagaaagcgctgcaccgcggaacaggttgccaccgccgatgaccaggccaacctcgacgccgatcccgaccagttgcccgacttccagggccatgcgatcgagcaccttgggatcaatgccgaagtcttccgaccccatcaaggcttcgccgcttaatttaagcagaatgcgtttatagcgaggattgcgtgcactcatctgctgagccattggcgttgtttctcctgcggcgtttgtatggccagattggcgttacggccagaaaataatctgcgctatgacagcgcagtcacgatttggtgccaagcggcaactataagcgtggcgaaaaaacttttccgcccaccaatccgacaaagaggccgcgcgcgtgagcgggcagcctcttcgaggacagcgcaagcgtattactgcttggtagcggcgacctgggcagctacttcggcagcgaagtcgacctcggcgcgctcgatgccttcgcccacttcgtaacgaacgaaggaaacgatttcggcaccggccttcttcgccagctcgccaaccttgacatccggatccttgacgaacggctgctcgaccaggctcgcctcagccaggaacttgctgatacgaccagcaaccatcttctcgacgatctcggcaggcttgcccttgatcttgtcttcgttcagcgccatgaagatttccttctccttggccaccgcttcctcggacacctgcgatgggtcgaggaactgcgggttgctggcggcgacgtgcatggcgatttccttcgccagctcgacattgccacccttcagggcaaccagcacaccgatgcgatggccgtgcagataggaaccgatcaggtcaccttcaactgcagtcaggcggcggatgttgacgttttcgccacacttggccaccagcgcttcacgatcgctttcctgcgccgcgatcagcggagcggcatcggtcatgttctcggcaaaggctttttccacgctgctgctgacgaaattcttgaagtcgtcctgcagggccaggaagtcggtctgcgagttgacttcgataatcacggcacgcttgttgtcgtcggcaaccttgacggcgatcgaaccttcagcggcgatgttaccggccttcttcgcagccttgatcgcaccagcggcgcgcatgtcatcaatggctttttcgatatcaccaccggcagcggtgagtgcctttttgcaatccatcatgccttggccagtacgctcgcgcagttctttaaccagggctgcagtaatctctgccatgttcgcaaatcctctcgattcgattttcgatcatcgtccagcaatcggacgatcaattcggaagtggcaaaaagggggcatagcccccttcttgttcaacgggtatcagctaggcgactgttgcgctcagccttgggccgcctcaggagctgcttcttcgacgaactcgtcatttccaccagcggtgttctgacggccgcgaaccacggcatcagccatggagcccaggtatagttgcacggcgcggatggcatcatcgttaccggggatgatgtagtcgacgccttccgggctgctgttggtatcgacaacgccgataaccgggatgcccagcttgttggcttcggaaatcgcgatgcgctcgtggtcgacgtcgatcacgaacatggcgtccggcagaccgcccatatccttgatgccacccaggctgcgctcgagcttctcgaggtcgcgggtacgcatcagggcttctttcttggtcagcttctcgaaggtgccgtcctgggactggacttccaggtcgcgcagacgcttgatcgaggcacgaatggtcttgtagttggtcagcatgccgcccaaccagcgatgatcgacgtacggagaaccgcagcgagcggcttcttcacggacgatcttgccagcggaacgcttggtgccgacgaacagaatcttgttcttgccagctgccagcttctcaacgaaacgcagggcgtcgttgaacatcggcagggttttttcgaggttgatgatgtgaatcttgttacgcgcgccaaagatgtatttatccatcttcgggttccagtaacgggtctggtggccgaagtgcacaccggccttcagcatatcgcgcatagtgacttgagacatgggacttcctcagaataagtcgggttaggcctccacgcgtcccgatatccaactctttcgagcacccaggataccgtgtcgacacgtgtgtggggtcaggctcggcgggcagtcccgcagagcggcgcgttttatagcataaagacgagcgtgaggccaggcagatttcaaacagtcctgcgcactgcccttcccgttcagccttcagtctccagcgcttttatcggctctcggcccatttggtttatcatttgcgccttcgtttttccgcctgcgcctcttggcgccaagagggttgcatgaccgtttccatcaagacacctgaagatatcgaaaaaatgcgcatcgccggtcgcctcgccgcagaggtgctcgaaatgatcggtgagcacgtcaagccgggcgtcaccaccgacgagctcgaccgtctctgccatgaccacatcgtcaacgttcagcaggccattcccgccccgctcaactacaagggcttcccgaagtcgatctgcacctcgatcaaccatgtggtgtgccacggcatacccaacgacaagccgttgaaggatggcgatatcctcaatatcgacatcaccgtcatcaaggacggctaccacggcgataccagcaagatgttcatggtcggcaagaccccggaatgggccgagcgcctatgcaaggtcacccaggaatgcctatataaaggaatcgagatcgttcgccctggtgcccgtcttggcgatatcggcgaagtcattcagaagcacgccgagaagaacggcttctcggtcgttcgcgaatactgcggtcacggcatcggcaaggtcttccacgaggagccccaggtacttcactacggacgcgccggcaccggtctcgaactgaaggaaggcatgaccttcaccatcgaaccgatgatcaaccagggccgttcggagacacgcctgctcggcgacggctggactgcgattaccaaggaccgcaagctgtcggcgcagtgggagcacaccattctcgtcaccgctgacggctacgagatctttaccctgcgcagcgatgacaccatcgcccgcacgtcgccatgatcgcggcttaacctaacgatgctctgacggagggcgacggcatgcctcaggttgatcccgaattgttcgacggcagccagttccaggctgagctggcactcaaggccagccccatcgccgccttcaagaaagtcattcgcaaggcccgggaagttctcgacgcgcgcttcgtggcgggccgtgatatccgccgcctgatcgaagatcgcgcctggttcatcgatcagatcttgcgggccgcctggggacgcttcgactgggacagcggcgccgagatcgcactggtcgccgtaggcggttatggtcgtggcgagctgcacccctattcggatatcgacctgctgatcctgctcgatgacagcgatcacgagaaattccgcaactcgatcgaagggttcctgacgctgttgtgggatatcggcctggaggtcggccagagcgtgcgctctgtccaggaatgcgccgaggaagcccgtgccgatctgaccgtcattaccaacctgatggaaagccgcaccattgccggccccgagcatctgcgacaaaagatgctgaaggtcaccagcccatcggaaatgtggcccagcaaggagttctttctcgccaagcgcaacgagcaggcggcgcgccattccaaatacaacaacaccgaatacaacctggagccgaacgtcaaaggctctcccggcggcctgcgtgatatccagacgatcctctggatcgcgcgacgccagttcggcagcctgaacctcggtgcgatcgttgaccagggctttctgaccgagggcgagtattcgttgctggtttccagccaggagttcatctggcgcgtgcgctacggcctgcacatgctcgcggggcgcgccgaagatcgcttgctgttcgatcatcaacgcagcctggctgcgttgctaggctacgaggacagcgacgccaagctggcgatcgaacgcttcatgcagaagtactaccgcgtggtcatgagcatttcggagctcagcgatctggtgggccagcacttcgcggaagtcattctctgggaaggcgacagcggcaaggccgagccgctcaatagtcgctttctggtacgcgacggttatctcgaggtcgctaacgacacggtattcaagcgcaggcctttcgcgatcctggaaattttcgtgttgctcgcgcagcacccggaaatcaaaggtgttcgagcggagacgattcgcctgctgcgcgatcatcgctatctgatcgatgaggactttcgaggcgatattcgcaataccagcctgttcgtcgagctgttcaagtgcaaggaaggtattcaccgcaacctccggcgaatgaaccgctacggaatccttgggcgctacctgccggaattcggccatatcgttgggcagatgcagcacgaccttttccacatctacacggtcgatgcccacaccctgaacgtcatcaaatacctgcgcaagctgagcaagcccggggtggccgaaaaatacccgctggcgagcaagctggtggagcgcctgcccaaacccgaacttatctatattgccgggctgtatcacgacatcgccaaaggccgcggcggtgatcattccgagttgggcgcggtggacgcccaggcattctgcacgcgtcacaagctcccggcatgggatacgcgattggtggtctggctggtcgaaaaccatctggtgatgtccaccaccgcgcagcgcaaggatctgtccgatccgcaggtgatcaacgatttcgcccagcaggtcggcgacgagacccatctggattatctctacgtgctgacggtcgccgacatcaacgcgaccaaccccacgctgtggaactcatggcgggccagcctgctacgccaactctataccgagaccaaacgggccctgcgccgcggcctggaaaacccgctggaccgtgaagagcagatacgccagacccaacgtgccgcgctggacaacctggtgcgcaacggtaccgaccccgacgacgcggaacagctctggtcccagctgggggacgattacttcatgcgccacagctccaccgacgtcgcctggcacaccgaggccatcatcgagcatccgagcgatggcggtccgctggtcctgatcaaggagaccacgcaacgcgagttcgaaggcggcacgcagatcttcatctatgcacccgaccagcacgatttcttcgcggtcacggtcgccgcgatggaccagctcaacctgaacatccacgacgcccgcatcatcacgtccagcagccagttcaccctcgacacctacatcgtcctggacgccgacggtacgccgatcggcaacgaccccgaacgcaccgaggaaattcgccaaggattgatcgatgccctgcgcaaccccgaagactacctgaccatcatccagaagcgcgtgccgcggcagctcaagcatttcgcctttccgccgcaggtcaccatccacaacgacacgcagcgaccgcagacgatcatcgaagtggtggcgcccgaccgccccggactcctggcgcgtatcggccagctattcctcgacttcgacctctcggtacagaacgccaagatcgcgacactgggggagcgtgtcgaggacgtgttcttcgtgaccaatgcagacaatcagccgctgtcggacccgcaactgtgcatgcgactgcagcaggcgatgatcaagcagctctcgcaggaaaacgagcatcagccctctcccagcagtttcgttatctgaagacgcgtcgaggcagatcaatcccagggtttgccgcgggtccgctcggtatacggcagcctctgctgcatcgccgccttggccaggacgtgggcgctgaccggagcggtcagaaacaggaacagggtgatcagcacttcgtgcacgctcagcccttcgccctggctgccgaagaagatcatcgaacccaacacgatgccacccacgcccatggtgctggccttcgtcgggccgtgaagccgggtaaaaaaatcgggcagacggtacaggccgatcgccccgaccaacgcgaacacactgccgacgacgagaaagccgctgatcagcaactcgatccagaatgacatcttcagccctcagtcaatgatttcgccgtgcagcaggtgcttgcccaccgcgacggtaccgacgaaacccattacggcgatgagcaacgccgcctcgaagaacagatcggatgccagccagataccgaacaggacgatcaacgccagcgcattgatgtacagcgtgtccagcgccagtacccggtcgggcatgtccgggccgcggaccagtcgaatcacgttcaggacagcgcccaacccgaccagtgccatgcacagcggaatcacgtacgtgagcattggaacatctccagcaagggcttttcgtagcggttcttcacctcggcgaccagcgcttcggcgtcgggcgcatcgagcgcgtgaatcaacagcacccgatgatccgaccgcaacgaagccgataccgtaccaggggtaagcgagatgatgctcgtcagcacggcgagaacgaaggggtgttcgatgtccatcggaacctcgacaaatgccggttgcaggcgactggtcggccccagcaccagcttggccacgtgaagattggcaacgccgatgtcgtagaagaccttcaggctgaacaggcagagcttcagcggacggcgaaccttcggcaggtcgatcaggaacccctgcaccagtagcgggatcgccaaaccaagcaccaggccaagcagaacctggccaacgctcagcgtgttgttgagcatcagccagagcagcgtcagcagcagggtcaggcccggattgggtaatacacgagcgatcattggtcgtgccctcgaacgatttccaggtagggcccaagatcgaacagctgcgcggcgactgcctgcacgtacgcctggatcggttgcgccgcgacgaccagcaccacactgccgagcaacagcccgaatgccgccgatacgcgaacattgtcggccgcccgaccaacgctgaccgccgcgctcggacgccagaaaagcatgctaccggcgcgccccagggcgatcagcattcccagcccgccgacgagaatcactggccagagcagcgccgcatcgatagtcggagggaccgctcgcaacaacatgaccttacccaggaagccggaaaacggtggcagcccggcgatggaaatagcgccggcgaaaaacagcgtaccgagcagcaaaggctgctttagcgccggcgccgaaatcagttcgctggccgtatcgccacgctgtcgggcgataacgtcagccaggagaaacagcccaccggagaccagggtgctgtgcagcagataataaagcgccgctgccaaccccgcctccgtaccgagcgcaacgcccgccagcaaagtgccgaccgagaccaccaccaggtaggacagcaggatctgcaggttgcgcgccgccagcgcccccaacacgccgcccgccagcgtgagcatcgacagcggccacagccagtcgagcgccatgttgctcagcgctccggcctggctgccgaagatgaggacgaatacgcggatgatggcgtacagcccgatcttggtcatgatcgcgaacagcgctgcaacaggcgccgtcgccgaggcgtaggcgcgcggcaaccagaaatacaacggcagaatggctgccttcaacgcgaacaccaccagcagaaggaagcccgccgccgccagtaacggagcatcggccggctcggcggcactgacgcgcaccgccaggtcggccatgttcagggtcccggtcaggccgtacagcatgctggcgccaatcaggaacaacgacgagcccagcagattcagcaccacataatgaacgcccgcacgaacacgcttggcgccgtgtccgtggagcagcaatgcatacgaggcaatcagcaggatttcgaagaacacgaacaggttgaacaggtcgccagtcaggaaggcgccattgatacccgccagctggaactggaacagcgcatggaaattcgggccgcgctcgtcatcgccgcgtaccgcatagagcaccgcaaagcccgcgagcaccgcggtgacgacgagcatcaaggcgctgagccgatcgagcatcagcatgatgccgaacggcggccgccagtcgcccaaccgatacaccgtcagcacaccggaatccgcctgcgttagcagcacgagggtcaacgggaccagcagccaggttgcaatcagcgacaagccgcgcttgacctgcatgctctgccggtgcgccagcagcaacacgcaccccatcaacaacggcagcagcagcggaaggatcaacgcatgattcattcgcgcggctcccgaccgtcaacgtggtcggtacgcaattcgcccagacctcgcagcgagagcaccaccacgaacgccgtcatggcgaagccgatgacgatggccgtcagcaccagcgcctgcggcagcggatcactgtactcggcgctttgcccgataatggccgggatacccgaggcaaggcggcccatggcaaaaatgaacagattgaccgcgtatgaaatcagggtcagccccatgaccaccggaaacaaccgggcgcgaagaagcaggtagacaccgctggccatcatcactccgagcgttatcgcgaacaccgcctccatcaaagcacctccttgcacgactcgtcctggctgacatgcgccaggttggaaaggatcagcaacgtcgccccgactaccgtcaggtaaacgcccagatcgaagatcatcgccgttgccagctcgaactcgccgatcagcggaagatggaaatggccgaacgcggacgtcaggaatggcctgccgaacagccagctgccgagcccggtcagtccagcgatcagcacgccaaggcccgccacgctgtgatagctgaacggttgccgctgctgcgcccagaccacgccatgggagatgtactgaaggatcaacgcaacggctgtgatcagaccggcgataaagccgcccccgggcaggttgtgcccgcgcaggaagatgaaaacggacaccagcaacgccatcggcaacagcacccgggaaagcgtatcgagcaccataggatgacggtcggtggaccatagacgcccgccgtagtcgcgaaccggatgcggcaggcgcagcccgtttagtaggccatagatgcccacggcggcaatggccagcaccgaaatctcaccgagcgtatcgaatccgcggaagtccaccaggatgacgttgaccacgttgctgccgccgccacccgacaggctgttttccaggaagtaactggcgatgctgtcgtacgggcgcgtcaggactgcgtaggcgagcagcgcgaccatggtgccgaacgtgcccgcgagtatcaggtcacgaaaactgcgcaagctgctcgactcgaccggtgtgcgatcaggcatgaagaacaatgccaggatcagcaggatgatggtcaccacctcgaccgaaatctgggtcagcgccaggtccggtgcggaataacgcgcgaacaccagggagaccagcaggccgaccacgctgagcaccatcaatgccgtgagccggcggcgatggaacagcacggtcatcaccgaagccagcgccagtatgaccagcccgagcacggtaaagccgtccagcggcgtcatcgccaccgagcctctcagggaacgcaacggcgtcaatgcatagacgaccaccagcaacgagctgagcagaacgagcgccagatagcgctgcaacgagccgctctccatccgttcagtcacccagcgcgcggtggcggcgatatcgttgaccacgcgcgcatagacctgcagggaatcgacgcgcggcaatccgtcgtaccagcggaacgcccacttgcgcatcagatagatcagcaagccgccgccaagggctacgaaactcatggtcaaaggcagattgacgccgtgccagatcgccaggctgtattcaggcacatcaccacccaggctgccggccaccgccgcggccagcaacggcgccaccgtgtaggccggcaacatgccgaccagcaggcagagcagcaccaggatctcgacgggaatcttcatgtaccgggcgggttcgtgcggcgggtacttgggcaggtcgatgggctcgccattgaagaagacgtcatgcacgaaacgcagcgagtaggcgaccgagaaggcactggccagggtagccagagcgggaatcgtccagtagaagctacccagcaggtgctgatccaacgtctcggcaaagaacatttccttgctcaggaaaccattgagcaacggcaccccggccatcgccagcgacgccaccatcgccagcgccgccgtgtgaggcatgtatttcagcatcccgttgatgcggcgcatgtcgcgcgttccggtctcgtgatcgatgatgccggcggccatgaacagtgacgccttgaacgtggcgtggttgatgatgtggaagatcgccgccaccggtcccagccgcgaatcgagcccgaacaacagcgtgatcaagccgaggtggctgatggtcgagtacgccagcagccccttgagatcgtgttgaaagagcgccagcacggccccgatcaacagcgttgccaggcccgtcaagctaaccagatagaaccaccactccgagtcggatagcgcaggatacaggcgggccaggaggaatacgccggccttgaccatggttgccgaatgcagaaacgccgataccggggtcggtgcggccatggcctgcggcagccagaagtgaaagggaaactgcgccgatttggtgaaaacccctagcaggatcaggatcagcgtcagcggatacagggcattcgcgcgtatcaggtcgccagaggcgagcacggcgctcagctcgaaactgcccacgatatggccgaccagcaagatccctgcgagcaaggcgagccctcccccacccgtcacggtgagcgccatccgggcgccttggcgtgcatcggagcgatgatgccagaagccgatcaagaggaacgaggagaggctggtcagctcccagaacatcaacatcaacagcaggttttcggccagcacgacgcccagcatggcgcccatgaacagcagaaagaaactgaagaagcgacccattggctcgcttttagacaggtagtagcgcgcgtagaggatcaccagcaggccgatgcccaggatcaacagggcaaacaggaagcccagtccgtccaacctgagactgagattcaagcccagctccggcagccaggccacggtcactatctgcgtctcgccaccaaacactgcggcacgcttggacaacagcagtaccagagctaacaacggtgccatcccagcaccgaatgcgcaggcggacctgccgaaacgctcgagcagcagcggcaggcaaatgccaagaaatggcaaagcgatgatcagcgcaagcgccatgaaaaaaccccttgagccgcgcgcgcacgcggcagttatccgttacggccagccgagcccaagccccgcgcctgcggtgtgcgccgattatccataccgattacaacaacgtcatgagttgatgtatttcgaaaaacgaaaaggcgcggccgaacgaccgtaacacggtattcgagccacgccatttcaatacgcggcagctatggaccgcccgccgacgccccctctcgttgccatcggcgggggcggtttgctgctgcgctcaccggcccgccgagcgaacgggctcagggagcgatacggctggtgccattgacggtcatgatgcgcacgcgctggcccacacgaaacacttgattcggctcgacttcctggacataggcacgcatgttgccatcatcctcgcgcacggtgatctcgacgccctgcgcgcgggtgatgccctcttccgccgccgcgccgagcatgccacccgccactgcgccgatcacggctgcgaccgcactaccacgaccgccaccgacgccgctgccggcaataccgccgacgactgcaccggcgccgctaccgatcggcgtcttggtgccctcgagcttcaccggacgcagtgattcgatggttccatagcgaacggtctgcaccgtacgcgcctcgtcccgggaataggaatccccggtaaggttcgatgtacaaccgccgatggccagcgcgatcgccgtgaaggacgcaatgaaaatggagttacgcatagatgtgttctcctgggaaagatgttcgtcccaaccgcatcaagcagacgccgtggcgaaatgacgcttggcaaaggcgtcgtcctgactcagcatgcctgcaattaggaccccactttacccgaggcgatcccgcctcgcatgcacaacgcgtagccgggccgcttcacgagcatatccatggattacttcatcatcactgtggtcacgctagccggactgatcttccacgcctggctgttcgttcgcttccggcgctgggcggatagggatctggcgttatcactcgctggggacgacccacagaagcgtgaatgggcgttgcagcggctggctgccgcaaagcaggcgcggatcaagaggaaggacttgcagccctggctcgaacgcgagctggaacgctaccacgagcgctgacgcggagcgggccggggcgcggctgcgggtcgcaagcagagcttgctcctacaagggatggcgtttgccttagggtggatcagaatgtgctggttcttttgtaggagcggcctctgatcgcgaccgaggtctctgcgcggctgcgggtcgcaagcagagcttgctcctacaaggatggttttcgtcttggcgtggactggagcgtgctggctctattgtaggagcggcctctgatcgcgaccgaggtctctgcgcggctgcgggtcgcaagcagagcttgctcctacaaggatggttttcgtcttggcgtggattggagcgtgctggctctattgtaggagcggcctctggtcgcgaccgaggcctccgcgcagttgcgggtcgcaagcagagcttgctcctacgaggatggtgttcgtcttggcgtggattggagcgtgctggctctattgtaggagcggcctctggtcgcgaccgagacctccgcgcggttgcgggtcgcaagcagagcttgctcctacaagggatggtgttcgtcttggcgtggattaaagcgtgctggttcttttgtaggagcggcctctggtcgcgaccgaggcgtccgcgtggctgcgcggtcgcgagctcaaccctggagacagcgccgtggtggtgccgtctgcagctcagggtgccaggcgctctcgctgccaggtacccgcaacatggcgatagttcaggcggtcatgcaagcggctggggcgcccctgccagaattcgattcgctcaggcagcaatcggtagccgccccaatgcggcgggcaatgcggcgcttgatcgagaaagcgccgttcggtttcggcaagaagccgctccagttccgcgcgatcgcgaatcactcggctctggggtgaagcccaagcccctagacggctgcccagcgggcgcacttgataataggcgtccgactcctcggcactgaccttctccacccgcccctcgatccgcacctggcgctccaggctcggccagaagaaggtcatcgccgcgaacggacgagctgccagttgctcggccttggcactgtcatagttgctgaagaatgtgaagccgcgctcatccagcaccttgagcaacagcacgcggcaatggggacgcccatcggcatcgaccgtcgccagggtcatggcgttcggctcgaccggtggctgttctgtcttcaccgcgtcgtcgaaccattgccgaaagagtgcgaatggctcgtccggcgcgttggcttcactgaggccctcgcgggtgtagtcgcggcgcatatcggccagggtctgggtcatcacagcgattcctgtaaagagtcgaagccagagcttacttgtttgcgcgcagatttctcttgactcaacgcaaagcgcaccagggaggtgcgctcggcgaggctctatttactcttggcgacttctaccgtagccacctgggtcggtgtcgcaggtgtctcgctgtactgggcaatcaacgccaacagcgtcgcctgaggggccagcatcatctccacgcgacgattcagcgcgcgacccgcttcgttttcgttcgaggcgcggggcatatccgaacccaagccacgaatgcgcagccggtcgtgcttcagaccgctgaggcggaagatcgccgcaacggcgccggcacgcttgcggctgatgtcacgattgatatcagccgagccggtactgtcagcatgccccagcacgacgacggccgttttatcgtcaccttccaccagcttcgccactcggctgatggggccaagcgtgacgggcaacagcatgccaggacggtcgggattgaaagatgaatcgaccggtgccgtgacgatcagcaccccgtcgcggcgctcgacctcgaaacggctgtctttcaacgcctcgcgcaaacgcggctcgtaatcatccagccaggcccggtccagcaccggctccgggactgcggcgacttcgaccggcttttcgcccttggagctgcaaccagccataacgatgcaaagaatgagagaggcgcttttcagccagttcatgagccacgattccgtaggtgatttttgcgaatacaagctgcgtaaggtgagcacgcagcttaagcaaggatttgtctcaaattgtggacgcaggtccttgttctgaaaagcccacccaggaagaacagacgagcggttcagtccaggcaggctttgacgctcctcgccagcgcttgcgcgcgcgggtccatgagcacgtagggcccgagcgtattggtgacgtacccgaacgcgacatcataatgcggatcggcaaagccgatacagcccccagcgccaggatgtccaaaagcgcccggccccatcgagaaggtcgcgttttcgacgtccggttgatccagccagcaaccgagggcgaaacgggtgcggctcagcaaggtacggtcttcaccgatgcaatgctcacgtgtcatctcggccaacagctcgtcttcgagcagttcgccgcgtagcagcccgtcatagaacccggccagcgcgcgcgcgttgccgtgtccgttggcggcgggttgagccatccggcgccactccggcttgttggcgctgttcatgatcgatggcggattggtgaaagcgagcgcggtaagcgactgtggatcgccggtcagggccttgaacacgcgctgggcggcggcatcgccgaagttgttcttctgccgggtcaggtaaccgacacgatcgaattcggcctcggccagaccgatatgaaaatccaggcccaggggccgagcggtacgtgcgacgatcgcttcacccggctcgcggccatcggcgcggcgaatcagctctccgagcagccagccgtaggtaatcgcagcgtaaccatgaccgtcgccaggagtccaccacgggctttcggccgccagcgctgccgtcatcatgtcccagtcatataacgcctcgggtggaagtggctggcgaatggctggcaaaccggcctgatggcagagcagctgccgtaacgtgatggcctgcttgccgttggcggcaaactcaggccacacacgggcaacggggtcgtccagttgcagcttgccctcggccaccaattgcagggcagcgacggcagtgaaggtcttggtacaggaaaacagattgaccagggtgtcctcttgccatggctgctcgccggcgttgtccgccacgcccgcccagaggtcgaccaccgtctcgcctccgaccttgacgcaaacggcagccccgcgctgctgggtctgttggaacaggtcgctgaaggtctctttgaccgcttcgaaacgaagatcgaaatatccctggatctgcacgcttgctacccccgcaatataggttcggcctattgtttcagccgcaccgaagcatggaaacagacttgtcggccattaccgaagccatcaaccatttgaatggccagacatgctgcccgcgccggaccgaacgacacgctagccgacctcgcgccggaacggcggcaacgcgttgagaatcgccttgccatagcgctgagtaaccactcgccggtcgagcaaggtgatggtgccgcggtcctcctcggtacgcagcaaccgcccgcaggcctgcaccagccgcaatgacgcatccggcacagcgatctccatgaagggattgccaccgcgcgcttcgatccactcggccagcgccgcctcgaccgggtcgtcgggtaccgcaaagggtatcttggcgatcaccacgtgctcgcagtacgccccgggaagatcgaccccctcagcgaagctggcgagcccgaacaacacgctcttctcgccgtcatccacacgcgccttgtgcttgttcagcgtctcctgcttggacagattgccctgaatcagcacccgccggcgccagtcacgctccagaccgtcgaatacgtcctgcatttgcttgcgcgatgaaaacagcacgagcgtgccacgcgaagcctcaaccagcgcaggcaggtcacgcacgatggctgcggtgtgccccgccgcatctcgcgggtcagccttgagatcaggcacgcgcaggacaccggcgtcagcatgatgaaagggactggggactaccgcggtcaccgcgcagcgcggcaggccggcgcgcatgcgataccggtcgaagctgttgagcgctgtcagcgtcgcggaggtgaccagcgcgccatagcagacgttccacagattgcgccgtaacgtctcggccgccaggatcggactcgcattgacctcgatgtcgaacagcgctccgccctcggccagggtcagccagcgcgccatcggcggactgtcttccgggtcgtcggcggtgaaggccgtccacaattcccagttgccctgcgcccgggtcagcagactgccgaacagcggataccattcctcggcctgatgactggcgataccaacgcccgcctcgccatccatcgcctctttcagcagctcggtcagccgtgtgaacaggtcgttgagcttggcgaagcccttcttcagctcgacgcccagctcgaccagatgttcgggcaccacgccaccgacaaaacggtgccgaggccgctcgcggccctccatgtcttccccggccttgaaatcggccagctgctcgcaggcgctgaacatgaattgctgctgactgcgcaggtcgcgggcgatttccgggaccgcctcgatcagccggccgagatcgcccggtagtgggtgctgggcgagcagcttggtcaggttcttttcgacttgggcaagccagtcggcagtcgagcgcaaccgtgtgaagtgcgcgaagtggccgatggccttgtccggcaaatgatgtccctcgtcgaacacatagagggtatcgcgtggatcgggcaacaccgccccgccgcccagcgccagatcggccaacaccatgtcgtggttggtcacgatgacatcgactttcgtcatgccctcgcgggccttgtagaaggcgcactgctggaaattcgggcaatgccggcccgtgcactgactgtgatcggtggtcaggcgcgcccagtccgggtcagccagctcctccggccaactgtcgcgatcgccgtcccaacgattaccggcaagcttttcaatcatgctgccgaacaacttctcgctgcgttcatccacgtcgatgcgaaagccttcttcctcgaatagctgggcggtggcgctctgagcctggccttcctggagcaggacatcgagcttggacaggcacaggtagcgaccgcgccccttggccagcgcgaaggaaaagttcaggccgctgttgcgcatcagatcaggcagatccttgtgcacgatctgctcttgcagcgcgacggtggccgtcgcgatcaccaggcgcttgcccgccgccttggccgtgggaatggccgccaggctgtaggcgaccgtcttgccggtaccggtgccggcctcgaccgcgaccactgcgggctccccgtcccgacgaccttcgtcgtcagccttgatcgcgcccagcaccttggccacttcggcgatcatcaggcgctggccatagcggggcttcaggcctttggcttcgagaaatcgagagtaggcgccctggatctgggacttgagttcggtgctgagcatgggcgcggaagctgtatatattttcagtatttcgagtgggtggctatgatagcgcgcgttcgctcaatcgccaccggagatttgcccatgaccgctttcgctctgccttattcgctccatgtactggccgccgtgatctgggtcgggggcatgttcttcgcctggatggtgctgcgccccgccgccgtctccgagctgcaggcgcccgagcggttgaaactgtggacagaggtgtttcgccgtttcttcaaatgggtctgggtcacgctactggtcttgccgatcagcggtatcggcatgtggcacatgcgcttcgacgggctggatgcggcgccccgctacgtgcacatcatggccggtctatttctggcgatgctggcgttgtttctgcgcattcaattactacagctgcccgagctgaagcgcgccatcgcggcgcagaactggcctgaaggcggagcggcactcggaaagattcgccggttggtgggcatcaacctgcttctaggcctggccgtcatcacgctggcctccgcccggccgatgctctgagcaaccgaggcaagcaggctcggcccactgaatggaaaaagccgggctgggcccggctttcatttgcgtcagcgacgattcaagggcgagcttcaacctcggcttctacgcgacggttgatggcgcggccttcggcagtcgagttgtcggcgaccggacgggattcaccgtagccaaccgagtcgacacggtttggctccagaccgaactgattgaccagcacgtcacgcacggcattggcacggcgctcggacagacgctggttataggcatcggtgcccaccgagtcggtgtggccttcaacgactgtcgtggtttggttgtactgcttcatgaaatcggccaggtccttgatgtcggccatgctgtcctgcttcacctgcgcgcgatcgaaatcgaacttgacgtccagctcgacccgaacaggttcggccatcggctccggttccggctcggcggtcggcacgggttcgaccgtttccaccacggcgaccgtttcctgctcagtaccgttggcccagcaataagccgcggccataccaccaccaatcaacgcaccgtatccggcataggtgctgctctctatggcgcccagcgccgcaccggtgacaccaccggcggccgcacaggtgggccaatcctgcttctgcacccctgcacagccagccaggacggtggtcattacaatcacgggtactgctgtccgtaagctactcattggttgaacctcctaatgtgggattggccagagcgccatgcggacggcattagcgactccagttgtaacgagactaggacggcacgcgccgccgcgctagtctttaggcttcgactgatgcgcaagttgctgttctgcgacccgcactgcctacctcgaggatcccggcttggctgcatcccgctccgcccaaaccccacagcaagcgctagccgccttgctcgaacacgatgcccccgcgcgcctgttgcacgtaggttccggcgatatgcctgcggtacaggctttcagccgtagccatgaaaactgccacgtcgaacgcgcaccgaccgggccgctgtcggcagacctggctggccgtcggtacgacctggccctaatcgccgattgcctggagcacatgccgaaacgtgaagggctgcaattgctcggcggcatacgcaatctcaatgccagccgtatcgcggtactggtcgatctggcggcatgcgactggcaagccaccgacttcttcgcactagcactgcagatcagcgctcgcttcgagcgtgacgaacagaccctgaccctcttcacctacgacctgctcgcctacaagcaggttccggattggctgaacgcgaaatactgggccaatccacaaatgttcggcaaatactggtggtgaacccatgacatcacaggaacctggactcgatacaagttgcccttgcggcagcggcgactcactgagcgagtgctgcggtcgcttccacgaagggcatccggcgccgagcgcggaacggttgatgcggtcacgctacagtgcctatgtgctcggccttatcgactacctcaaagccaccacgttgcccgtccagcaagcatcgttggacctgcagtcgatgcaggagtggagtgccacaagcgtctggctgggcctcgaagtcgaggacagtcagttgctcggcggccaaccggagcatgcgcgggtcagctttaccgcgcgctggcacgatgggaatggagagcacgtacagcacgagcggtcagccttcgtgcaacacgacgggaaatggtacttcatcgatccgaccgtacccctgaagtccggccgtaatgatccctgcccctgcgggagcggacagaaattcaagaagtgttgcgccgcttatctgtgacgccggcgccgaacgaaaaaaaggccggcaagcgcatcgcgctggccggcctttcacatttgcgaggggttatttctcgacgaatgcgcgctcgatcagatagtggccagggtcgcccatacgcggcgaagccttgagaccgaagctgtccagcacttcactggtctcggccagcatgctcgggctgccgcagatcatcgcgcggtcatcctcgggattgatcagcgggaggccgatatcgctgaacagcttgccgctgcgcatcaggtcggtcaggcgaccctggttttcgaagggctcgcgggtcactgtcgggtagtagatcagcttttccttcagggcctcgccgaagaactcgttctgtggcagatgcccggtgatgaattcccggtaagccacctcgttgacgtagcgcacgccatggacgagaacgaccttatcgaaccgctcgtaggtttccgggtcctggatcacgctcatgaacggcgccagtccggtcccggtgctgagcaggtacagatgcttgcccggcaacaggtcgtccaataccagcgtgccggtcggcttgcggctgatcatcagcgagtcgccttccttgaggtgctgcaaacgcgacgtcagcggaccatcgggcaccttgatgctgaagaactccaaatgctcttcatagttggggctggcaatgctgtacgcacgcatcagtggccgaccctcgacttccagaccaatcatcacgaattggccattctcaaagcgcaggcccggattacgggtggttttgaagctgaacagcgtgtcgttccaatgatgaacactgaggactcgctcgacgttcaggttgctcatttaggaaattccccttctcgcgcgcatcggcgctggacatttgcgacagtttaacgacctcgttaatattcgctaaacgaatattaacgatatagcttatcggttatatagatatgcattttacgctgcgtcagcttcaagtgttcgtctccgtcgcccgccaggaaagcgtttcccgcgcggcccagagcctggcgctatctcaatcggcgaccagcacgtcgctggccgaactggagcgccagtctggttgccaactgttcgaccgcgccggcaaacgtctctggttgaacgccctgggccgccagttgctgccgcaagcggtcagcctgctcgaccaggccaaggccatagaagacctgctcgccggcaagaccggattcggctctctcaacgtcggcgcgacgttgacggtcggcaattatctggcaacgctgctgatcggcagcttcatgcagcgccatcccgactgccgggtgaagctgcatgtgcaaaacactgcgcatattgtccagcagatcgcgcaacacgaacttgatctaggtctgatcgaaggcgactgtcagcaccccgacatcgaggtgtcgccttgggtcgaggatgaattggtggtgttttgcgcgccgcagcatgccttggcgcagcgcggtcaggtgagcctggatgaactctcgcgagaagcctggatactccgggagcagggctcggggacacgcctgacgttcgaccacgccatgcgccaccatcccgccaagctcaacatccggctcgagttggagcataccgaggccatcaaacgagccgttgaatcaggcctggggatcggttgcatctctcgcctggccctgcgcgatgccttccgacggggcagcctggttgcggtggaaacccctgaactggatctgacccggcagttttatttcatctggcactcgctgaaataccagacagcggcaatgcgtgagttcatcgagcaatgccgggcgctgaccgccggggtgcgccgcagcgacgagatcgtgctgcccaccatcgcctaatgcgcgcgaactcacagattggcaaatggataggctatcggggcaggagcaactgcaagcccatcgacgtgcggcagcatatgacgcccggcatcaactgctaggaatcgactccatctgctggagcagtaatgcggcctgggtccgggtgcgaacgcccagcttgcggaagatcgcggtcacgtgcgccttgatggtcgcctcggaaacgttcagctcgtaggcaatctgtttgttcagcaggccatcgcagaccatcgtcaagacccggaactgttgtggcgtaaggctggcaagcccttcactggcagccttggcttcggggctgacgtgcgcaacgtcctgaacattgctcggccaccagacgtcaccatcgaggacgacgcgcacggcctgctgaatgatttccagcgagctggacttgggaatgaaaccactggcaccgaattcccgggagcgcgccacgaccgcagcatcttcctgagcggaaatcatcactaccggcaactgcggatactgaccgcgcagcaaaaccagtcctgaaaatccataggcgcctggcatgttcaaatccaggagcaccagatcccatgccgaggtccgggtcagctgggcttccaattcagcgatgcttgccgcctcggacaacctcacgtcgtcgcccaagccaagcgtcagcgcttgctgaagggcgctgcgaaacagaggatgatcatcggcgatgaggatttcgtaagcagccatggcagacctatagtttttttattggcgctttcaccggaccggcgccggagggtcggcagcgggccggcatggacccggatttgctcggggattgaccggcgtgatgatatcgcgccaccaccggaaattcgatcaccgccgaacatttaatccgtccagcgggcgcacactggcttgaagcagtggccaagcgcatcggtttgaggcaaagttcgaggctttccctgacgagctacaacatgcgtaaccaagcccttcgcgccgattttctgatgctcataacggccatgatctggggcagcgctttcgtcgcgcagcgggtcgggatggataacatcggtccgctgctgttcaccggcctgcgcttcgcattgggcgccatcgttctgctgcccctattgatctatcagggtcgtggtgcggcccggcacgaacccttcctacagcgaggcttgctgctcggcggcatctgcatggggctggcgctgacgctgggcatcaatttgcagcaagttgggctgctgttcaccagtgtcaccaattccggattcatcaccggtctgtacgtgatcgtggtgccgctgctggggctgatcatcggccagaagaccggcctgggtacctggctgggcgcaatcctggcggtggccggcatggcgatgctcagcatcgacgagaactttcaggtcgcctccggtgattggatccagctggccggtgcgttcgtgtggggcgtgcacgtattgctggtgagtttcttcgtcagtcggcacgacgccattcgcctggctttcctccagttcgtcacctgcgcggttgtcagcctggcgctgggcgccgttttcgaagagaccaccctggacaatatccgcctggcagcgccggccctgatttatggcggcatgttcgccgtgggcgtgggctacacgctgcaggttgtggctcagaagcatgccattgcctcgcacgcggccatcatcctctcgctcgaggcggtgttcgccgccatcgccggcgcattgtttctggatgagaacctcagcctgcgcggatacgccggctgcgcactgatgttcaccggcatgctcgccgcccagctctggccgcgcaaagcctcgccagtcacgaccgacaccgagattccacaaaccgcgcggcattgacccgtcggcctacgaaggccgacgtaacgcatccagtgacaggtgggtcgcgtcggtcagatccgggctacggtgctgcttggccgccagataatgatcggtgaaagcgtcgagccacgtatccagcgcctcggcggccggcccgtcaccggccaaagccaggcacaacgcggccacttccgccgtgcacagatgctcgctgcgagtcgaacggcgcaggcgataccgcgacagcacgtcggcctgcaggctgagcaccggcaggcggttcagataggggctcttgcgaaacatctttcgcgcttcggtccatgtcgcatccagcaggatgaacagcggccgcttgccggctacgacttgcacatcgctgaccactcgctcgggttcggcatattcgcccggaaacaccaccaccggctgataccgggggtcggcaagcaactccagcagtgcaggctccacgcctgtccgctgccatgtaaatgcatgggtatcggcaacgatgtccgcgatcagccaaccggtgttgctcggcttcagtggctcgatgtcgtgcatgatcaggcagaccgcgctgtccgccgtcacctgtgggagccaatcacataggcagtggctgcgaggaacgcgacagcggccacaacgggacgtgcgcgatcctctcgcgataaacggcttggcactgcgggccaggcgctcctcgcgcaaacgggctacggcatggggcatgggaatgcatcgatgaatacgggcggatcagcagtctatcaggccgcgtgccatcgagccccgctgaaccgtaccgacgggtaccggtcgaacgacggcagtcaccaggagatcaccatgcaccgtcttactacacttttcacgctctgcctcgccctgccgtttgctcatgccgcttcggcgcaggattcgacactcggccctctgctagaaaaggttgctcgcgaaagtagcgtaggcacgccgcgcgcgatcaattccgacctcctcgacgaaggttacagcgtcgaaggcaacgagctggtcaaccacctgagcgtccagccccgccatgccgcgcagatgcgcgacaacctcaagcaggtccgcacgcagctggccgcaagcgtctgcaacaacgacggtctgcgccagctcatgagccagggggcggtgctgcgcttcgaattcagcgaataccagagtaaaaagccgatcaccaccgaacggtaccgcgccagcgattgctgaaccccctcaaaacagggcagcgtcttgctgcccttgataaccggttctagcgcaagacgcgtggatcacccttgccggccaccgcggcggcttcgtccggtttgagcaacgccgtgcgtggcacgtcgagcaagcgagcacaggccgccaacacattcgcccaggatgcccgattggcgaattgcatgccctccacgtccagcgtaccgccgcgattgcggtagcccagtaccgaattgcgccgtgcgtccggcaggatgggccagagatgcccgcgcgcgacctcgggccgcatgtgagtgagcagcacgcgcaactccatccgttccgggaacagccgctcggccacgccatccgccgcgagcgcatcgatctcccagcggtcacgcggtgcccggaaacgcccaggttcttgcagatacaccagccgataggccaggcccgcctccttcaagcgcaccgcggcgcgctgcatttcggtcagctgatagctgccgttggcaatcagcagaacggcgtcgttacccgggctttcctcgacaacgatggcgccatcccgggccaattgctcagcctggtcctggctgaatatcgcgggtcgctcacgcttgggcatgaccatgcacgccaggctgccgcgggcactgtagatcgaaggcagcagcgccaacgcgctgttatggtcggccggaaacagcactctgaccatgtcgctcatttcgccaagcagtgcttcgcaaaaggtggtgtcctggtgcgactgctggttcttgccgttctcccaggtgtgcgaagtggcgatgaggggccagccgagccagccggccgggcgcccgacttctttctgttggcgagcgaagatcagcgtctgacgtacggcgcctagcatcttcacgcagaaggcttcgtagctggcgaccagattcagtccggcctgattggccaggcatgccgagaccactgcctcttcgttcagcgccgtgatgatcttgccatccaccgcctcgagctcgctctccggctcgaccacacggtgcttgagcgcggcgagcacgccaccaaggcggttgctcgccagctcgtcgggattaccaacccgagggcgcagggccgggttggcgagggtcagctcggtgaaaaattcgtccaccgcggccatcggtgagcaggcctcgtcctgataccggagcggcggcatctccggcgctgcgggacgtctcgaagccagtggattgtctcgctccgccgaacgtccgtgacgggactgtcgcatcagcgcgcgagccgcttcgagcgcctcctggggcacgaatagagcgccagcatgggcgttgaacaattcacgcgaggcctcatcgaaccgcggattgccgggcaacggcaagttgtgtgcggcattgctgcccgcgccgtagaaaccgaatcccttgaccgtctcggcaatggcatagggaatcggcagcgggtagctgaggataccgcgctgtttttcctcgatgcggcggtcgtagcgctgttccatttcccacagcacacaaacgaaggccgccggatcccggccgtcgaaggtgatcggatcgaagccgcagcggctcagatgctggcgaaacccctcgagcccttcatgggtgccgagttgagtccgctgctcgatgcgccggccattggcgatcatcaccggcagcgccaccccgcaatcctcggcgcgccaccagcgcggcatccagtcactgccccgctgctcttcggcggcgccgtcggacaggaaggccaccagcgtctcgcccggcaacggcaaatgggcatactgcaattccgcaaagccgagatagccgccttcggccatgccgccgccggtgtgtgcgttgacgtggctgcccagtggggcggacggacttccatcgggggcttggtgatagccatagaaatcttccagcagtcgattgattcccacctcgccgccaccgtaaacctgcgcctgctcgactgactggttgtcggtgagcaggttcaacgcttcgatcgccgcaacgcaatgaccttgccccatcagccacccacgcgtgctgcccgtcaacgcattcagcgcgagatagccggcataggccgggaccatgttcagcgagcctccggtatgcccctcgggagtcagcttgaagtcgtcggcagcaagcgccgaaccatcgagccgagcccgacgcgcatacgtcatgtgcaccaccagccagagccccgccgaacccagccgatcgatggcctgcaagaggcgatagacgctggccaggtccggttgcagctgcgcctgcaccagctgatgcgccagacgaaataccgcggcctgggtttccggtgcgtggacgaacgggccatagccggtccgccaacgggcgaattcgggttgcgtctcggcgtgattgtccagttcggcaagactgggcagtagctgggtcatggagcgctccggtgagtggcgaatggcattagtctagacagcgccggtgaagctatcgctgatatgcatcaagatgcacagacgactgcccgtgcatgctggactcatccgtacagaaggaactcctcatggctttgctcagttttctcggtgcaattcaacaagtcaccggctcgtgctatttgctcgaaacccatgacggggcgcgtgtgctgctcgactgcggcatgtatcaagggcggcgcgcagaggaagaaagcaatcgggcaggcttcagcttcgacccgaaaaccctcgacgcggtgatactgtcccatgcgcatatcgaccacagcggcttactgcccaagctggtggcggcaggcttcaccgggccgatccacgccaccgaagcgacctgcaaactggtcgaactgatgctgctcgactcggccaacatccaggagaaggacgccgagtgggagaacaaatggcgcgcacgcctgagcaagccggcgatcaaaccgctctatacccgagtcgacaccgagcgcatgctggggcagcgccaggcgcatgcctatggtgaagccttcgaagccgcaccaggcatcaccgtgaccttcttcgatgccgggcatatcctcggctcggccatcgtccagctggacgtcgaagacttcggacgcaagcgccgcctggtattctccggcgacctcggcaacagctgttccccgctgatgcatcaacccaccccgctgagcgaagccgacgtggtcttgatggaatcgacctacggcgatcgggatcaccgcgaccaccaggccacgatcgaagagctggccgatatcctccagcaggcgcatcgtgacggtggcaacgtgctgatgccgtcatttgcggtgggccgcacccaggacctgatctactatctcggccttctctaccagcagggacgtgttccccagcagatggtgttcctcgacagcccgatggccatcagtgccaacgccatctactcgttgtttcatgaacagctggatcttccgccgggattggccgaaagcggcggcaagaaaagcatcgagcaatggctgccgatctttcgcaccacaccgacgcccgaagagtcgatggcgatcaatcgtttcaagagcggcgccatcatcatcgccggcagcggaatgtgtacaggcggccgcatactgcatcacttcaagcacaacctctggcgcaaggaatgccacttgatcattccgggcttccaggctagcggcacactgggccgggcgatcgtcgatggcgcgaccacggtcaagctgatgcaccagcgaattgccgttaatgcgcaggtgcatacgctgggtggtttctcggcacatgcggggcaatcacagctgctcgaatgggtaagccacttccaatcccgtcccgagctcttcctcgtgcacggcgagctggaaaagatgcaggcgctgcagcaggcattgaatgaccgcctcgattggaaggccaacatcccggaacctggcgaccgcatcgccctctgatgaccgggaaaaacgttgcaatgccaagcgaccttgaaaacgcctgtcgacggacttgaagtacgcttgccgcgcaccgccgtctcggtggtacgcggctgctacgctcaaagcaggtctcgcggagtttccagtcgaccttgaacgccgcctacgaatacccgcaatcctgagacggcacctcatagcggccaacaagcggtaccgcatccaaaagcaaagggggacgttgtatgccgttcgatccggacgactacctatcgcggcacttcagtaccagcggtacggagctttcgaagaaactcgatgagttagtggcactggtcgttccgcccgccagccagaatctgccgctctaccgtgagatgctggtgaccgtcatgcgcatggcccaggcggatcgaaaccgctgggatgccaagatactgctacagaccatgcgtgagatggagcacgccttcagtcgactcgaccaattcaaacgccgccgcaaggtgactgtgttcggttcggcacgtacgccgatcgaacacccactctatggcctggcgcgcgaactcggggaaacgctggctcgctacgacctgatggtcatcaccggtgccggaggcggcatcatggcggccgcgcatgaaggggccggcaccgacaacagcatcggactgaacatcaccctgcccttcgagcagcatgccaattcaacggtcgatggcaccgatcacctgctgtcgtttcacttcttcttcgtgcgcaaactgttcttcatcaaggaagccgacgccctggtgctgtgcccaggagggtttggcacgctggatgaaacgctggaagtgctgacactgatacagacgggcaaaagcccgctggtaccggtcgtgttgctggacgaacccaacggctcgttctgggcggatgcactgagcttcatgcgccgccaactcgaaggtaatcgctatatcctgcccaccgacatgcgcctgatgcgcttggtcgacaacgccgaagacgccgcggcagagatcagcaggttctacagcaacttccattcgagccgctggatgaaagaccgcttcatcatgcgcatgaaccatacgctgaccagcgctgcgctggaggcgttgaacgaagcattcgcggatctatgcctgaagggccgcttcgagcagcaagcctgttgcgaaacggagcgggacgaaccggagctgcaacagctgcctcggctgagctttgtgttcaatgggcgcgatcatggtcggctgcgcgaactcaccgacttcatcaatgatcccgaacattgggcgcggtagcggagcggagcgttgacacgaaccgaacgcatggtcggccccgaaagcgttgaagctggggtcgcaaacgacccgtcaatcgaccgagccgcctcgtagcaaccggccgatcatgtccagtggatatccgcgataactgaggaagcgagcctgccgggccttttcccgctggtcgctcggcagctcgccggcaaacttgcgcctccagacatcctgcagctgcaggccccagtcgaaaccactgtcacgcagtgcctgttcgatatcgtcacgggccaaaccgcgctgggacaactcctcgcgaatgcgcaaggggccgtagcccgcgttggcgcgcatgcgcacgaagctctccagatagcgtgattcactgagaagcccttcctcggccagccgatccagcacgggatcgatgagctccgaggaagcaccgcgcgaccgcaacttgcgactcaactcgatgcgaccatgctcgcgacgagccagcagatccatggctgcccgccgcaccgcggcggggctatcgagcacgaccggcatatcgattagagatcggcttcggccagatcttcagcaaccgggttggctttggtgttcgccgacacgaccagcagcttgtcccgaatctgctgctcgatttcacgaccgatttccgggttctcttccaggaacttggccgcattggccttgccctggccgatcttgttgcctttgtaggcgtaccaggcgccggacttctccaccaggccctgttgcacgccaaggtcgatgacctcaccgttgcggtagatgcccttgccgtagaggatctggaactcggcctgacggaacggtggcgccaccttgttcttgacgaccttgacccgcgtttcgctaccgaccacctcgtcgccttccttcaccgcaccggtacgacgaatgtcgagacgaaccgaggcgtagaacttgagcgcgttaccgccagtagtcgtttccggactgccgaacatcacgccgatcttcatacggatctggttgatgaaaatcaccaggcagttggcgttcttgatgttaccggtgatcttgcgcagcgcctgggacatcaggcgagcctgcaggccgacatgggtatcgcccatctcgccttcgatttccgctttcggcaccagtgccgctacggagtcgacgatgatcacgtcgactgcattggagcgcaccagcatgtcggtgatttccagtgcctgctcgccggtatccggctgcgacaccagcagatcgtcgacattgacgcccagcttgccggcgtaatcgggatccaatgcatgctcggcatcgacgaaggcacaggtagcgccagccttttgcgcctcggcaatcaccgacagcgtcatggtcgtcttaccggacgattccggaccgtagatctcgacgattcggcccttgggcagaccgccaatgccgagcgcgatatccaggcccagcgagccggtggaaatggagggaatcgcctggcgatcgtgatcgcccatgcgcatgaccgcgcccttaccgaactgcttttcgatctggcccaaggcggcagccaaggcgcgcttcttgttctcgtccattacaatcctcacttgatcaagagggccagaggccacgacaactgtataagtagacagtattagagcataggcaaaaaaaaccgcctagccctgaaatggattttctccctccgcaagctggatcaatccgacgagcgccgcttccacgctctgctcgcgtacggcctcgcgatccccctcgaacaggaagcgccgggttgcgagccgatccccatctgcccacgccagccatacggtgccaaccggcttttcccgcgaccctcctcccggcccggcaatgccgctgacggcaacggcgtaacgcgcaccgctgccatgctgcgcgccccggaccatggcttcgaccacttcgcgactgacggcacccacctggccgaacagttcggccggcacacccagaagatgggttttctgggtattggaataggtcacaaagcctgcctcgaaccaggcagagctgccggcaacacgggtgattgcctcggcgatgccgccgccggtgcaggactcggccgtcgtaacctgggcagcctgcgcgttcagcatggcgcccaggcgcgccgccagatcggtcagggatggcatgaatagaagctccgaatgaaccagtcgaacggataccttaacaggcccgccggatgctgcctccgacgcaacgtgcgctgaccgctcacctgctgttccagtaccgctgcatgtcgagaaactggaacgaggcgctccaggtgatcagcaccagccccgtcagcgcctcgatcccggtgaggtagcggatcggaccgtgcggctggatgtcgccgaagccgagcgtcgtgaaggtcgtgaaggaaaaatagacgcaatccatcaggccaccggagaactcgccggaaagcgtcccccagcccggcaggtggtgcatgacgaaataggcgaaggcgaatatccaaacctcgaccgcgtgcgccgtcagcgcgccacagacgccgaagacaacgccaacccggtgattgagcagtgacttttcccgactgatcgacagccgcgacaggaactcgtagtggacgatcaccgccgttatcacgatgaacacgttgaccagcgtgaccatgagcagattcggcagcgcttgcatcggttctgtcattggctcgccccattggaaactgccaggcgcaaccgctagccgtcttggaagccgccgagtcagcgccaggcaaaccaaaaagtacgcccccgatacctcgccagcccatgctaaccttgccggtttgattcagccggcacaaccagggtcgtccgccttgaccgcaaggttgccggggcacgcataggccgcgcgaccattcctgcattcatcttcaagtatcgagctatatgtcgtcacaagacctgtcccatcacacgcccatgatgcagcaatattggaagctcaagcgtgagcatccggaccagctgatgttctaccgcatgggcgacttctacgagttgttctacgaggacgccaagaaggcagccaagctgctggacattaccctgactgcccgcggccagtccggcggcaatgcgatcccgatggcgggtatcccctttcactccgccgaaggctacctgagccggctggtcaagctcggcgagtcggtggtgatctgcgagcagatcggcgacccggccaccagcaaggggccggtggagcgacaggtggtgcggatcatcacgcctggcaccgtcagtgatgaagccctgctcgacgagcatcgcgacaacctgctggccgccgtggtcggtgacgagaaactcttcggcttgtcgatgctggacatcaccagcggccgtttcagcgtgcaggaattcggcggctgggaaaccctgctggccgaggtggaacgcctgaaccctgccgagctgatgattcccgacgattggccggcgaatctcccgctggaaaagcgccgtggtgtgcgtcgccgtgcgccctgggacttcgaccgcgacagcgccttcaaaggcctgtgccagcagttcggcactcaggacctgaaaggcttcggttgcgagaagctgaccctggccatcggcgccgccggttgcctgctgacctacgccaaggaaacccaacgcaccgcgctgcatcatttgcgcagcctgcgccacgagcgcctcgatgacaccgtaatcctcgacggcgcaacgcgacgcaacctggagctggacatcaatctcggcggcgggcgcgacaacacactgcaatcggtggtcgaccgctgccagaccgccatgggcagccggttgctcagccgctggctcaaccgcccgctgcgtgatcgcggtgtgctcgaagcccgtcaggattcgatcacctgcctgctcgaacattatcgcttcgagcagatccagcctcagctcaaggaaatcggcgaccttgagcgcatcctggcgcggatcggcctgcgtaacgcccgcccacgcgacctggcgcggctgcgcgatgcactcgccgccctgccgcaactgcaaggcgccatgcaagaactggtagcgccgcatctcaccgggcttgctgccaccatcagcacctacccggagctcgcggcgctgctggcaaaagccatcattgacaatccgccagcggtcatccgcgagggcggcgtgctgaagaccggttacgacgccgagctcgacgagctgcaatcgctttcggaaaacgccggccagtacctgatggacctggaaacccgtgaaaaggcccgcaccggactggccaacctcaaggtcggctacaaccgcgtacacggctatttcatcgaactgccgagcaagcaagccgagtcggctccggccgattacatccgccgccagacgctcaagggcgccgagcgcttcatcacgcccgagctcaaggagttcgaagacaaggcgttgtcggccaagagccgtgccctggcgcgcgagaaacagctctacgacgagttactcgagcgactcatcgaccacctggcgccgctgcaggacagcgcggcggcactggccgagctggacgtgctgagcaacctggccgaacgcgcactgaccctggatctcaaccgcccacgcttcgtcgagcatccctgcctgcagatcgagcaaggccgtcacccggtcgtcgaacaggtcctgcagacgcccttcgtcgccaatgacctcaacctcgatgacgagacgcggatgctggtgattaccggaccgaacatgggcggtaaatcgacctacatgcgtcagacggcgctgatcgtgttgctggcgcagattggcagcttcgtgccggccaaggcgtgtgaactgtcgctggtcgaccgcatcttcacccgtatcggctcctccgatgacctggccggcggccgctccaccttcatggtcgagatgagcgagaccgccaatatcctgcacaacgccagcgatcgcagcctggtactgatggacgaagtcggtcgcggcaccagcaccttcgacgggctctcgctggcctgggcagccgccgagcacctggcccagctgcgggccttcaccctgttcgccacccattacttcgaactgaccgtgctgccggaaagcgagccggtagtggccaacgtgcacctgtctgccaccgagcacaacgagcgcatcgttttcctgcaccacgtgctgccgggaccggcaagccagagctacggcctggcagtggcacaactggccggtgtgcccggcgaagtgatccagcgcgcacgcgaccatctgtcgcgcctggaaactaccagcctgccgcacgaaacgccgagaatgcccgcgggtcagccggctccgccgatgcagaacgacctgttcgccagcctgccgcacccggtcatcgaagaattgggacgtatcaatcccgacaatatgactccgcgccaggcgctggacctgctatacaacttgaaaacgcgcgtctgacggctagaaaaagctgctagaatcgcgcgcattttttggatacatgcggcatttgcctggtgccgccgtagcctgccgaacgggggcgtcattgcaacgccacctgacacgcccgaggagatagctagaaatgaccttcgtcgtcaccgacaactgcatcaagtgcaaatacaccgactgcgtggaagtctgcccggtggactgcttctacgaaggcccgaattttctggtcattcacccggacgaatgcatcgactgtgcgctctgcgagcctgagtgcccggcgcaggccatcttctccgaggacgaggttccggatgatcagcaggagttcatcgagctgaacgccgatctcgcggaagtctggccgaacatcaccgagaagaaggatgcgctgccggacgccgaggaatgggacggtgtgaaggacaagctgcagcatctggagcgctgattccgttcagcccgcaaaacaaaaatgcccgcatatgcgggcattttttttagcctgaatcaggcgcgatcgatgcccttcttcagggtgtccttggcctcgcccttgacctgctgggcgtcgcctttgatttcctggcgctggccctcactcttcatacgctcgttgtcggttgcctcaccgagaccctgcttcgctttgccggccgcttcattgaggttgcctttcattttgtcttcggtactgctcatggcatcttcctcttgcttgatgggttactgcagtggactgggccgcttggcagatagtttcgcttttccgagcaacggtaccgccgcagacctcacgccatggtttcagccactgcgcgccttcaccagacggttgaacagcgggcggcccgccagatgcagaaataccggggcaccggcaatcagatagaagtaataggtcacgaaacgccagatcaggatggcggcagcggcggtcgacttgcccaccaacggcgtgagcaatgccgccgatgccagttcagcgctgccggcaccgccgggcaacagactcaattgcccggcagtcaaagccagcagctgaacgataaaggtccaggcccaggccagctgactgcccagcccttgcagggtgagatacaacacgctgtagcgcagcagccaatgcaaggtggtcaaaatgaacaccccgagcaagacggcccgcggcaggcgaaaacactccagcagcgcattgcgaaagctcagcactttgcgtgcccagtagcgcttgcgagcagccttcatgcccaaccgaccgaccagccagccgttgagcctgaacacctgtcgatggaaacgcccgagcagcgccaatagcaccatcagaccgatcaacaacgccgcgctgaaacccagcaggctggcgatataggtgttcagcgagtgggtcaccgcataaatcagtacgcccaccagcgcacaggcgaagaacagcagatcggtgagctgttcgacggcataggtggccgtgcccctggccggcgccacgccctggcgcagcagcaaggccatcatggtcagcggcccaccggcgccacccggcgtggcgcagatggcgaactcggtggcgacgaccaccccaagagcccggcgctgccctagtcgccgcctgcctatcagcaggcgcaggcggcatgcgttgaggttccagccgagcaggaccatgccgaccatgccgagcagcaaccagggcgggaaatgtaccagccgctcgaacagcccgctgccgcccagcaacagcggaatcagcgcggcaaccagcaacgcccccagcagcaaccaccagcggcgactcatgccaccgcgctcgaggccaacgagtagcgactcagccaattgatcttggttaccggctgcctgccgtcgtccagcagccgcgtcaacaggtccagccaatagcgacgcgaaaactcgtggcgcatatccaccggatgcaggcccaggcgcagcaccgacgcgtgtcgatgtcgatcgagcatccgctcgctgaccaggcgcgagacaccacgacgccaggcgctacgcgcgctccagaccagccccggcgcatcgatggcggtgtaatcgggcagcaggtagagatgcccaggatcgctggtataggtcaggccggttttcgccagtgcccgcctcgccccggggcccagcaaccatgccggcgcgacgaagccatgcagtggccattgcagccgggcgaacaggtcgattccctgccacagacgcaccgatgcctcggcctcgtccagcggatagaactccccttcatgggtaaagacgcggcgcatgaaccagtcacggggcgagcgcggtgccggcgcgtcgtcggagtgaaggtagccgtgcaggatcagctcgtcgccgcgtgacagccgaccgtcgagcatccggcagaatcctgggtgcgcttcgaggcggttgcgttggtgaaaatccggcactaccagccaggagattggaacgttgcccagcgcatcgaccgcgcgaacgaacggctcgtagtccacccaggtttcaggggcgacgtcgtgcaacaccagcatcagactgcgttcagccatgcacggcgaccggtagatcagccgtgcccagcacggcgtgataatgcgccagcagacctgcaaccacagcatcccaggcgtgatgggcctcgacgtgctgacgggcctgagcgcccagcagccgagggtcgtcttcgaacagttcgcgcaccgtctgcgccatcgactgcgcgtccagcggccgacacagccggccggtatggaacggcaccagctccggcaaagccccggcccgcgcggcgatcaccgggataccgctggccatcgcctccagcgcgaccaaaccgaaggtttcctggttaccggcatgcagcagtacatcgcagctggccatgtagcgcgccacatcggcggcgggacagaagcggtcgatcaccgaaacgttttccggcacccgatggggcatgctcgaccccaccagcagcaggtgatacggcttgccgagcaaccgtgcggtgtccagcaagacatcgatgttcttttccctcgagccgcgcccggcgaagatcaacaggcgcgtgtcgtcttccaacccaagcgtgcggcgcatttccgggtcacgccgatccgggcggaaggtctcgagatcgacacccagcggttgcacgtagacgttgccgacccccagcgcctttagcttttccgccatgacccagcttggcgccaggacccgatcgaaactgctgtacaagcgcgaaacgtagccgttcatgttggtgccgagccagccgccgatgcggttgctgaccagtaaaggcaggtccgagtgatagaagccgatcaccggaacatcgagacgccgcccggcatccagcgccgcccaggcggtcatgtacggatcgccgacctcaatgacgtcagggcgtagcgcacgcagctggttgcgccaaggtgcccgccgtaccgggaaacgataacccttgccgaaaggcaaggcaggcgcggggatctgatagatgccggcgtgatggctatagctatcgcccggaaccaggatgctgtggcgaacccccgaatacagttgcaggcggcgatgcttggcctcgagataggtacgcaccccaccactggcaggtgcgtagaacatggtcatgtcggcgatgtgcaagatgaagcgtctccgtgaggtctcgatgcgcaaccttcggatggcgaaacagacaatggtcggtccacagcctcatcaagccaaagcctgatccgaaagattccgcaatgaaatcaatggaccaccgggctagacggttgttcgcaagcgtctcggcttatcgatcgttcacgctcggctcgctcattgctcgatacgcttgtcgccttcgttcttaccctgcgccgatgcgtgttcgatgaccgcgttcatctcggcgccgaacagcagcacggcagcggatatatagaagtaaagcagcaacacgatgacggcaccgatactgccgtaggtggcgtcgtagttgccgaagttctgcacgtagacgccgaaggccaccgaagccgctatccagacgatcaccgagagcaccgacccgggcgtgatgaagcgaaactcctgctcgacatccggcgtgacgtagtacagcaaggccaccaccagcatcatcaggatcacgaccaccggccaacgcaaccacgtccacaacaccacgacgatctctttcaaccccacctgggcggcgagccattccatcacctgcggcccgatcaccatcaaaccggccgttgcgagcaggatcagcgccatgccgatggtgtacacgatcgccagcagcatgagcttccaggtcggccgcccctcctggacgtcgtatgccttgttcatggcgttcatcaacgagcgcacaccgatcgaagcggaccagagcgcaacgaggatgcccaccgataacagaccactcttctgcgtctgcatctggtcgatcaccggattgaccagatccagcgcatcgggtggcaacacgagcgaaacctgttcgcgtagccagtcgaaaaagttctgcagatccagcatgcccagcatggcgatgaggaatagcagaaaaggaaacagcgaaaagatcgctcgataggccagtgccgacgcataggtcgccatgtcgtcattgctgaattccttgaaggtgcgtttcaacaactcgaaaccgccgatgccgcgcgtttccagcaatgccattacctcacccccacctaaagaaagaacaccattcaaaaatgggacgacccggccctgcaagagttcgccggcaccctctcagcggtcgccagacactgcatgcaagccgaccgggagcgtccgcgcacgacgccgcccgctctcgcacatggagactcggcaggggccgcgatccggctcgccaaggaactttccgccgtgtcgacgctcttgatggagtcccagttcagccatccgctgactgcaggcgaagccgcgtagcacgaccggcgggtttgcttcaagccgcgactcgccccggcagttgccgcccgaatatgccagacatggttaacgtcgttatttacggccgcaggagcatcgaatgaaatcggcatgtgcaacggacgccgtccaacctggaatgaaagccgacctcatcaaatatgcccggctgatcctcaccaagggcagcggggctgccgctacgctgggcctgaacatcctactggcacgactgctggtgcccgagctcgcgggtacggtgttcttttgcgtcgcgctgggtatttttctgtcgctggtggcacgcctgggtctcgacattgcgtgcttgaagaacatttcgtccctgagcgaaggccagcagcggcgatacttccaccgcgcactcggcctcgccgcgctgatgaacgtaccggcctttctgattggcctggtggtggtgtatttctcggaaaccacccaggcctatttcgcccatgccagcgttctcttcgccgtcaccgcgcttggcgtttcattgctcagcatcgccagcgaaaccctcaaggcgaagcataggaccagcgaaggcctgttctggcagaccgccttccaacctaccctgacactgctgctggtgtcggtgaccggtcatgatctgggcaccgtggcggcctgcttcgccatcagctacgcattggcgatcgcaggctccatatggcgcgccagcgccagcctgccgacaggggactcggcaccgggcatgggctggcgcgagatgcttattctgtgcgtgccactgatgctcatcgcggtgatgaacagcatcatcgagttgtccgacacgctgctactcggtgttttgcgctcggccagcgaagtcagcgtctactatgtcgcggcaaagatcgccgccctctcgacgacgctgctgttcatcatcaacggcaccatcggcccgcacatatcaaaatgctgggcgcagcgcgaccatgccggggccttcgccatggtgcgcaagtactcgcggttcatgctggctctcgcgctggtcatcctgctcgccatcgtcctgctgcgtgagtacatccttgcggtgttcggccccgagtaccgcgaacagggcgtgtttccgctgctggtgctcgcgctgggctatttcttcgtgctggcggcaggcccactgggcatcttcatgaccatgaccggcaatcaccgccgttatctgcacaacaacatcgccgcctgcgtgatcaacctcgtgctgaacctcatcctcatcccgcgctatggcgtcaacggcgcctgcttcgccaccgccgtggcgctgaccgtgaagaacaccctgctctatgtgcaattcaaacaaatcgaaaggagtccgacgccatgactgaccgggttaacgtaatcgcttacggagcctatgaccggcacaactatggcgacctgctctttgccatcgtcctcaagcgttatctcgaagccaatggccgctttaaggtcctggttgctgccaccaagaaatccgatctttcccgttacggcgcactgcctaccgtcccgctgaaaaaagcgctggacgctacgcgtcagcaaccgaaaacgatgcttatcgtggccggcggcgaatgcctgacggcgcagtgggaaagcatcatcggctatctggcgccccaggcgatctactacccgatcaaggcgagcccctacctgatcggccacaaggcgttcattagcctgagccgcctgttcacctcgattccctcggatattccgctggtgctgggcgaacgcgacctgcccggctacaaggtgatgtacaacagcgtgggtggcaacgagatcagccgcaagaaaccgctcattcacgaggcgatcaaacgcaacctcgaagactgcacctacgtctcggtgcgcgatcgcgaaacctccgcagagttggacaagctcgggatcaaacacaatctggtgcccgacagcgccatcctgatctcggacatcttcgtgcagccgacggcgccggccgaacccgggcatatcgtgttccacatttcggaccaccacgccaagcggcgcatcgaggcgatcgcacagcagctgaccgagctgaacgtcacgaccggcctgaagatcgcactgctgaccatcggcaaggcgcccgggcattccgacgacggcccgctggacaaactgcacagcctgctgggtgatgagcgcgcctatcgcgtcgatagcggcaatatcgacgacatcatccgctgcatcgccactagcaagctttactgtggcaccagcctgcacggtgccattaccgccctggcctatgccgtgccgcaaatcgccctgctgcctcagcgcgtgatcaagctttcgagcttcctcgaaacctgggtgccgaagcagtcgtgcgggttcgccgaagtaccgcagatcagccagatcggcgccaacctgatcaaggctttcggcgacacgcaacgagccgaactgcgcgccgtggtcgaggcgatgaagagtcgtgtacgagccaacctcgaccacatggtcgaactctacgatcaggcaccggcccgcgacgaatcgcctgaccggggcaacaaggcgcgcgcagccgtggccgcgaactgaccgtagcgccagccgcatcatggcgcctaggaccggcgggctcctgccgccgcgtccgcccgcaacggcggacggcatggcaagcgggtcggcgagcaccggctgaccggtccaaaggccgccacctccttctgcaaccctgcgaaaggtccgtggcgggcttgcttacacgccgccgttggcgtggtgtcgccagccgcgcacatagcgccgatatgggtctacgcttgcttgatgcaagacgaccatcaactggcgataggcgcgaaactgccgagccgagtagagatcgccgccgatagcctcgacgcgctcacctcgacgaggtgccccggccgtccgccccgccctgcggaggagccctatgaacagcaaaaacaccatctgcctctggtacgacggcaccgccctggatgccgctacgttctatgccgccacctttccgaacagtgcggtcggccccgtcatgcatgcgccgggcgactacccgtccggccaggaaggcgatgtcctgaccgtcgaattcaccgtagcgggcatcccctgcctgggtctgaatggcggccccgcgttcaagcacagcgaagcattttcgttccagatcgcgaccaacgaccaagccgaaacagaccgtctatggaatgccatcgtcgacaatggcggcgaggaaagcgcctgcggctggtgcaaggacaaatgggggctgtcctggcaaatcacgccacgcattctgaccgccgcaatgaccggccccgaccgggcagccgccaagcgtgccttcgacgcgatgatgggcatgaagaagatcgatatcgccgccatcgaggcagcgctggcgtcctagcagacactattttgttgaatgccggggcgttgcgcatcgccccggctacaaggcccggcggcctcggccgactgcgccgcatcgtgaacgatgcgactcgcacatccttgcctgcggcgccgcgctttccaacactcgctactcctcgaaacgatcggtgccttcccgatcaccccggtagcacttggcgaccggaaacgccggcaaccaggactcgcgacgaacgacccagctttcataggttggcatcaactggtccggggcatccagcgcccccaggtgaacctcgacctcatccccgctacgcgcgtaaaccgacgagccacaccgcgggcaaaagaatcgaccggcgtactcgctcgcctcaccctcgatcgtcaccgcatcctgcgcgaacaccgcagccgcatagaacagcgcgccatgatgcttgcggcagtcaagacagtgacaaagcccgacacggtacgggcgccctgtcgccacaagccgaacaccgccgcaaaggcaaccacctgtaaatgaacccacggctttcctcctcgagcaaaggatcaaggttgaccagccggaagatcgacacgcatcaccagcgcatcattgccatgcccgcgcggatcggctgccagcttacgtacagggagtaaaggttacgggccccttattgcaaacgacgtggtaaagactcggcaatctcagcaacgagattgctggccggtcattcagcccagacgggcctgcaagacgcttcgaattaggttccactataatgaccagcacgttgcgaacgaggttttatccatgtccaatctgacattggaagataagaaggcttactacgctaaggtccgccaatcgaactatgccgctagcctgcgcctggaaggcttcgagaccacaccagctgacgctaagcgcaaactcccaactcgcgaagctgccctgagagccatacgcgctcggcaggcctgatgctcgataagtacggcgttggtcaggatcctctctctacccgggcaccacggttctacgcaaccgcttcgacctgaccgatgaccaagcgcttcacgatgctgagcgcaccctctccgaaatcgctgcgtccgctatcgatttcgatcttccgccttacgaccttccgtatctacagcgtatccatcgcaccttgttcgtagacatctacgaatgggccggagagcttcggacagtcgatatatccaaaggcaaatggcgatctgaacatgatccatcctttccgttaggggaacggacgggcgcagcggatcctgttcgaccacatcatcatcaatgctggccacgaaataagctggtgggaagtcgaagagagcgagtggatccaggccaacgttgacgcggtcgtctgcgactatcaactcatgaccgagattttccagcgctgtatcggccaggccatcagatagcgagacccgaacgggacacttgcgcgaaaccaccccaaacgaaaaagggctagccgaagctaaccctttgatttcattggtgccggtgagaggagtcgaacccccgaccttcgcattacgaatgcgctgctctacctactgagctacaccggcatcgagcggcgcattatctgatttcgccgatgcagactcaaggcccgcatcggctaaatgacgctgccgtcgtcagctgctacagcccggcggtggagcctgccgtggagctgttgccactggttgtggagcgacttgcgtcatggttgctgctctgcttgacctgctcagccatctcctggcctttggcggacaccttctggtagccctcctcagccttgtgacgcagccgatcggtcatgcggtcgctgacttcacccagcgcttcgtcctcacggcgcgtcggtggcaccgctgccgccagcagggcaccaagcgcgatgccgatggcaccgagcgccaagggttgctcctgcagcagatggttgaaaccaccacgggcacggtcggcgccgccgcgcaggcgttccgatgcctggcgcctggagtcgctagcccggctgcgcgcattgccgagcgactcggaaacgctatgccccatctggctggctttctccttgatatcggcaccctgttgcttgatacccgaagttttcgcggaaagcttctcacccatcgacggaccggatgagctggttccgtagcctgtcgtgctgacattcgaatgtggctggcggttttgcccggccatcatccagagcaggccgatggaggtcagcaccgtcggtaccggattggccttcaccgtgttgctcaggttggagaagaactcgccgcctccacctttcacgtagcccagtgccgtatcgatgagctcgcctggagacagcttgttttccagtgcgtggacaatgttgccgatctcggcacgctgctggtcgatctcccgctccagctcggcggggtccttctgtgcttcggcatctatctgattacgagtgctcatgatgtgtgccccctgacagcttctttatccttgttgaccgagtggatggtgcgctcgggcttgaatgacgacgcctcgaacttcttcttgccggcggacaccatgatcagcccgatcaccaccacgacaccgccaacgatcagcgccgcaagccatggctccatgaccttgctcaggccgtagacggcggacatcaacagaacgatgaagcctccgagcagcacggctccgccggtggcgacgctggcggcgcctgccttggtcgcgcggagggattcgttcagctcagctttggccagcgccagttccttggttatcaaggacggcacttcgtgggtcagctgccgcagcaggccacctaccgaggtgtcattttcgctgcgcatgcccggttcgggtgtgctgaccgtactggtggtcgtcgttgtcttacgtgcttcgctcatgggtatagccctccgtcagtacctttaccgtctcgactggaattggcgcctagtccggtccctgaagtggagcccaggccagtgttgctgctcgcactgccgacacccgaggaacccatccccagccctgctccggtgtccgcgggcgtagccgtgctggaggtcgtggcgcgggacgtaccggctacggacgaggggcccgcattgctgatgctgccgaccgtgcctggctcgtctgtgcggaggcgatcgttgagtgtcttctgatcggatggctggtacccatcgtgggacgaaccactgcgaccgctggaagacgaaaaggcgctgtccgaggagccatagtcaccctggctggctcgctttccggaggcgcgggcgaatctagtcagcccgaagcccagagcgacgctgccggcaatgaacaaacccggattgttgcgcgccaggcgattcacgtcctggaagagttcgtccacgcttttgccgcgcaggtcatcggaaagcctgaccatgctctcggccatgctcgacacatagttggaaagccccaggcgatcctgctcttgcagctcatcggccgcagccttggcgctctgggcgaccttctcgagctcatcggcagccgtctcgcggtagccttcaagctggctcttgccttgggttttcacctcgtcggcagcttgcctggccttggccttggcatcctcggtgacgtgcccagaggtcgaaccggatgtcgactggcctgtgctcgatgtggaggttgaggttgaggtgttggtggcggagttggggccggtcttgggttggccaccgtaaccggtgatttcttcgtcgggtgtcgtcatttggtttcacctttgtatggcttggccgtaagaccacggtccgtaggaacacagtcgcagtagtgacggcgagctgcgtatttaagtgcgcacatataaggtgaccgggcccctattttcgagttccattatttcgaaccgctcgaagggcgcggagaatttgacgagacttgaaacttacggtggtgcttttaatcgcagatctgatggcaagttgactgccaaatcgctatgaaccgcatatctgctgcctttaagcgcagcgccccaattaacaagcgaagcgacaagaacccctggatatgggttcgtattaagaaggcgaacttctgcacatcaccagcgagcgaaaccgcagccgacgagttgcagtgtttgttagcggcggcatcgtttttggacgcaaaaaaacgggcccgaagacccgttcttttttacgccggtcgccgttacagcggaccgatggtggagcaggttttctttgccgaagcatacttttgcagcggtgccagctgagggcggtacttaccgcttgagacgtccaacgccatgatgttctcaccccagcgaggaccggcagcccaataggtgctcgggatgcagttctcggcaaggtacgccagcagcttgtcggtagcgactacagcagacggggagaagtccggaatgccgtgctcgcccaggtaaccgcgcagcttgttggctttcagccactcgacccacggcttgacccgctcgacacccaggttcggggcaaaggtttccgcggtgttgcgataggtgcccgaataatcgctatccaggtactggtgcgcttcgtagaccaggttgttcttcggatcgcgcatccacggatcgttgatcagctgggtgttgtacttctgccaatggaaggcgctcgagtagcggtcaccggcgatcatgatccacttggtcggatcgaccgtacggatcgcctgtccggctgcctgcgcagtctgcggccagaggttgttaccggtgttgtacggctcgttcatcagaccgtagccatacagcgccggatgcttggaaacctgcagagcaatcttgcgccaggtttcagcgaactgcgcccgcggcacttccggcgaattgattaccttgccgtagtagcggtagtagttgtgcatatcaaggatgaccttgatgccgtacttctgagcgtaatccagggactgcttgatgcgcgccagttcggcggcgtccagctcggtacccagcttgggctggattcgctcccagaggaagcccaggcgaaccagcttgaaaccaaggccggcgtgacgcttgtagtaggactcgtcggcgaaggtgtagcccttgttatagatgcccggaacgttcgccgggtcgaacacgcccgagccaaagttcacgccgaccaggtcgatcccgctgccatcgctgacgaccggagtcgtgggtgccggggcaggagctggggccggtgccggagcaggcgtcgaggtaaccggagctgtcggcgcggtcgtgccgccggtgctggacaccacgctgatggtcttcggataaccaacggcgctggcggacagcgttgagccgctcagcatgacggagagatgctcgcccacgtcataaacggcagcgacctggcgtacctggccatcggccagtttcaccgaagcccccttaacgaacgaggccttgttggcggtggtgtcgggaaccgagaagccagccgccttgcgatagatgccgttttcccagtcggagttggtgaagctgttcaacccagcgctgtaggtcgtactggacgagggcgcagtcggcgcgggggccggtgttggcgcaggctgggttacggccggagaggtggtgccggtggtggatgccacgctgacagccttcggataaccgacgacgctgccagacagcgcggagccgcccatcatgatcgagagattggcacccgtgtcgtagaccgcggtgatcttgcgcacctggccgtccgccagctttgccgacgcaccgacaacgaacgcagccttgttggcggcagtgtccgggatcgagaaaccgggcgagcggcgatagatcccgcgatcccaatccgtattgctgaagttatttaccgcaaccgagagcgtgctgctcggagcaaccactgtcggagccggagcctttgcagccggagcttctacggaggcgaccacagtgctgacggtacgcggtgcgccgactttggcgccgtcgagcaggccaccgtctacataaatgctgatgttgttaccgacgacatagaccttggtgatcttgcgaacctggccatcagcaaacttgatctggacgcccggcttgaatgcggcaatcgcggcggagcttgccgggacggaaagcgcagcggtccggcgccatacaccgttgaggaagtcggtgctggtgaaggtgttgatcttggaagtgaaagcggccgtggacgaggcgcttaccgtgatgtcagcagtcgcttcgccagtgaaaactactgcgccgaacagggcggcaagggcgatggaacgggcaagtgcgcgaggggcacccgtcaatacgttgatagacattcagtctctccggaacttaatacttcaaaaggccgaagcctttaaaaaagtggcgggagttttaattaagtcgtgcaggcgcttactggagcagaggcatcacttcgcgcaaccggacgaaccgcgttacaacgaacgccggatcaccagtgaggggaaccggcaatccgttgcgtggcgcctttataatagctttcaaaaactattcaaaatttttttgacggatttagatcgccaactctccgccacatttttgaccggccattaatccgctattagaagctgtctttttgctatcaggcttaatagccttccagcccctttaacccgtttcattactagcctgtcggcgtcatttttttgaattagccacgtcacagaacgtggattctgctatggattcagccgacgaacggtcaaagcaaggcagccccgtttccggtcggcttataagagaggaagcgatgtttccgcccgcgttattcctcgtcagcccaccggcctataaggaaccgctcatgacgcagcagaaattcaaggttggcgaccacgtccgctggaactcggaggcaggccatgtgacggggcgcatcgtcaaagtccatacgcaggacaccgactacaaaggccataagcggcgtgccagtccggatgaaccgcaatacgagatcgagagcgacaagacggaccacgtggcgatgcacaagggcagtgcgctgagcaggatcgaatgattgccgccgcgccacgacagatctggacgattggccattccacccgcacgcccgaagccttcgtcgcgttactcgagcactacggcatcgaggccatcgcggatgtccgccgcttcccgggttcgaggcgcttgccgcaattcgcatcggcgaatcttgaagcgacgctccgcgaacaggggatcgcctatcagtggatcgagcaactgggcggcagacgtcgggcctcacccgggccgagctcgagcgcgtggcgcaacgcgtcctttcggggctacgccgagcacgtgcggaccgaggagttcgccaccgggctggagcagctgctgcgcctggccgccgagcgacgcaccgcgatgatgtgcgccgaagtgctctggtggcgctgccatcgctccatcgtgtcggatgtgctgaagttgcggggaatagaggtgctgcatattcaggacgaacagcgcctgacggttcatccttttacctcgccggcgcgactcgacgacggcgagctcacctatgcagaaactgccggcgtgccattgaagacacccaccagtcgataaagcctgcgtgcagcaacgcctgtcgcccggctccgttccagtatcggctgcccctcgtcgcccggcgcgtagaactttccggccgttatggcttcttatcggccaatagcagccaaaccgcgccgagcgggaccagccgagccagcgtattggtcgatgccaggctgcagtgaagcgcacgcttgtaagctgctcatcagggaggagagctcgatgtcaggcctttatcgaacaggcaagcgtaccctggccaggcaatggctctcgggaggcgcgtcgtccaaggtgttcaagggcatggcaaccctggcggtcggcaacgggctggccaggatcgttggcctggccagcattccgatcctcacgcggatctacgccccggagcatttcggggtgctctcggtattcaccgccctgctactgatcctcacaccgctgctgacgctgcgttatgaactggctgtgccgctaccgcgccgcgacggtgccgccatgacgttgatggccatttcggcctgcatggtcgtcgtgatgacgctggtcctgactgtcctgctcgggctcgcaggcccggccatgctgaaactggtatcggccgaggcattgataccctacggctggattctggtcgccgcgctgttcagcgccgggctgtatgaggtgctgctgatctgggcggtaaggcgccgcgcctaccctgcaatcgcacgcactcagctccagcagagtgccgtgggttcgattgcaaagattgcgctgggattagttggactgaagccgctcgggcttctggcaggccaggcgttaggcgccggcgcggggacgatgtcgctgattcgactgttcggagaggacgtgaggcgttattggcgacatgtcacgccaaaacgagcatggtgcctgctggcgcactaccggagttttccgatctatcggctaccgtcacagttgctgcagattttctccagccaggcgccgttgctgctgacagctgcactttacgatgcccagaccacggggcaactcgggttggcgatgatgaccttggccttgccgatgaatcttctgggccactcgacaagcaaggcgtactacgccgaaatcgcctccatcggacgcaaacggccggacgccatccgcagcgttacctattcggtcatcaagcggctgttgctgttggcactggcgccgacgctactgctacttatcttcggcgccccgctgttcgcgctggtattcgggccccagtggaccctcgcgggcgagctggcttcgatactggcgctctacctgctgtttcagttcatgcatgctccggcgtcccacctgctatcggtgttcgagggccagcggctgcatctgatgctgaacgttcagcgcaccgcactaacgctcgccggcttcgcggccggctatctgttcgatctgccgatcactacggtgatgctgctttatgcgatcgccttgtcagcccactacctgttcagtctggtcgtgacattgagagtgattccacgctaggcaaggctaccgctgtctcgatgcgccagccgcccttccctggccagcctggccagcctgcccgggtgaccgtcaaggttcgcgcttgagtgcgttccagccgccaacgcgacgtgcgcctgaaaaaacgttgcgcgagaggtaaaagaagaacaatgggatgcccaccgcgtagcgcttgaacaagcggcgcggctcgatgagcatgcggaacgcccattccaaaccgaaccggcggaacagcatcggcgcacgcggaaaacgctgggcagaaaaatccaggatcgccccaccacagatcagcagcgcacgggtgttcatcgccttctgcaaatgcagcgcgacgtgctcctgcttgggcatgcccatcgccagaacgacgatcggaaagcgccccggcacatggtgctggcggtagaacttgaggtattcctcggcccgcttgaatccatcgatagcatggaagctgcgatccccgaacaacttgcgcgcgccatcgctcagccagggctcgcgcgtgcccatagcgaacaattcatagcgatcctcagaatcgccgaccagatcctcgatcagttcgggaatgaagtcggagccgttcaggttggctttcggatcgcgcccattgaacagacaggcgatctttatgccgatgccgtcgcgcaacaggtagttgacctgcatgaaactgtccagaaccgatgtatggcgctgcgcgatgttgtacccgtgctggttgagaaagcccaggatggtgggcgactcacgcttcttcagctcggaaataaaagggccggtatccgtctcatccagtagtttcagcttccctatcaaaggatccatccttttggtgacgggatttttcataagtagcttctctgtctgtaaaacaaaaatgtgtatgtcgtgaccttcggcgcagcacgcctattgccgtgctatcaccgtgtggaagatttgcctgaaaaaactgaacaatgccggcctgtgccggacaaacgaagcagccgccttcgcggcatcttccacttggaatttgaggtagtcagatgttaaggacacgtagcgcttcgaaacgatcaaaaggaatactcctcggactcgcgcttgtgctcgggagtgccgccagcgaagcagaaaatatagacctgatcggcctgaacatcggcggagcggcgttttctggcaatgtgataccaggaaaatataaaacaaattatttcttcccggcgcccggctatctggagcaatggaaagccaaaggcatcaagaccattcgcttccctatcatgtgggaacgtctccaacatgaacttaacggcgaacttgatgaggattatgcacaactgatcgagcagacattcgagcaggccgccgataatgacataggtgtcatcctcgatatacacaactatgcccgctatcaaaaacagctcataggaaccgatgccgtaccgatatcggcctatgaagatttgctcgaacgcatcgccaagcgctggaaggaacagcccggactctacgcctacgacatcatgaacgagccgcacggcgccgacgaatattggccggccgcagcccaggccggtatcgatgccatccgaagacacgacaaggagcgccctttgttcattgaaggcaacttctggtcgagcagttatcgctggcccaaattcaatgatccgctgctgcaattgaaagacccctccgacaagttgatattttccgcccatctctacctggacaaacacggtagcggacaatacaaggagccgctggaagatgacttcgacaccatgctgggcgtcgaacgcgtcaaaccttttgtcgactggttgatcaagcacggcagacaaggccatatcggggagttcggtattccttccgacgatccacgattgctcgaagcgatggataatctgctggcttacctgcaacaacactgcatccccatgacctattgggcagcgggttcgtcctggggcaagtacaagctatcggtcgaaccgcaggatggccgcgaccgcccacaatgggcggttctggacaagtacatcggccagggcgattgcagccgcatcgggccgatccggtgagcgtcggcccggtgccgcgtcgagccttcagcctttcgaggagggcgccaccggcgcccatctgctcagcaccgacctgaccttgccggctagcctggtcttcaggctataactcttgcgcagcgcgttggccttgaggttataaacctgaccaggcacgtacatctcgttggtctcgatgcagtacaccggcttgccgctgagtttcatgatttcaaccgcctgcctgacctcgctttcgacgaacaggcgcgccagcggttgcttggcatagacctccgctttgaacttgtgatggatgttcagccgacgacgctcttcagccgtgggcagatcgagcatgtgcagcgttccgtactgcacgccgttgcgcgccaaccactcctccgtttcggcgcgatatctctcaagccgactggttaccaggtgcgcgaccttgacagagggcacgaacaaggaacgcgtgcctttgagaaaggcccggtagttcggcccgtcgtcattctcctcgtgggtcgggtcaacgcagagcacaccgtcgatatccaggcacgcctgggccaggaaggggtggtgcatgatgttccattcgaatacccgcggttgctcgacgagctcgaggtgcacgtccacgagatgccgattgtgccgttcggcaaacgccgccaaggtcacgacgctgccggcgtaggttgcgcggacctgttccagtgcgacttgcatcgacttgcccgaggagatgctgtcgtccaccaacagaaccttcttggcgtcccatggcttgactagctcggcgagcttgtaggtgcgggtattgccttttttcagttcgtcgttgcgcaaaaacgaatagagatccgtcagtggcaggttctgcttcaatgcaatgatgctggcaaccagcatcccgctgcgcggaataccgatcactaactcgatatcgtctggaatctggctggcgcactcggtgctgagccgcgacaagtcattcaggcttcggtaattcatcgaacactcctgcgccctgttctgggcccacctggaaagcgagccgtcctatctatcctttaacgccccaaggacgcgcgtagttgcttggtatgtgtatgcacgtagtgcaatacataaagggcgaacgcgttgggtttcgaaaaattcagaaaacgcgttctgatatccatatcttcacgaatcgcctcgaagcgtctcttatgcgagacaccactggtatcgaagatacaaagtgggaaagacagctgcatgacatcacgctgcagatccaggccctgcagaaattcgagcaacaagcagtaatcggcggacagtttgtagtcgagccggaacttgaactgacgcaaccgctcattctcgaaatacatcgtctggtgactggcgggcaaacccaatggcgcacgttcgattggccgtgcactggtgcgtttcaaaaccccaccggcttcctgacgaaagaagtcgccataaatgaacttcggtttggtcgccgccttcgacagttcatcgttgatccgctctaataccgtcgggtcagcgagcgaatcgccactattgagaaacaaggtataaccaggcgtttcaactgcgcgccggcgacctttatccatcgcgtcataaatgcccttgtccggctcgatggttatttcggcctgactgtcatccagactgttaagccactcgccactgccatctttggatgcaccgtcgatcacgacccagcgaaagttacggtaggtctggtcggtaaggctccgataggtttccttcaggccagccagattattccagtttatagttacgatactgaaacggaccataattcacctgttcgagattggctgtaagaggagtattcgccgtctgcagcttggcgtaataaaggaagaacgccgcggccatgccatatacatcgccggaaaacgtgagcgcatttgaaagcgcgatgttcagcatgctgaccacgaacgacagttgaagcgcagccagaagactgcccttgctcgtacactggcgcattatccagatgaagccgccgtagaaaatcagcgcaacgatcggggtcaggaatccatagcgataatagacaccgaatatgccgacatcggcgaggtagaagtgcgagttatatatccgtgaaaacccaccattccattgcagcgacagcgcgcccataccgatgtaatcgttcgcgccgatcgcatccatgatgatcgcgacggtcgtgtcacgcactcccggtgcggacgtcgcgtcgaacagcagcgcatcgaatcgagcgtactgctcctgatagaactccggcaccagcaagtaggacaccaccaggatcgcgagccccagcacgctcatcttcatcagcgagtcgatacgcttgcggaagatccacacccccgccaacgcccagacaagcatcgtctgccgggtctgcatgaccagccagaggtaggcgacgaagtagagcaggatcaacagcctgccgagcgtcacccgctccttcatgctgtacatcaccatgaaggccgctaccgtgacgaacggcgagccgatacggaagcggttcgggcgcagcaggtcctcgtattgcgtccagtcgtcgaccgtgaaggaagccaccttgttctgcggaatgatccccaggtaataagcgaagcccagggtggcgcagaacagcgcgacgtaaagaaagtacttgcccagctcttcctggctgggcgccgccttcagcagcaggaacagcgtggggaagaacaccaggtactggaagaaccgccgctcctcaagcaacccgtaggccagcggctggccgaaattcaggttggccagcacggcggaaatcagcggcagcaagcagcccatgaaaatgatccacaggctggtcttggactgatagacccacttccatgctacgaacaggcaggccgtggccgcgattacgatcagcaggaacagctcctggaagtacggaatccccgcccgcttgtcgtccgtcaggaagaagcaggtggagttcagcaacagcagcatgaacagcagattcttgtacgccagaactttccttaacaagcgctttccccattctccaggtgtgacgtggcgaacactgaaccgagccgacgcgatttgagcgccgcggcggaggtggttcgccgcggccaggcgtcatgtgccatggatggacaacaaccgcgccaaaaaagtccgcagctctgggccttatgtggccgcgggccattcatcccgcgtcgttggtccggcctggcccgctatacgacacgcgtccttgcgcgatcgcgcggcggtgcacgtcgggcagatcagtgccgggccaggtgctggttctcgacgaaccagcgataagcgtcgcgcaggccgtcttccaggctgatgctcgactgccagccgagcgccttgaggcgcgagacgtccatcagcttgcgcggtgtgccgtccggcttgctgctatcgaaaatcagctcgccctggtattcggtcacgcgggcgatggtttcggccagctcacggatgctgcagtccacaccggttcccacgttgatgtgagacagcatgggctgggtatgggcctgataggcctcgtcgtccagctccatgacatgcacgcaggccgcggccatgtcgtccacgtgcaggaattcgcgctgcggctcgccgctgccccagatcaccacctggttgtcgccacgctgggtcgcttcgtggaagcgcttgagcaaggccggcaccacgtgactgttttccggatggaagttgtcgttggggccatagaggttggtcggcatcacgctgcggtagtcgcggccatactggcggttgtagctctcgcacagtttgatgcccgcgatcttggcaaccgcgtagggctcgttggtcggctccagcacgccggtaaccagcgcctcttccttcatcggttgttcggcgaacttcggatagatgcacgacgagccgaggaacagcagcttctgcacgtcgttgcagtgcgccgcgtggatgatgttcgcttcgaccatcaggttctgatagatgaactcggccggataggtgttgttggcatggatgccgccaaccttggccgaggccatgtagacctgatcgatccggttctcggcgaagaacgcgttcaccgcggcctggtcgaccaggtccagctcttcacgcccgcgcgtgatcagattggtgtagcccaacgcctgcaggcgacggacgattgccgaacccaccatgccacgatgtcccgcgacaaaaatacgtgcgtcacgattcatattcagttctccacactcactggaatgtcaaagccgtgctctttcagcagggcgtggcgctgtgcgaccttgagatcctcgcggaccatctcggcgcacatttcctgcaccgtgatctccggagtccagcccagccgttctttggcccgggtcggatcgccaagcaaggtttcgacttccgccggccggaagtagcgagggtcgatgcgaactatcacgtcgccgacgttgagcgccggcgccttgtccccttcgacgctgacgacaatggcgcgttcatccaccccgctcccttcgaagcgcaactggacgcccagctcggcggccgaccacttgatgaactcacgcaccgaatactgcacgcccgtggcgatgacgaagtcctcggcctgctcctgctgcagcatcatccattgcatgcgcacgtagtccttggcgtgcccccagtcgcgcagtgcatcgaggttgcccatgtgcaggcatttctccaggccttgggcgatgttcgccaggccccgggtgatcttgcgggtcacgaaggtctcgccgcggcgtggcgattcgtggttgaacagaatcccgttgcaggcatacatgccgtaggactcgcgatagttgacggtgatccagtaggcgtagagcttggccaccgcatagggcgagcgcgggtagaagggcgtggtttccttctgtggaatctcctgcaccaggccgtagagctcggatgtcgaggcctgataaaagcgcgtcttcttctccaggcccagcaggcggatggcctccaggatacgcagcgtgcccataccgtcgacatcggcggtgtactcgggagcctcgaagctcaccgcgacatgggattgcgcgccgagattgtaaacctcgtcgggctgcacttcctggatgatgcgggtcaggttggacgagtccgtcaggtcgccgtaatgcagcgcgaaattctgatgttcgacgtgagggtcctgatagatgtggtcgacccgctgcgtattgaacaacgaggcacggcgtttgatgccatgcacctcatagcccttctccagcagaaactcggcgaggtaggaaccgtcctggcccgtaattccggtgatcagcgcgcgtttcttttccatttcagagtacctgtaggttccagatgacaagaggtggtgatgcgggacgaccggcgggcgcaggcgtcatcaggcgccggatgccccgcggtcggttcgatcgattgttggcagtggacgttaacgaagcatgaccgccccgcccggcacggacgtacggacggctcatgcgagcatttcctcgtacagcgcctggtattggcgagcgataaccgggctgtcgaaggtgctggttattttttcccgcgcattgcgcgcgagcgtcgaatagtcggcctcgccggtaatccactcgacgccctcggcgaggcctcgggcttcaaacggcgcggccttatagccgtcgtgcagatgggtcacgatgtccttgggaccggtcgcatcgaagcacaccaccggggtgccgcagcccatggcttcggccagcgtcttgccgaaggcttccatcaggctcggcgcgatgaacacatccgccgccgaatacagcaggcgcagcgagatgctgtcgtgcagatagccgaacgaggtgtagtcgaagcccaggccatcggcgatggactggtcaagcttgccgaagaaacacaggtggtacttggccgggtcgaggtgctcgagcatctcgaggtacttgccgaagcccttgtaggtgtccttggcgctggtgcagccggtgaggatgatctgcttctcggtgttcaagccgagcagttgtcgcgccagcgacttgtccagcgggaagaactcgctggcatcgacgttgttgtgaatggtgcgcacgtcgaaatcacggaacagcaggctctgcctggcctgctcggagacccagtcgctgatgccgatcatcttcatcgacttgggcaggtacttgcgcttgcggttgagcacgaagcgcgacaggtcccgatcggaggagctgccgagctgctcacagctcccgcagccggtggcgaatttttcacagcccatggcgtaatggcagccgcccgtcatcggccacatgtcgcgcatggtccagaccaccggcttatgcagcttggccagatgcttcatgtcgacgaagccgccattgacccagtgcaggtggaccacatcggcctcgcggcattcggcgctgtcggtaaagtccgcgcccatgacgccggcgctgaacatgcccgatgggcgcccacggtacaggctggcgaacgcctggtcggcctggctgcgggcgatgctgatgatcttgtctttcttgctgcggctgaccgagaccaccgaggtgtcgccatgggtaacctggctattggtgtaaacgagcgagtcgacacccagcgagcgcaagccctggtgcagccagtaggcaccgcgtgcggcgccaccggtcaattcgcccgcgaccaaatgtaaaaccttcatatcaatcaacactctcttgcgggtgcggggtctcgcggcgcagcgccgcgtaccacctgcgcgacgcgatcagcacgatcaccatcaacgaggaataaatgacgatgctggcgacggcgaacgcctgcaccgtggccagcgcgttgccgatcagcagcgcaccgccgaacagcgacagcacgcgcagactggtgctgaacatctcgaacagcaggaagcggccttgcagtgaaagcgccggcaccgccaccacacaggggcgcgagacgaagatcacgtactcggccaacgccagccaacgggcatactcgccggccacgtgccactgctcaccgaacaccagggcgaacaaccagggcccgatcaccgcgaccagcgtgaacggcaccagaccgaccaggcccagcgcggcggtggctttgagcagcatcgccgcaaccggctcgcggtcgtggatggcgcggctgatgcgcgggtaatagacatcggcgaccgatttgccgatgaggttggtcggcatcgtcagcgcctgcttgcacagggcgaagaagccggcagcagccgggccgaaataggcggccagtaccagcgtcggcaaatgctgggacaccgcgttgatcagcatgaccggcgcgcgaaacttggggaaatcactgtgctggcgcgccagctcgagcatgccggggctgtcctgctcggcgtcgccgtggtgattgtccgtatgcggtctggcccgcagcatggccaaccccagcatcgccgcatgcaaggcctgctgcagcgccgtggtacaaaccagcaccagcgcagaagattgcagcaggccagcaacggttcggatcgagttgaacagcagcgaatgcccgaccgccacgctggcggtgatgcggaaacgctgggtacggaacagccattgctggcagatttccagcgccgccccgcagaacatgacgaaggggatcagcatcaggtaaggctgaatgatgctgatgtcggccaccgccgccagccgctcaccgaacaactgcagcgcgagggcaaccagcgtcgccagcaccagtgccgtcaccagggccagccgcaccaacccacgcgcatcaccatcgcgcttgggcagcacgatggcgatgggataggtcagcgcggcgaccggaatcaacatcatggtcacgctgagaaaggtccccagcacaccataggcttccggtccgtagatacgggtgatcaccggcatgaaggccagggtgatcgcctgtgcacccgcggtgccggaaaccaccgtgacgatgttacgcagcagcttgctgcgcaagctgccgtgccacagcgcgttcaggcgctcgcgcaacggggaggcgccgcgctgcatgctggactgatcgatggcgctcactcgccgttcctcgctcaggcctggaccggctgacggccgacgccgtagtagctgaagccttcacgcttgacctgctcgcggtcgtactggttacgtccgtcgatgatcagcggaatgttcagcagccgcttgagcgcacggaaatccgggcgccggaacggcttccactcggtgaccaggcacagcgcatcggcatcgatcgcggcctcgtactgaccttctacgatctgcagacgaccgtcggcgaaccaggcttccgggaactcccggcgagcggtctcgcgagcgaccgggtcgaacgcacgcaccttggcgccggcgttgatcaggctgttgatcagcaccacgctcggcgcctcacgcatgtcgtcggtgccgggcttgaacgccaacccccagaccgcgaacgtacggccttcgagatcgccattgaaatgagcggagatcttgttgaacaacgaatgcttttgctgatcgttgcgggcttcgaccgcctgcagcagcttgggctcgaaatcgttctggtgggcgatgttgatcagcgccttgacgtctttcgggaagcaggagccgccgtaaccacagccggcatagatgaagtggtagccgatgcgctcgtccgaaccgatgcccaggcgcacattttccacgtccacctcgagccgctcgcagaggctggcgatctcgttcatgaaggagattttcgtcgccagcatggcgttggccgcgtacttggtcatttccgcgtcgcggatgcccatgaacatggtccgtgggcggttgcgaatgaacggcgcgtacagtgcgctcatcacctggcgggcgtgctcgttgtcggcaccgatgacgatccggtcggggtgcatgaaatcatccaccgcggccccttccttgaggaactccgggttcgataccacggagaattcgatgtcgacgccgcgcgcttcgagacgctcgtttatcgcggcgcgcaccaggtccgccgtgccaaccggtacggtcgacttgttcaccacgatggccggcgcgttcagcatgtcgccgatctgccgagccacttccaggacgtagcgaaggtcggccgagccgtcttcgcctggcggtgtgccgacggcaatgaagaacacctcggactgctctaccgcttcgctcagcgaagtcgtgaaatgcagacgcccggcgctatggttctccgtgacgatctcttcgagacccggctcgtaaataggcagaatgccctgcttgagattatcgatcttggacttgtcgacatcgacgcagtagaccgtgttgcccatttccgcgatgcaggcaccggtaaccagaccgacgtagccgcttccgacgacggtgatgttcatagcaggatcctcgatttagacattgatgcgggcgtgcctcggcgcgacccttgcgggggccgttggcgctattgcttgctgggcagtagtcaatccgggccggcaaccgcattggcggcgcccagcccggcagggacagtgcaaccggatcagaccgtttgctgctcgctgtacccgtagtggtcgtagtagccacggaactgaccgttcttcttggctttctcgatgtcgacgtggttgagcaccaccccgatgaccggcgcgttgctgttctgcaactgactgacccctttctgaacgtgcggaatcagggtgctgtcggacttgaccacgtagatcaccgcatcggcgagcgtcgagagcacggccgcatcgctgaccgcctggctcggtggcgagtcgatgatgatgcggtcataacggcccttgaccacctcgagcagcttggcgaagcgtggcgaagacagcagttccagcggattggacggcaccgcaccggcggcgatcatgtcgacgttaccgacgctgtgaatgcactcttccagcttggcgttgccaccaatgagattgaccaatccaggcgtgcccgacttgaaatcgaacgccttgtccagcgtcgcacggcgcaggtcggcatcgatcagcaggacgcgatgcaactgccccatggcgaacgccaggttggccgacaccgcactcttgccctcgtccggcgccgtggaggtcaccaccagcacctgacgtggctggctggcctcgctgagcagcagattggtacggatggtgcgcacggcttcgcagaaacgcttgtcactgctgcgctcgaacaggtggctgacttccttgcgcagcttacgtggtacctgcggcacgatacccatgaccggcaagccaagcttgttctcgacctcctccgagctcttgaaggtgttgtccaggatctcgcggatgattgcctgggcgacgccaagcaccagcgccaggaacagcgccaccaccagaatcagcttcttgttcggcgcactgggctcggtcggcggaatggccgcatcgaccacccgagcgttagtagagctcaggtcggaagtcgctgtggtctcctgcagacgggtcatgaaggtgtcgtacagcgcacggtcgctctcgacctgacgctgcagatcgcgcaccttgaactccttgcgagagatatcctggatgcggctcttgttctcatcgaacgaggagcgcagcgagttctcattggccacggccagttgatagttacgctcgatgctcgcaaccacctgctcgacttgttgcttgaggctggcggtggcggcattcagatcggaacgcgccgaaaccatcgctgggtggcgatcaccatagcgacgcgacagatcttccacccgcgagcgggcgtgcgcctggtcggccttgaactgttgaatcagcggatgccccagcaccgccggcacgctggcaagacgctgccagccctggctgcgcatcgactcgacctggcggtactggctctcggcctcggcacgctgacggcgtgcatcgatcatccggtcgccggtcagcgacagctcgctggcgctgatggtgccgacaccgttcaggtcgaccaggccctcggcatcgagataggcctgcagcttgtcttcggagtcctgcaggttctgccgcagggacaccaggcggtcgttcatccagctggcagcggtcatcgacatgtcgaccttggcctccagctgcgcttcgatgtaggcctgggccagttgattggtcgcttgcgcggcggtcatgcgatcggccatggcgatcgacagatacaccagctgactcttgccctcgacccacaccgacgtgcgctccatcagcgattgggtggcgaagtcgagaatctcggcttcggtcggtggcgtaggctcttcgccggtcagcgaatcgatcatgccgccgatgtccagcaaggggcctggctgctgtcgcaggtcgaactcggggtgcttggtcagatcgagatcgcgcaccacgcgttcggcaacgccacggctctgcatcaagctgagctgggtttgcaagtattcactgagttccaccggggtatccgccgcgggttggaacgacagcacgggcgtgcccttggtctcgatcagcaccgaagccacagccttgtagatcggcgtcatccgagccagcaggaaaactgttagcagcgcaacgacacccaccaacaggacgatgccccatttgcgtgaccagatggcatgccagattttcttcaggtcgatgaagtcactgtcggtagcaggccctacgggacgctgccagggtcgatccgggcgaactgggctgttcatcagaagaatccttcgtcgatattgatcgtgtcgccggggcgaacctgagtgtccatggtggctttctcttcggcgcggcttccttcggacccccgcacgatggtcatgcgcttggtcgaggcgcgctcggtcaggccaccggccagggcgatcgcgcgatccaatgtgagaccgggctggtagggataaccgccggggagcttgacctcgccggagatgtagaactcccgatagttgaccaccgagaccgacacccgcggctcgatcaggtaaccgtccttgagtttctcgaccaggacattacggacttcaccgggcgtcttgccgttggcgtcgacttcgccgatgaaggggaaggtaaaggtgcccgcgtcggtcaggcgtacctcttcgaacgagaggtcgggttcgccgtggacgctgatgcggatcacgtcgcccgagcccagcttgtactgcgcggcgctggcggttgcactgaacaccagcagtaacagcacggatagatatttgaagatgttcgggatgcgcatgttcggctcctccttaggcactggttaacgtcctacctggcctcaaaggctcaggtcgaaactcagcaggtaaacgttacggtcataggtttccgagctcaggttcgaatcgttctccgttctgaggtacgacagggtcacgtcgatccagcgatccggtgaccagatcacgccggcgccgtaggaactccgttcatcgttgcggccgatgccttcgtaatcgcggtcggagaagcggtacttcagctcggtcgcgatgcgcgaggtccactcgtgctcccaggtggccagcgtggtccagtcgttgatggtgctggcgccgtcgttaccttcgtcgaaggcccgccgcgaggtcaggttgaacaccgaataggtccgtggcttccaggtaactccgacttcccacatcgggctggtgaagtcttcgcgctggtcgctgtcaaaatccttgcgctcggcgccgagcttgaagctgccggaggtcttcccgctggcgtcccaggtagcgcccccaagcagcgccaggttggtgctgtcacgcagggcgctactgagtttgtagtcgtggtcggtgtggcgaacctcgacgagcgagcgcgtcttagcgcccaggcgatgaaaccagatggagttgaacatcaggctgtcgcgctcttcggaggcgttgatgttgccgctgttgtgataacgcaactgttcgtaattggtgccgaactcgagctggttgcgtgcgctctgggcgccgaaacggtacgcggcgcgggcaatcgcacggctgtacttgtcgttttcggtggcgtcttcggtatccgctgtctcttctacgcggtggtaggccagcccccagctaagccggtggcgcgaggtgaactcgacgacgcttctcaaattgagatggtggtcggtgttgctcgcctcggaatcggaatgaaagatatcgctgttcaaggagtattcaagctcgtactcgctgttgcgattacccgtccccaacagaaaggtaggattaattccggtgacccaggaagcctgctcgttgtccgacagcccgcgatagttatcgtcatagctttcgcgaacgaccagggtgggggtgaactcaaaaccgccaaggcgtatgtcctgtggctcgttcactgcccagctatcggtagcgacaagacacagcagcgacacacctggaagtgtgatgttcctcatatggaatcccttctcggagatggatttttgttcatgcctcgactccagccgcgacgcaggggctcttgtgagcaggcatagacacgcaacagaccgcaaatatccctgacagttgcagaatcgatgagcggcgcctcccggcgcggcccgtgagcgccgccgcaagcggtctgccaccgcatcttgggcacgctaccgccccaaggcatgcagcctcgtagcggattgcggacaaagccgcagctcgctcgaccgactgttcggcacggctggccaagcaaggtgttaatcggtgttttaacgaagccgcaacgtcgcagcgtgccgagccggctcgatgcttgccagcccgacctgaatctggtgctgccggttgagcacattcagcagcaacatcacccgctcttccccatccatggccaggaagattgcctccatctcggtacacgccccgacccggacctgtactcgatccccgctaaccagcgcaggagacggcccggccgttgcgcagcgctggcgaagctgatcgatgatcgtctcctgcacgcgacacggctgaccgcagaacccgacgacacgattgacaccgcgcgtcgaacgcaacgacagccagctgtcctgcgcccccatgcgaacgaacacatagccgggaaacaacggttgcgactgctcgcgcaccttgccggcacacaggctctgcatcatcacggtcggggcgaagcattcgatgccctgcctcgacaggtgctcctgagcgcgcccgtcctgacgcggcttacactgcagcagataccaggcctcagtcggcaaatcggtgtgcctatccacagcgtctccgcgagtactcaagcattcggtgaaggtcgagcaggcctggagcaccaggcgccttcactggacaggcccgatccagagcagttccgccctgttacacgcagcaacacttggaaggatgaccggtcacgtcggcaggcaatcgatgatgacgggacgttttgctggcgaaccaggcgtcggggcgcctgggctcggcgaaggtgccgaatttggcaaagcgagccctggcatcgtgacgggcgggctcgcggggaattacagcgtagcggggataagggaatcgcgcagcggggagggtcaggcgcgctcgatacgatcagggtggatcacgatgcgcccctgcttgtagaggccaccgatggctttcttgaagttgcccttgctgacgccgaacaatcgcgcaatctcatcggcagcgcttttgtcactgaccgcaagagtgccctggttctcctccagcttctgcaggatcagcgcctgcaaggcgtcgcccgcctcgctgcccaccggctgcaggctcaggctgatcttgccgtcggtgcgcacttccttgatatagcccttttcccgcatgccgccgcgcaggaacttgaaggcctcgttcttgtggatcaacccccagtgccggccgttgatgatcgccttgtgcccgaggtcggtgggctcgaccaccaacaggtcgacggcttcaccaaccttgtagcgcgcaggtgtcttgtccaggtaacgatccagccgcgccgtggcggtgatgcgacgggtgtgcttgtcgagatagacgtgcacgacgcaatagtcgccttcgttcagctggcgcttctcctctgaatgcggcaacagcaggtccttgggcaagccccagtcgaggaagatcccgacccggttgatctcgacgaccttgaggctggcgaactcacccacctgcaccttgggcttctcggtggtcgcgatgagtttgtcttcgctatcgagatagacgaatacgttgagccagtcgtcgacctcggtgggaacgttcttgggtatgtaacggttgggcagaaggatctcaccgtccggtccgccgtccaggtacaggccgaaaccggtgtgcttgacgatctgcatgctgttgaagcgcccgattgcggccattgcaagattcctgaggttcgaaggcggcgattctaacaggcccgcccggcacggcgggttgcgatgaacgagcggaccgcccggggaaacagccgggtatggcgaggcccgtcgatccggccctgccctgctccacacccggagccacacctatcgcggcaaggcataggcgatcaccgagtctcccgcgcgggtgccgagggagccgtggccaccggcaacgactaccaccacctgccgcccggaacggctgaggtaggtcatcggcgtggactggcccccggccggcagccgccacttggccagttcccggcccgtgctgctgtcataggcgcgcaggtagttgtccagcgtgccgctgaggaacgctacgccgccagccgtgagcatcggtccgccgagactcggcacgcccatcttgaagggcaacgggaccggtgcacggtcgcgcacggtgccgttcttgcgcagccagtgggtcttgccggtacgcaggtcggccccggcgacgtatccccacggcggcgcggtacacggcaggccgatcggcgagacgaagggttttagctcgactgcgaacggcgcgccgaaattctcgttgaggtgcggcgccttgtccgagacgtaggttttctgatcatcttcccggggaatcagggtcgaggtgaacggcaggtaagccggcgtactgaacaccatctgccggaccggatcgaccgccacgccaccccagttgaatacgccgaaattgcccggatacaccagggtgccctgggtcgagggcggcgtgtagcgaccctcgtagcgcagcgaatggaactgaacatggcacagcatctgatcgatgaaggtggcgccccagaggtccttgccctctagcatcggcggcgcgtagctcagcgccgagaccggctgggtaggcgcggcccggtcaccctcggcggcaccctgcggggccggcacttcacgaaccggcaggatcggctcccccgtacgacggtcgagcacatagaggtcaccctgcttggtcggcgcgaccagcgcagggaccgggccggatccagtgtcgatgtcgaccagactcggctgtgccggcacgtccatgtcccataaatcgtggtgcacggtctgaaatacccagcgcagctggccgctgtccaggtcgagcgcgacgatggaagacgagaagcgctcggtgttttccccacgttcgccgccccattgatccgggacctgattacccagcggcacatagaccaggcccaacgcctcgtcggcactggcgatgctccagctgttgggcgtgctctgactgtaggtctgcccttcggcgatcggctcggtctgctcgggattacccggatcccagttccagcgcagctcgccgctgatggcgtcgtaggcgcgaatcacgcccgaaggctcggtagtcgagacgttgtcgttgaccgccccaccaatgatgaccagccccttggcgaccaccggcggcgaggtggaatagtaaaagccctccttcacgttcggcatgttggcccacaaatccacctccccattgcggccgaattcaggacagacctgacctgtttcagggtcgagggcgatcagccgggcgtcggcggtcggcatgaacaggcgctgcgggcaagcctggctgccggcaggcgcctcgctggcgtggtaggacaggccgcggcaagtcagatgctgacgattggcggagtccggaaccttcggatcgaaacgccaccgctcttcccccgtatcggcatcaagggcgatgaccagattgtgcggggtacagatgtagaggctgtcatcgaccttcagcggcgtcacttcgtaggtcgtttcatccgggtcgcccggccgacgctgatcaccggtgtggtagtgccagacctgctccaggccatcgacattggcaggcgtaagctgcgccagtggtgagtatcgcgttccggcctgggtacgaccgtaggcatgccattcgccttccggcacctgcccggctggactcaccgacgccccgggcgctgccgccagaggctggggcaacatgcccttgatgtcatggctgtcggtcgaaatcgcctgcaccgccgttgcgccccagagcgcgaccgccagcatcagcacgagggcgccgccgccccaggcgcgcgcgccgaaatgttgccaacccagccgctgcgcaatccagggcgtcaggaaccacaaccccagcggtgcgatgatgctgccgcggggtgccagctgccaccaatcgaagccgacctcgtagagggcccaccccagcgcggcgagcatcaccaacgcgtagacccacagggccgcgcggcgtcgggccagcagcaagccgccggttagcagaaaacccaccgccagcaacgcgaagtaccaggtaccgccaagcgcgatgattttccaaccgccaacggcgagcgcgagccccaggatgatgcagaaaattgcgctgatgacgaccgccacacgccctcctttcgtgtactcaggttacgaagatgaaaaacggcctcttcgccggtcatcgtcggcaagcgctgggacaaatcagggcgcccgcattgcagtggaccgttggtcggccggaacgctccccaattgctcgaattggtgcgccggcttaaggcgcctcaagcccgacgcgcaacagtttgccgctcggcgaatcggtcaacagatagagatagccatccggcccctgacggacatcgcggatgcgctcgcccagtgatttcagcaagcgttcttcatgagcgatgcgatcgccgtcgagctgcaggcggatgagtgattggtccaccaatgtcccgataaaaaggttgtgttgccatgccgggaaacgatccgcgtcgtagaaggccataccgctgatggccggagatcgctcccagacgtaatgcggcggctcggtgccctcggctgatttccccttggcttccggtatcggtcgcccgctgtagtcgatgccatcggtcgccaggggccagccataattgcgccccggctgcgggatgttgacttcgtcaccgccgcgcgggccgtgttcatgcgtccagaggcggccgctccagggattgaaggccgcgccctgctgattgcgatgaccataggaccagatctccgggcgcgctcctgccgtcccgacgaagggattgtcgtcgggtacccgaccgtccgggtagatccgcaccacctttccctgcagcttgccaagatcctgcgcagtgggccgctggttgttctcgcccagcgcgatgaacagatggccttcaccgtcgaaagccagccgagaaccgaagtgaacgccggtggacagcttcggttgttgccggaagatcaccctgaaatcctcgagccccgagttgtcgtccgtcagccgaccacgccccacggcggtgccagccttgccgccctcgcctgcctcggcatagctgaggtagaccaggcggtcctgctggaagtcgggcgacaggcgcacgtccaacaaaccgccctggccgcgcgcataaacctctggaatgccatcgagcggcttggacaagcgcccctgactgtcgacgatacgcagccgccccggccgttcggtgaccagcattccggcctgctcgggcagaaacgccagggcccatgggtgttccagcccctcggcaacggttgccaccgtgacgcgaccttgctcgctgtcgaacgactcgggggccgcgacggcttgggcggaacaagccagaaccacgctgtaaatgaaagcgcgatgggcattgcgcagcatgggaagtcctccagagcgtaatcatgagcctttagcaaagaccatgacggcgggtaaacgcttcggaaaaagtcgtgtcatcgaataatcgaacaaaaattagccagatctgtataatgtccggttcgactgaccaaaggaaccagatgacgatggcctccaagaccacctccgccaaacgcaaacccgaacccgccagcgaaaccagccagtcgctggccgcgcagatggccgcctttctcaaggccggcggcgaagttcagaagattcccaacggcgtcagcggccagacccagggtccatcgcgccagatcaccatcagcaagaagtaacccgcaacagcctgaccgacgcgcgagcttccactgccctgtgctgtagcgcagtggctcgccaggtttcccgccgatacaccccgagcccaacatgaccgacccgatacgcttgtccaaatgccttgccgagcagcttggctgttcccgacgcgaggccgagctctatatcgaaggcggctgggtcaaggtcgacggcaaggtgatcgaagcaccatttttcaaggtcggcagccagcagatcgaattgctgcccggcgccaccgctaccgaagtgccgcctgtcacgctgctcctgcacaaacccgccggccagcccaccgcaacggacccggccgacgcgcagcgacaactttccagctccggtcactgggccggcgacggcgcacgcatcgcaccgcgcgcgcgacaccttgcccgccagaccgccctgctgccgctggaaccggacgtcagcggcctggtgctgttcagtcagcagcgcgaagtgatccgcaaactggccgacccgcgcggcaagctcgagcaggagtatgtcgtcgaagtggccggcgagcccgaggaaggcggcctggccctgctggccaaaggcatcggccatcgaggcaagatcctgcccaaggccaaggccagctggcagagcgaaacccgtttgcgcatcgtcgtccatgccccccaccccggcgatctgcgccaactctgcgaggccatcggcctgcagatgctcagctgcaagcgcatccgtatcggtcgcctgtcgatggccaagctgccagtcggcgagtggcgtttcctcggcgaacacgaacgtttctagacggctacatagcgaaacatgactccgacggctcgcgccgtctggtcgctcggctacgctgatgagcttgaaacggacccgagccatttgcggtctgcatatcaaatgccctctcggccggctgcttcgccaccaccgcaaaggttcgccatgcacagactcgttctgcttttgtttgccctgctgcccctgtattgcggcgcgcagcagcgagtcgaagtatggtcctatcatctctcgccacctttcatgctcgatgaccagcagggtttgtcgcatgcgttcgtcgacatgctcaacaaggatccaggcaaccacgagcgttttcgcttcgagctggtagagctgccgcgcaagcgtgtggatgagcgccttgcgcaacgaaggcctggcgtcctgctctgggccacgccgagcttcttcaaccccaagcagaccgccaacggcaaatggtcgcagccgctgctgatcgatcagcaggatttcgtctcgctgcccgacgcgccgttcgactacgaggggcccgagtcgcttcacgggctggtgctgggcggcgtgctcggccatcgataccgtgcacttgaagcggatatcgacagcggcaagatcgtccgccaggatgtccagaccgacgtacagaacatcgagaaactgctgtcaggccgcatcaataccctgctgattccacgctccacattcctctactatcgcaaggagcagcggctgcgagacctgtatatctcgacgacgccgctgtaccagttcgcgcggcacctattgatcaacggaccgctcgacgaagccgttgtccgctacctggaggaattccttcgcgccttgccagacaatcccgaatggcagattctgctgttcaagtacggactcaaccccatcgccaacgagcgctgagaagctgaacagaaacgcgacatgccggtcagaacaacgcgctgacacctctaacaacagcaagagaaccaggccgtaatgaagaatctttgggtaatcggattgctcatgctcctgggaggctgcgcctctcagccgtgtgaccagtcgcgtagcgacagctcgtgccgcgcagagcggctgctctatcaaaacgatctgttacaagcgaagattcttatcgccgttggcgatgaagagggttacgagcttgccgatgccttgctcaagcgcagcgctcgcctcgatgaacgtggcgagatcgagttctatcaagcgctgctgttgatccgccagggcccgcaacccgaacaggtgctgcagctgctggagaaggcccgggccaagggacatccgcacgccgtggcgctgctgtacaagatctaccaggaaccctatctgctggatgagcgcgatgccgccaaggcagagctgtaccgccaggcctatgccgagctggacgttgcgcagagtggctatccgtccttcgacaaggcgctggagctggtctcccagctcgtcgagccgccaccgccgctgcccgaacgggtcgacccctgcgccaatcggtgtctttgacccgctggccactggtcagtcgtctagggtcttcgcctgcgcgcgttcgagcggcgcaggacgccatcaacagacaaagggcccgatcagctaacccgctacttctcccgcgagcaactgccgttcggccggccgccgcacgacaggccgacgacgcttgccgtcctgtttcaccagccttgccatataggctcaggccacgcgtgaccgccgccgaaacaagccgttgcggtgtgttccgaaccgtcgtcgcgcctgctgttctactgaacaggcggtacttttcgttgagtaaccagagacatgagggcttcgatgcggactcgtcaggtactgggctgcaaggcattgctggtactgctggcgctcaccctggtcgtggccggttgcagccggatgaacctggcctatcgcaacctgcatctgctgattccctggtcgctcgcggactacctggacctggatcgcgaccagcaacggcgctttcgcgcgcaattgcgcgagcacctggactggcactgccgtacccaactgcccgcctacctcgccgacatcgaacagttgcagacgcaggtccgccggggagccctcgacgaacgcacgctgcgcgccgattacgagaaggcacgccgagccattcacgcgatcgccacggaaataaccccaacggcgacacagctgttggccggcctcgacgagacgcaggtccgcgaactcgacgaagccctggcagaggatcgtcgcgaaaatcgggacgaatacctgaagccaccgcttgatcagcagatccgagaacgagcggaacgcatgagcgagcgagtcgagcaatggcttggccgtatcagcccggcacaacgccagcgcatcctgacatggtcccacgcactcggagcgcaaaaccggccctggctggaaaaccgcgcccactggcagcagaggttgagtgaggccttggctgatcgtcacggagccggcttcgaacagcgcatcacgcagttactgcaggccccggagacgctctggagcgccgactaccgtgccgccttcggccgcgccgagcagttgaccctcgacctcctgcacgagctttacgagctgtccgatgccggccagcggcagcacttcgtgggccagctggaagacctgcgcaaggatctgggctcgctggaatgcctgccggagcccggaggatcctccgcgcgtagcgaggtgcgcaccaaagccagttagtgcgactagcgtcggcgacgcaacaacagcaaaccggcgcctatcagccccaccgcgatgccgcctgctaccagcagattttcctgacgcgaatcgtcggatcgccaaccgccatcgattcgacgctcgcccagcgccggatgaaaaaggttgcctgacgaaggcgccacgcgatcggcccgacgcagcgcagcaccagtaatcagccccgacaacttatcgaagccaggcgtgatgaaatgcgcgaagcgcagcagggtcgccatcatgccgaccgaggtggtatggcgcgggtgcagcgccaggctgaccatcgcttcggccacctggcgcggatcacagagcggtggcggcggttgcagggagcggcccgcatagttgccaccatcgcggacaccgggagtgtcgacgaccgagggatatacatcgcacacgtggatgccgggccattgcaccagttccccgcgcagtgcatgggagaaaccgcgcagcccgaacttgctggccgagtaggcgacagcgtacggctgcggcacccagctgccgaccgacaaggtgttgatcagcacgccgcggttctgctgtttgaaatagggcagcaccacatgcgcgccgcgtagatagccgatcagatcggtttgcaccacttgctcgtgggcgtccagcggcgtttcgtcaaacgcgccaaccgcgccgacgccggcattgttgacccagacgtcgatacgcccctgcccgaagtcggcggcggcgctggccagccgctcaaccgagtcgctgagggtcatgtcggtgaccaccaccaacgcctcgccgccgcaggcccggcattgcgcggcgacttcttgcaaggcctcgtcgtcgcgtgcagccagcaccacacgggcccgctgacgcgcgaaagcctgcgccgccgcgcggccaatgccgctcgatgcaccggtgatgaccaccaccgcgccgtcgagcgtggttccagaactagacatgctcattccctcctgctgaccgtcgtccatagctgacagtcaggaggaggcaaacattccctgatgcaaggcttggcgcgtaccagaatcggtccggctcagaccatttgcagcggttgccgacgagcgggcggcgggaaggcaccgtcgagtgtgctcaggtcctcggctgaaagcgtcaactcggccgcagaggcattggcgcgcaggtgcgtagcgctggccgatttgggtatcaccagcaccccgggctgacgcagcgcccaggccagcgcaacctgggcgggttgggccccgtgccggcgcgccacatcgacaagcgccgggtggcgcagcagatcaccgccctgccccagcgggcaataggccatgaccggcatgccctgcgcctggcaccagggcaagaggtcgaactcgatgccccgttcggcagggttgtagagcacctgattggtcgcgcaggccggcgtgcccagctcgtgcatgtcgtccagatcgaaattcgatacgccccagcgacggatcttgccttgggccttgagccgctcgaaggcctcgaccgtttcagccagcgggtactggccacgccagtgcagcaggtacagatcgatgcagtcgacgcccagccgccgcaggctgcgctcgcaggcctgtggcacaccctggcggctggcattgtgcggatagaccttgctgaccagaaaaacccgctcgcgccggttgcgaatggcctccccgaccacctcttcagcaccgccctcggcatacatttcggcggtgtcgatcagggtcatgccaagctcgatgccctgccgaagcgcggccacctcgttgctgcgttcggcggggttctcgcccatgtgccaggtgccctgcccgatcaccggcagggccgtaccgtcggccaacgtcaaggttcgcatcaatcctctcctcgtggcgcgttctgctctgcaaccggctcggcccagggatcgtaggtaccgaagttccacagatgcccttcgaggtcgcggcagctgaagccacgaccaccgtagtcttcatccttcaactcgatgacgatctcggcgcccgcggccttggccttggtgtacagcgcatcggcactgttgacgatgacgtagatgctctgggtggatacaccacccacctcgtccggctgcctgacctggcgaccgtagggcgagtcgctcaccggccccagcatcagcatgccgctgccgaagcgcagctgggcatggatgatgccggcctgcgggtcctcgaccacgttttgccgctcgaaatcgaacacccggcacaaccagtcgagcgccgcgggcacgtcgcgataacggagacaggggatcaggttcgaggtggtgttcttgctatacagggacataaatgctccttccgattgccacggcgtcaccagcgaacgcccacatagcatgtggaccgacaccgggcgcgacgttccctccgctagacgcgttcggccagcccgaggcggatgcccaggccgatcagcatcgagccgagcacacgatcaagccattggctgaggcgccgattgccacgcaacgccgaggtcgctcgggctgccagcaacaccaggctgcactccacgacgatagccaccaacaccaccagcacgccgagccccagcagttgcagggctaccggcccctgatcggagcgtacgaactgcggcagaaatgccatgaaaaagatagccgccttcgggttgaggatgtcgaccaggatgccctggcgataagcctgccaggcgctggctcgcggtactggcttcacgctgagctgggtaccaccggccgaacgcaacgcctggataccgagataaagcaggtataccgcgccgacatacttgaccactgcgaaggccagcgccgaggtcgccagaatcgccgaaagccccagcgcggcggccgccacgtgcacgagcgcgccgctgcaaacaccgcacgccgaggccacaccgacacgtcgcccgccgctcagggtacgcgacagaacgaacagcagatccggccccggcgacagattcagcgccagggcagccaggaagaaaaccaaccagaacgccggatccgacatctcgccctcgctcgccacgacgaaaaaagacactgactttagtccagcgcgacaaccgctgccagttccgctcaatccccgcagcgatgcatttcgtcggataattggcacaagcacatgcgctcgactttttattgtcaccacactgaactaccttttgcactgcagtgtcaaagcgccagtgccgaccaggaattcgggcgcttactcaatcgtcacctagcaaaggatatgcatatgaacgatgaagcctccgtggcgctcgtcgcctcttctactcgcctcgtcctgctgtcgaacagcgaatcgccggacggcgcgctccaaccgttgctcatgagctgctcaccgtatcgcctgacccgcagcaatacgcttcgccccgggctgagcgacgcggacctgaccctggtcgatgtcggcagctttacggacgccgaatgcctgcgcctgcttcgccagctgcgcgataccccgaccgctctgatcaacgtgcacgtcgaacaggcgccgcggttgctggagctgcatccctggctcaagggcgtgttctacccgagcaccagccgcaccaatttcagccgcggcatcgatgtgatcctcgatggcggcgactggctgcctcgtgccctgatggaaaaactgcttggccgctatcggcagctgacgcacgcctcgcgcgccatcgacgacctgtcggttcgcgaaaagcaaatcctcgcgctcgccggcaaaggcctgtcgaactcggaaatagccgaccgcctgcacctgagcacgcacacgatcaagagccacatccacaatgcgctgagcaaactgggcgcatccaaccgagcgcaaggcgcctcgctggtgatggggcatgtgagcgaggccggcatatgaaagccgcctgcctgagtctgatgttacttgtcggcattcagcaggcgtatgccgacgaggccgaactcaagggcttcatcaccaacaacacgatttcgcgatccggccaggagttctatcgcaagttctgcgaacgcctgaacgacaccagcaagctggacttcaacctggccgtcaaggaacggccctcggcccgctggggcatcctggtctgggttgaacacaacgaccagccgctctatcgccgcttcctccaaccaaacgtcagcgacatggagcagaccgcctatgacgcagccgacttcgtggtggaagagcttaatcgcaggaaagtcgaagcattgttcgaagacaccattgacctcgcaaaggatgagttatgaaccggccacaacaaaaaacaaccggcatgctcctggccggattactgctcagcgcaggcgccagcgccaccgaactggtctataccccggtcaatccatcgttcggcggcagcccgctgaacggtgcctggctgctgggcaatgcccaggctcagaacaacaaaaaggacccggatgcgatcgatcgctcctcgctggccggcacctcggcactcgaccggttcaccagccagctcgagtcgcgtctgctcgccgatctgttgaacaagatggacgatcccaacgggggctcgctgatcaccgatgacttcatcgtcaatgtcgtcaacctcgacggcaacctgacggtggagatcaccgaccgcctcaccggggaagtctcggagatcatcgtcaacggctacggcgccatcaactaactgcaaggagagcaaaggccatgagaagcctattcgtcgccatcgggatgatggccgttctgcagggctgcgccgtacgcgagcccatgtcggcggaccaggaaaccccaaccctcacgccccgtgcctcgacttaccaggatctgctcgagctgcctcgccctcgcgggcctctggtggctgccgtctacggctttcgtgatcagacaggacagtacaagccgagcccggccagctccttctccaccgccgttacccagggcgcggcgagcatgctggtcgacgccatgcaggccagtggctggttcatcgtactggagcgcgaaggcctgcagaacgtgctgaccgagcgcaagatcatccgcgcctcgcaagccaagccggacgtcgcgccgaacatccagtcggagctgccttcgctgctggcggccaacatcatcatggagggcgccatcgtcgcctacgaaaccaacgtgcgcagcggtgggcagggcgcgcgctatctgggcatcggggtctcgcaggaatatcgggtcgatcaggtcacggtcaatctgcgcgctatcgacgtgcgcagcggccaggtgctgtccaatgtgatgacgaccaagaccatctattccatcgggcgcagcgcgaacgtctacaagttcatcgaattcaaggaactgctcgaagccgaagcaggctacaccaccaacgagccggcgcagctctgcgtgctctcggcgatcgaggcggccgtcgctcacctgatcgcacaaggggtcgaccggcgtctgtggcagaccgcggacaacacaccggcagtgcagcaagaactggcgaagtacctagcaacaccgaacaagctgtagcgttttcgctggcgaaccggccagccgataaacaagcgcaacgatttcagccgttcgatggatttgcccaatcgcggtttaggacaggatgacctaccgcgattcaatcagggatgaccgatggaccaggtgcaatggattgcccgcaaagcgctgttgccgttgttcgcagcgctgacctccccccttctccaagccgcaggccttcagggttcgctggacctcgcccccagcgagctcgcagccaccccgcttcccccaggcaccctgccccagtcggcggccagcctcaccgcagccaacctcgcactcatcgcccaggtcggtgacagcctgatcgccaccctcgttcaggacggctacgcgcaggaagccttgatcctgcagagcggttatggacacgaagcggccatcgagcaacacggcatctacaaccagggatcgatcattcaaagcggtgccgacaaccaggcccgtatcgaacagttcggcgcagccaacagcgcgctgatcgaacagaccggcaccggacatcgcagtcgcgtcacgcagcatggccagggtctggatctagtggtacgtcagtaccgctaacgcaaagcaccaccaggaagtaccgctgaaaacattccatggagagacaataatgttcaagatcaaaccccttgtagctgcccttctgaccatcgctgccacccaggcattcgccgcggacaatcgatccgaacaacgccagaacggcatcgacaacctggcgcaggtcgagcagcacgccggcagcgcgaacatggccacgcaactccagagcggctggggtaacgacgcgatggtcgtgcagagcggctcgcacgcttcgtctaccctgcagacccagatcgccaacttccatcaggcgaacatcaaccagacgttggccgtccacagcagcgtcgagcagtggcagaacggcaagggcaacgacgccgacgccaaccagaccgccacctggggcagccgcatcgaacagcgccagcacggctatgccaacacggcggactccgctcagaccggcacccacgacaccaccaccgtgacgcggcagcagggcaataacaacgttgcttccagctaccaggccgccacccacggcagccaagcggccctgtaccaggccggcaacttcaacgatgccaacgtcgatcaaacggcaagcatcaacgatcgggcgttgatcgaccagcagggcaacgacaacgctgcaaccgtcggacagaactggagcatgggttcggtcgcggaagtcgagcaggtcggcaatcgcaatgatgcctccgtgcaccagaccggcacgcgccacgaggcctatacctattccggcggcgacgacaacaacctgaacgtcgaccagcgcggcggctaccagaacgccttcgtgtatcaagcaggcaacgagaacgatgccgacgtcgcccagcggggcagcggcaacaccgccaataccaatcagaacggtttcggcaataccgcggcaatcgatcaggacggtcgcaaccagctggccaccgtcggccagaccggcacctacaacgacgccatggtcgaccagcagggcaaaggcaacgagctgaacttcaatcagtcgggcgctctgaaccgcctggccgccgttcaggaaggcgaaggcaaccggattaccggttcgagcaacatcgccggcaacgacgtcgatatcgcccaggacggcgatttcaacctggccaacgtcaaccagttcggcaccagccaggtcgcaaccgtgtcccagtacggcgagagccacctggccacggtcatgcagaacggcagcggtaacgaggcgttggtggcccagagcggcatgggcaacaacgcattgatcagccaggcaggcttcaacaacatggcggtggtcaaccaacactgacgccgcaccaaccagagcggccggcccctgtgccggccgtttctttttccgcgcggccccggctgcgaacgcaaggggcgatgcgacccgacgccctcatacagaccgcagcgacggccagcgcagccgaacccagccccacccatcgccggcgttcacttataagctgctccctcgataaaacgatgaaaatcaaagtgttttatggtatctccgctgcgcctgagcgctgtctcgcggcgctgtgcggcgcgtgaagcccgcacgctcgggccattcatacaagcagtgccaactgcacccaaggagtacaccgatgaaacgcagcctcagcaccgcccttctcgcggcgggattggcttctgccggccaggtcatggccgaccccatgctttggcaggacaacagcctgacctatctgtacgggaagaacttcgccgtcgactcgggcgaggacggccgcgaggcttccattcagcagaccatcaccttcgaacacgccagcggctggacctggggcgacatgttcctgttcgtcgatcacaagtggttcaacggtcattccggcaaggatggacgcacctactacggcgagttcagcccgcgcctctcgctgagcaagaccaccggccgggacttcagcttcggtccggtcaccgatgttctactctcggcgacctacgagcgcggcgaaggccgcaaccgcaactacctgctcggccccgccgtcgatctcgccgtcccgggcttcgatcgcctgtcgatcaacacctattaccgcaaacccgacggcatcaccggccaggccagcgggcaatggcagatcaccccgacctgggccatgaccgttccggtgggcaaatccgacatcctcttcgatggcttcatcgactgggtcgtcaacgacgccggctcccgctcgaagggcgacttcgtggcgaagaacctgcacatcaacccacaggtcaagtacgacctgggcaaggcactggcgcgcacgcccggcaaactttacgtcggtatcgagtatgactattggtctgacaagtacggcatcgaggacagccatgccttcaacaccgacaacaatgtgaccaacttcatcgtcaaggcgcatttctgaccgcgcggcgatagcgccagcatggctacagcgggtcgaggcgtctgaacaccagcgccttgagcccgctgtcctcgctgatgtcgggaaactccggcgggttttccaggcgctgctggaataccaaggctggcgcttcggccgccatgctctggatgaggaagtccgggccggtatccggatcgttgatgcaggccagcaccgtgccgctctcagtgagcagctccggcaggcgtcgcagaatcttctgataatcgcggctcagcgcgaagctgcccttctgataggaaggcgggtcgatgatcacaagatcatagggcccggtcttctttaccttgccccaggacttgaacagctcgtggcccagaaagctgacccgtccgaggtcatggtcgttgagccgatggttatcccgcccccggctcagcgctgcgcgggccatgtccaggttgaccacatgctcggcgcctccggcgatggccgctacggagaatccgcaggtgtaggcgaacaggttgagcacgcgcttgccacgcgcctgctcctgcacccagcgccggccgtagcgcatgtcgagaaacaacccgttgttttgcttgatgcccaggtcgagcttgtaacgcagcccgttttcgctgatcagccattcctcgatcggctcgccgagcagctgctgcatatggctgtcgggcaggtagcggtgctgcagcaacaaggtatgagcgccgctcgattgccaggctggcgtctcggtcagcgctccgagcatccggatcagcgcgtccagctcggcggcggccggttcacgaaacagtgaaaccagtaccacgccttgcaaccagtccaccgtgacgtgctcgagcccggcccagcaacgcccgcggccatggaacagccggcgggtttcgtccggcacctgcgtcagggattggctgaggagctgttgcagtgtcgcgagggcatcaggctgcatattcaatcgtctcgaaaaaggcgcgcgcattctagacgcgaaccggcacgcctgcagggccgctcctggatcgagccgtgtcgggtacgctgcgtgcgccgcccgagacgccaacgaagcgtgcggtttaggctgcctggccggcgcgaacgacgcacccgccgagccttcaagaacagtctggggagcgcatgttactgcctgctgcaagcctggttcgtcggctaacaggcgtcacgcagggctgggtgacttagcagcgcggcgcgccttgggagcggctttgcgtgtggtgcccttgcgctttttccacggcgcacggcggccggctggagcagcgggtccactgatggtcaggcgcacacccttgcagcgctcgacctgcttgctcatccatgccgattgtttgctgacgaattcctccaggctcatttccccgctctgcaccatgtccagcgcctgctcccagatcgccgtggtgccggggtcggcgatggcccgcggcaccgcatcgatcaggctgaaggccgccggtgtcgccgccaacgccttgccctgcttggtcagatagccgcggtcgagcagcccctggatgatccccgcgcgcgtcgcctcggtgccgatgccggtggtgtccttgagcttctgtttcagcttgggatcgtccaccagcttggccacgttcttcatcgccttgatcaggtcgccttcggtgaacggtttgggcggctgcgtccataggtccttgaaggtcaggtcgcgaaccgggcaggtttgcccttcacgcagcgccggcagcgtctgcggcaccggcgcttcacggccgcgactggccgccagcgcctcgggcaaggcgcgtttccaacccggttcgacgatctgtttaccgaccgcccgcaacgcctggccggcgcagtcgagatcggcctgggtccggtcgtactcatacgtgggcagaaactgcgccaggtagcgggcgcggatcagcgtatagaccgcccgcggtttgccgctcaggcgctcgaaggcgcgagccgctgccgtcgggatgatgccgtggtgagcgcctaccttggcatcgttccaggcgcgcgacttgcgccggggctcgaggtgcggcgcgagttcgccaagggacggatcggcctgcgccagcgcggccaggatgcccggcgcctcgccgtgctggctcaccggcaggtagccgcaatcgctgcgcggataggtgatcagcttgtgggtttcgtatagggactgagcaatatccagggtttcctgagcgcccaggccgagcttcttcgagcagacctcctgcagggtgccgagatcgaacggcaacggcgcggcttcacgcacgcgctcggtcttgagccgttgaatctgcgcctcgccggccgcccgcatggcctcggcggctcgctgcgccagcgcctggtcgaggcaacgcccctgatcgtcgcagtgctcatccggtgcgcgccactgcgcggtgaacggcatgtcgccgtcgcccagcagctgtacctcgatggcccagaacggctgcggtacgaagtcggcgatgctgcgatcacggtcgaccaccaggcgcagcgttggcgtctgcacccggcccaccggcagcaccccctggtaaccggactgccgcccgagcagcgtgaacaggcggctcatgttcatgccgatcagccagtcggcacgcgagcgccccagcgccgattgatacaggttgaaggtctctatccccgcgcgcagtgcaccgagcgccttgcgaatcgaggcatcatccagcgccgacagccacagccgctggatcggcccgcgatagcgacaatgctcgaccagctcgcgggcaatcatctcaccctcgcggtcggcatcggtggcgattatcagctcctgcgcctcacccagcagccgcttgaccgccttgtactggctcgccgtcttgggcttgaccagcatcttccagcgttcggggacgatgggcagatcgcccagcacccagcgcttgtagcgcgcgtcgtaactgtccggcggcgcggtttccagcaggtggccgatgcaccaggtcacggtgacaccagcccccacccagcacccctcgccccgccgcgtggcgccgagcacttgggcgatgtccttggcctgggaaggtttttcgcagagaaacagccgcatcaggtcatcaccgttcgcttcgcaatggccgatagcatgcgcagcgcaggggcggcaggcaaggtttatctgtatggatatacagatactacttaaacgggtgggacgaaggcggcgggccagcttcgcctgtcggtcagtagcagaacctagcctgagctgcacggttctgatgtctgcctggcccgcgccgctcagccgctgcggatagacacaaccgaggggggtgcagctggagcgccagagatgcttccgttgcaacggccgcgtgcgccccacgcagcgcatcgcagaaaccgcacatcaatcaaacgtcagcttcgccccggcatagatcgtccgccctggcgcaggctcgtagtagcgaccgaagttatcgttgatgcgcaggttgtcgtagtagtcgcggtccagcaggttgtcgacgccgatgtagggctcccactgctgatcgccccacaccattcgccagcccaggcgggcgttggttaccgcgtagccgggcacgcggtcgaggttggcgttgtccgcgtactggtggccataggcattgaggttgagccgcgcataccagtcgtcgcggtcatagctgacctcggcgaacaggctctgctctggaatccccgggatgcggttgccgtcgtagccgtcgaactggccgaaacgatagcggttgtagctccaggcaccggtcaatcgccaatagcgacccaccagccagtccccgctgagctcgataccgtcgcgacttgagcgccccgcgttggtgtagaaggtgcgtccatcgacttccgggaccaactcatcttcgatgcgcatgctgtagaccaccgcttcgtagcgcaatcccgggtgctcgcctttaaaaccaatctcgcgattgaccgactgcgccggaccgagcgatgggttgaagccgcccccgtctgggttggccatttcgttgatggtcggcgtttcgaaggaggtcgcgtaacgcacgtacgccacatgatgggcgtccagttgccggctcagccccaggctgtagttccaatcctccaggtcgcgttcgcccgaggcatcgccgtcgctcaggtagcggtccttcgcctcgagccgcacgctgtcgtagcgcacacccgcggtgagcaaccaggcatcgcccaggctcagctgatcctcaacaaacacaccccggctgtccgccgtttcgcgctggcgctgagtcagggcgccgctgatgccgccgagcaggttgtcgttgcgcgagcgctcatcgcgctggctttccaggtccatcccgacggtcaactgatggggcaggcccgcaagctcgcgatggaaggttcgctgggcccccacgccggcaaaccagcggtcgtaggcggtctgaccgttggcgcgcagcgggaggcggttgctgaagtcgcgctggccgtagtaactgcgcaactggtaggtgtcgccgcctgcggcctgaccatcccagaccagagagaggcgttgttgctcgacggtctcgtctgaatcgaactgaaggctctgtggccgcgcctgggaacgatcggcccggacctggtcgagggtcagtccaccggggtcttcggctcggttgtcgatcgcatgcagggtgagcccgagcgtgccgccctccccctgccagcgcagcttgccggtgaggtggttggtttcggcagtcccgtgggtgcggtagccgtcgagctgcgttgcgttgaccgcgagcaaggcgcccagcgacccggcgctgccgctggtttccgcgcgcatgcgccggtagcccagctcgccaccggtcacctcgacctgagtgcgcggcgtgtcgcctggttgtcgcgtctcgatcgcaaggacgccaccggcggcattgccgtaaatggtcgacgaagggccgcgaatcacctcgatgcgctccaccagcgaggtatccagcccgtccatttcggtctgcccatcgggcatcgtcaagggcacaccatcgaccagcacccgcacaccacgaacgccaaaactggaccgggacccgaaaccacgaatcgacaagcgcatgccttgcgccaggttgtagcggctctgcgaaagcgcgcccggaacaggcccgagcaagctgtcgagggtgagcagctgctcacccggccggtcctgcgccgacacggcggacaccgccatcggcaaggtaaaccagtcggattccgcccggggcgagctcaccaacaaggggtcgagcatgagcggttcgctcgtctgtgcgagcaagggtccggttgccaacgagagcgatccggcaagaaaaagtcgatacatggttgagccttgttgttatggagtgacgttacttccgccaaccgctgctgccgggcaagccgctcgagagcgctgaccgagaggaagcgattaggcagccttggcgcaggccgagccggagcgtttttttaaactacagaacggatctggtgcggaaaacctgcataagcctgctcgtcatcaacgcaacgcacatgccaagcgagccttgagacatcaccgatcgccgtttgggtccgaaataatccgccggccgccagttctgctgccttggcaggccgttctgcatcgccgtctctaaatcctgcctgctatcgccaggcctgcgggcgccgcttccctgttgcagcgacgcgacagctgtcgcagccgtgcaacggtccggctgcgacaggccgcttcagccgcggcgacacgtgaccgcccgaggccgcgccacacctggcttttcagccaaaccggagggactggcacaacggttgctctccctgaaagacctgccccacggggcggccagaccaataacaagagagagcacgctatgaatcaattcgatccctgttcgggccgacggcccgccgccctgcttggcgccagccttgctgccctgctgtccctgccgttgcacgccgctgaagtcgatggcaagcgcatcgccaatgccgacgccgaacccggcaactggatgagccacggccgcgactatggcgagcagcgcttcagcccactgaagaagatcaccgacgccaacgtcgacgaactcgggctggcctggagctacaagctcgacatcgaccgcggcgtcgaagccacgcccatcgtcgtcgacggcgtgatgtacaccaccgggccgttctccatcgtttatgcgctggacgcacgcaccggcaaggaaatctggaagtacgaccccaagtccgaccgctcccgcgcgggtgaggcctgctgcgatgcgatcaaccgcggcgttgccgtgtggaaaggcaaggtctatgtcggcgtgctcgacggccgccttgaagccatcgacgccaagaccggcgagcgcgtttggtcggtcgatacgcgctacgacaaggcccgcagctactccatcaccggtgcgccacgggtggtcagcggcaaggtggtaatcggcaacggcggcgccgagttcggcgtgcgcggctacgtcaccgcctacgatgccgagaccggtgatcaggcctggcgcttctttaccgtaccgggtgatccggacaagcccgccgaaggcaagggcatggagatcgccaagaagacctggcacggccgcgctttcgtcgagcagggcggcggcggcaccgcttgggactccttcgcctacgacccggagctgaacctgctctacatcggcgtcggcaacggctctctgtgggacccggtctggcgcagcgagggcaagggcgacaacctgttcctgtcctccatcgtcgcggtcaacgccgacaccggcgagtacgtctggcactaccagaccaccccgggcgacgcctgggactacaccgccacccaacacatgatccttgctgacctggagatcaagggcaaacagcgcaaggtgctgatgcaggcgccgaagaacggcttcttctacgtcatcgaccgcgccaccggcgagctgctctcggccgagaacatcgtgccgatcaactgggccaagggcgtcgatctgaagaccggccgccccatcgtcgacgacgaggcggctgcctactggaagggcgagaagaaggccaagctggtccagccgggcttctggggcgcgcatgactggcacccgatgtcctacaacccgaacaccgggctggtctacatcccggcgcacatcatgtcggcctggtacgagcacgtgccggatgcgcccgctcgcaacaagttcaagagcatgtaccagctgggcctgaagaccggaatgatgcccgaggacccggaaggcctcggcaactacgccgacacctggtccggcaagctgatcgcctgggatccagtcaagcagcagcaggcgtgggaagtaccctacgtcaccatcttcaacggcggcaccctgagcaccgccggcaatctggtgttcgaaggcagcgccgacggccgggtcatcgcctatgccgccgacactggtaagaaactgtgggagcagccggccgccagcggtgtgatggccgcgcccatcacctacagcgtggacggcgaacaatacgtgaccttcatggcgggatggggcggtgccttctccacctttgccggtgccctgtcgctgcgcgccggcgtgcagccttacgcccaggtgctcacctacaagctcggcggcaccgcggagctgcaggaaccggccccgcgtgaagatgcacccaagcctccgccattgactgccgatgccgccaccgtcgaagccggcgccaagctctacgacggctactgctcgcagtgccacggcatccacgccgttagcggtggcgtgctgccggacctgcgcatgctcaccccggaaaagcatgaacagttcctcggcattctccacggcgcacgtatccccgatggcatgccctcctttgccgaggctttcgatcgcgagcagatggaacagatccaccagtacctgatcaagcgtgcccacgaccgcatcgagcacggcccagacgacctgccgcagccgacccagaaaacggccagcaactgacactcaggagatcgatatgactgacttgacgacctaccagaactacatcgacggcgccttcgtcgcctgcgacaacctcatcgaagtacgcaacccggccaccggcgcggtgctttcccgcgtgcccgaatccgacgccgccaccgccgaacgcgccatcgcggccgcccgtgccgcgcagaaagcctggagccagaagcctgccgtcgaacgcgccggctacctgcgcgccatcgccagcaagattcgccagaacgccgagcgcctggctcgcgtcatcaccgaggaaggcggaaagatccagagcctggcgctggtggaagtcaacttcaccgccgactacctcgactacatggccgagtgggcgcgccgcatcgagggcgagatcatcaccagcgaccgcccgggcgagaacatcttcctgttccgcaaaccgctgggtgtggtcgctggcatcctgccgtggaacttccccttcttcctgatcgcccggaagatggcgcccgcgctggtaaccggcaacaccatcgtcatcaagcccagcgaggaaacgccgaacaactgcttcgaattcgccaagctggtggccgagaccgacctgcccaaaggcgtgttcaacgtggtctgcggcagcggcgcgggcgtcggcagcgcgctgaccaccagcgacaagatcgacatgatcagcttcaccggcagcgtcggcaccggccagcggatcatggccgccgcggcgcagaacgtcaccaagctcaacctggaactgggcggcaaggccccggccatcgtcatgaacgacgcggacctggacctcgccgtctccgccatccgcgcgtctcggatcatcaacaccgggcaggtctgcaactgcgccgaacgcgtctatgtgcagcgcggcgtcgcggagcagttcatcgaacgcatcgccggcgccctggccgaaacgcgctatggcgacccgatcgcccaggcggatgtggagatgggcccgctgatcaacgaggccgggctgcgcaaggtcgaacagatggtgcgcaccgcgcagagccagggcgcgcagctcgttacaggaggcgccgtcgcggatctgggcaaaggcttccactaccagccgacactgctcgccaactgttcgcacgacatggaaatcatgcgcaaggaagtcttcggcccggtgctgccggtgcagatcatcgacgacctggacgaagccatcgccctggccaacgactgcgaatacggcctgacctcctcgatctatacacgcgatctctcgactgcgatgaaggcggccgctggcctggacttcggcgagacctacatcaaccgcgagaacttcgaggcgatgcagggctaccacgccggggtgcgcaagtccggcatcggcggtgcggacggcaagcacgggctgtacgagtacacccatactcatgcggtgtacgtgcagagctgagtgacttgaggtgaccaagaaccccgccccggcggggttcttgttattcagccaagcgaacgtccagcccaccgaaaacttcgagtcgtctgccaaccatcacttgcgcagcgcggctagcccgtaacgatgcagcttgcgataaaaggtggcgcggttgatgccgagggaacgcgccgctgacgtgacattgccgccatgctgctccagtgtcgcttgcaaatgggccgcttcggcagcgtctcgggtggtccccagcgactgcgctactgaccggcgttccgcaggcacggccatcacctccggcggcaggcaatcgagaccgatcatcccgtcgtcagccagcgcgacggcacaacgcagcacgttgatcagctggcgcacgttgccgggccacccataagcggccaggcgctccatcgcctcggcagtcagctcgacaggctcatccccggcctcacattgcagaacgcgacggataagccccgcgcgatccgcccggtcgcgcagggcaggcagcctgaccgtcaagccattgagccggtaatacaggtcttcacgaaactcgcccgcagccaccatcgccggcaggtcgcggtgcgtcgcgcacaccagctgcacattcagcgacaccggcgttgcggcgcccagcggcaccagctcccgctcggccagcacacgcaacaaccgcgtctgcaggtgcgccggcatatcgccgatctcgtcgagaaacagcgtcccgccgttggcctgttccagcttgcccttcatcccctgacggctggcgccggtaaaggtcccggcgcgatagccgaacagctcgctctcgatcagcgactccggaatcgccgcgcaattgagcgcaacgaagggccccttggcgcgcacgctggcctgatggatcgcccgcgcaaaggcttccttgccggtgcccgtctcgccggtcagcaacagcgaaatatcgcgatcgagcacacgccgcagcttctggacggagcgttgcaggtctgggtcctccccggccaactgttcaagcgtcggctctgccggaacgacccttaggccgcgctcgttccgggcgcgcggcggggcggcagccggcatacgcagcgtgacttccagcgccgggccaccggccagccgtaacgatgcgctgcgctggccaccctgggtcagggtgatcagctcatccagtgaaatggaaaggacatcctgaaccgcctcccccagcaacgcacttccgtggccggcggctgaaaaagccgcgcggtttgcgccgaggatccggcccgccacatcgagcgccagcaaccgctcgttgcccaggtcaccggcgtcgccgcccagggtcagcatggcgcaatgggcatagcgctggcggaagctggcgttttcgataagccgtgcgtacaggctcaccagctgaagcgtcagatattgcgcctgcttcggcccgccactgttgaggcaggaggcattgagacaccctaataacgcaccctgaggatcgaacagcggcgccaccgagcaactcagcatggcgttgctgctgagaaagtgctcgtcccggtggatgatcagcggctggcccgcggccagccccgtaccgatgccgttggtccctaccagcgactcgtcccagcaactgccgaccaccagccccgagtccgcataggggctgtgctgccctggcagccgcgcgtcgagcgtgataccgcggcgatcactgagcagaaccgcaaatcccgccgggttcaaacgccgcgacaacccttccacgccctggctcgcaatggccagaaagtcatggtgctcttcctgatgcaggcggatctcgtgatgctcgagctgaacatgggcggcagcttgagccggatctagcccgtgctcgtggacgctgcggtaccaggattcggcaatcaatcgatcgggattggatcctcggccggcgaagtgcgtggcaacgaatgcagagagatcggttggaagctcagatggcggacgcgcgatcatgcgggactccaaacaaggcgccgagtcgggccgtgcgtaattgttcgtgtcggccgtggaaacagccaaaaccaagcctagcacggcctctccacgccgggctgccgcttgctggaatggggtctttaaggagacagcttcgttggttgagcttcgcggcgcggggctgcttgtgttgtttcgcagggagggcagctatcggccagaagccgtcagtcgcttgcgactgctttcggcatggtaacttgcctggttccgggcagcttgatgtggtgccgatgtatcgctttgagtactggagtgtgctttttgacaagacaatgtcgttgtcaacactgcttcggcctgcccatcgtgggtgaatgacacaatacggagatgctcattgaaggatattgatatctatcatttagcgagtcaggtcctgggcgacatcactcgtgatctgaatcaaagtagatacgcagaactgggcggtgagttaacgctcgcttggtgcacggaacagaaatttggtgcctacgcgtcctcgctggacgaagcaggtaagccgccgaagcatcgcgtcaccatgtactacgagctagcacggcaggtgtggcgggacgctgaggagctgtgcaagttcttgcgaagcattccccaagactctggcgtcgataagctgtacgacttctacggcgacagggtaaagcttcctaagtgcttcaacgacaaggatctcgtcaataatatattcgtcgctgctatcacctgggtgtatttccatgagatcggccaccttatgcaggagcatggtgttatccgtgacgagttcggggagggacatagtggcaccgtaaagaccgccgacgtctacgattttgaagcgtcaaaccacaagcggctcgtgggccgagaggcgctggtttcccatgtcacggaacttgcagccgacttcgaggcgacaaacctctacgtatttgaactacttcggcacgtcaacgacccagacttcgtcgagggcgatgagcgaacagaagtgttgtccagcttgatatacctgatggtatgtggactctcgttgctcttcttccgtttcaatggaagtcaaccaatactgccaacagctgccatcgaaggctctcatccaaacccattgattcgactggaattaaacgtgcctcatattttcgagagcttagacatcgctgggaaaattttagatcacggcctggatcgcaaaaaacttgtcttgctttgcgcgaaagccgccctttcggccacgctgtactggtcgatgaataaaacggaaaaacgtgagttcgacaatcgctttttgctcaagggcctcctctccaacccggtcgtcctacaatatctccagccaattgtggcgtgttgggacgaaattcttccccgagttaaggaggttcgccgctttggctcacctctagggctgatgacttttacggactcgttcaaagagcgaattgccagcgtgatcacttggggtaatggcccggaaggggaaagcaccacatcctagtcacctaatgtaatgacctaatagatttacatagactcagcatcaaggtccaatatgtactctatcatagagtggatatgtttagaaattccttcgacgtgtgctgcctgccaaccgattaccttactgacgcagcgagcaaggtggccacacgcaatttgtgtgtcccatagctgatggctgtcgctacaccaacgaaatctgctgctacctgttgtcgtcagaagaatccgttcacttcgataatttgcttggtcgagtgatatttccttgcacaacaatagtgatcaccgagaccttggccggagattgggattctagaatcgtaatgctctccgcagccggccaaggcgctcctgttttagtactgcagtcgagcacgcagagcacagcaacacgcttttccttagcgacggcatagctcgcagtttgctcaacataggcttggcagtcctctagcgttttgactccctttggcagcgacttaagctcaataacgataccgcgatagctaaggtctgtgatgccaccagaagccttggggtgttcgtctagatcagagccaatttgaggattccgtcgaagctccttgcgaatcgcgtcttggaaatgcgcctccgaccatacgccatcgaattcggcatcttggattgctcggcccgctactccccctaagacagtaaccacctcgaggacatcacggagctcgttggtatttacaagaccacttcggcgtaggaagtcccgaatgttgagtattttctcgtcgactaacgggtagccagtgatggggtttgacctgacatcaagtccttcgatgagaagagttcgatgccctacgatggctacaggctgttctgagctgactggctcgaatgctgctgagtacttgaactcgtaaggtcgtgcattcaatccttgcgcgagctgaagggcggcacgtcctcgctggataagcgtgtacggtggcttgccctcaggcttatcgaagacgaactccgagagatcgtaggtactgcgtagttccgttgatatgggggacagcctcagcattgctgcagactcaggccagcgcgaaacacggacttcgacttcaaggtcatgcagctcgaatggcgtaaggtggtggatgcttctagcctcccgcccatcgatttggaatttcaggaatgccaccgagagctcggcgggggggggcggcgaagcttcctcgtcagcaaatttaggcacgattctctgcgatactttggaaaacacgcccacaggcaaaggtacagcagaaagcgccttacaaagctcttcaaaatcggaaattgaagctacacgagggaaagactccgaggcgataacgagggctctcgcagcatcttgttcgccatattcattgtgccaaagacgatatcgctcaagggcgcttcttaaaaaacgctccactccatcgcttgctgcaagcacaccttcccgccattcagcgagactggtgacgagtcgtagtaggccggccaaggcgctgtaagtagttgcggttgtcgcccgtccataccggagtgaagcttcgtccagctctgtacaaatggctctcaggtcctctggttcgaaagagctacctgcccccagtatccggagtgcttcaactgccctaatccggctgaaaaaagcttgggagagcactgcgtctgcttgcatattgcttttcatcctccttgagggatgtttcgagttgaagccattccgtttgcagtgcctcctgacgggacgtgtctctcccagccacagcggcctcgaactgcacggcaattacgtgaagtttccgataccacttgaagcgtctttccggaaccgtgtctggaactgcttcccacgaggcgtgcattgccgcctcagcttggggccaagcaccgacgcgagacagcagctccactactgcccccaccagcatcaagcgtccaggttgtcgcttaaccatttcgactaagtcgtcggcacgttcgagtgctacggcctccggaatgagatgcacaaggctgctggcatcctcttcaccgtgctcgctgagttctgggtcatcgaacgtgtgaatcactaagtcggtaaaatttgaggcagcagagagcgctttccccattcgggagaagtcactgatgtgaagattggctggcgctttcatcaagaatttgatgagaaaatttccaagacctgactgaagctgttgaggggacgcgaacctagctaggtataagcgtatgcaccgtatcaggaagttgtgctcatcccttttgccaccgtagtaggggatgagctgcaacagggccccactagcacgtcgctctagatgtgctggcagattgatgctgggaagcgcactaacagccgccttatgtaccatcacatacggatcttgcagaagcaggacaaaagtttctagtactagctcggggaggtcagaggagcgggctctgcctagatcgccaagtgctgtgccagcggccgcacgacgacgaactgaggctccgagaagcgatgtatagagataaggcagaacaaaattcaatgcgagcgggctatcaacgagagatggggtggctttggtaattgttgagctcagtccatcccggtgctcatcaatgctagtgaggaagtcgacgtaggattggacgagcttttggttgcccttcgctgcttttgcggcgatcacggcacacgaatcgcggagttgatggagtgtggtcgcggagttctgtgcttcaagatgttcgttgaggttgattggtggcttagtgatctgttcagcgtcaaaagcttcaatgcgagcatctaaaacagctgctgtgccgagcaaagcatcaatattctgtttaccagctgcgacgacttcgtcaggctcgtttctgaaagcttggacaacgaggcgaagaaccttctggtttttagatgtacctgcaagcttgagtagacgtcttagaaccaccacatacgcggcaacatcagaggatgacatttcgctttcaccgtcttcaccaagtcgtattgagtgccgtgaaagctcttcatacacccgagttaggcgttcctcaccctcagaggatgcgctatcaaaaaactcagaaattgatgcgtctatatcttcaggtgcagcaaggagggctagcacgatgatacgtcttaggtcggcgcataccatcccaagctctcggtcagtctggtccttctcgaataacaaatgcgcacgggcgagctttgaaattgttgctctagaaaaccttggtagaagttcagcatcatcgctgtgcagcacatgcagagcggctacccccaggcgaactgggtatgactgcttcgagtcgagtaagcgctggatcgcgtggcgaacaacatccggccaagatttgtagatcgtcttgagcggctctggcctactgataggggcgtccattgggaaattttctcgaggacgccgggcaagggctatgagcgcgggcacagcgcgctccaccttggctggcgcgcccagctctgggtatgccatgacgatttccgcagcgactccgacagcatctttctttgcaaggcagtcccaggcagcttcagaaagttgagctttgtctgcgcaaacctgccgcaggaccaatagtgcctgttccttcagattcatttcgtcagagacggcaagctcaaagaagtactcaacaatcggggcgttgaatacttctggggcgagcttggctgtctcgactatccggatcttcacctcatccgatgagcacgcatcaagcgtgtcgaggtcgtcgagaagagagcagcaagcagcgctttgcccttttctgagggtcagtctctgttcgatcctcccttgatgggctgcttcagcccgagcgtgcgctttcttttgtgcctccctttgtctttcttgggcccgatctcgctcatccactagcttcagcaagttgggcattcgaacagccactcgcttgtcgcaatgagcgcaattttggtcatagaaatcaacagcaatgggcttgagatgccaccctgccattccagacgctggcgcgtggtcacaatggacgccgagcattccaatcggaagaccggtcatctgtgcaattagacctacgccgccacgattgaccacacgagcatgggaacagaagttgtgcacaagctggagagcctcattgtttcgacggcctgtttggatggcttcttcgatctcgtcttcgttcatctattgagtcccttccctgcttggttggccttatgtctctgcgtaagcctgctaccgccttcataatcatgctgattctcaccgagcaatgttagtgggcgccatagccaggcaggcctgtcgaacgtgtctaggaaaataggagattattgacctcgtggttgtgtaacggagtcaggtgaaccatagggaggtttaaaggtatgggcggcgtcaagagaatgatggaagaggacatggaacgaggtttctcgcgtatagatcacgcatacgtttgtgtccgctgcgtcactgacgacgggcttataagcttcatcaggaaaaactcgaccaaaggaacatgtagctattgcgacaaaaaccgccacgttgctgacatgaatgacgtgatcgagcacattgtcaccagcctctcattagagtggggggaagctgcaaatgaggggctagcctacgaaacccgagaaggtggatggcagggccaggtttacggaacctgggagcttctctatgactacggccctgagtgctctgaagaggtattcagtacgatggtaggttccattcacgacttagcttggtgcaggagagccccgtattcactacccatagatcggatactggtttacggttggcagagcttctctaaattcatcactcacaccgcccgattcgtcttttacaaggctgtaaacacgtcatatgcggccggccagcacgatgagatgaacccggtcgacattcttgaaacgctgggtggcgtgatcaaaaagttagacctcataggaacagtacccgcgggccagccgatctttcgcgtccgcattgttgatcccgaaatccaactcacccgatctcatgagcttgggccaccaccagcggctcacgcaaatatgccgaaccggatgagccccgtcggcattcccatgttctacggtgcgttcgatcaacacacggctattcgtgaaacttacgatcctgctggcggggccctaaagaaggcagcaaccggtgaattttcgcctaccagagatctacggatcgttgatctatctcgatctttttctgcaccaagccttttcgatcctgaactgcagagactcaggccatacttcagcttcatgcgagacttcgttgaggattttaccaaaccgatcgagcgtagcgatcgtgcccacgctgactatgtaccgacccaagtcgtgactgagtactttcggcacgtttaccgcaccgacgatgatcatcagattgacggaattatctacccaagcgcaaaaactggcgacaaggcaatcgttatttttgctgatgctacagggtgtatcgacgctggagatgcaactagtgatcaagcggttttgcggctcgatagagcattcgatgttgatctgtctggcttctacgaagcccttgatgacgatcatactttctgacaatcgccacgcacccctggtttttccaatgagtgtattcattggcttggggcagattgaatcaccccagctgttgtagatactcgatgaccgcttctggccgactccagcctgttgcggcctggcaactcccggccaagagcggacattaatgttagaaaaataaatctgtccccttttgaccacttgctccccggcagctttcgtctcggtcgacatagggcagcaccgtaccgcaacggtcaggtgttgcactcattttcgccgcagcctagcttttgcgatagccggcttaggtgggggggtgtaaccaaccaatcacatatgaccttcatcttgctagcattgtgtctgagcctggagatgagaaagcacgtttgcatgtaattcaggatcgactcaaacctgccgatatggaaaaggggattgctgcgggctatctagcctgaggacgagttggtggaaaggaataaaaaggtgctgacatttttgaagcgcttacggtacccaatactggcatttatggtcatagcctcactggtaaacgcttttgtgcgcttcgttggtgactggagtaatttctggacagttctggcagcacacgcattgttcatacaggcggtgtttgggtaccttcggggaggatgggttgccattggtccaggcggtttatccaaagatgcaaaccccctagggagagcggcactagctgctaccgcattcgcgttttatctgctgacatttagctatgagatcgataaccaagccgattcggctcacgaacgacgagcctcggattggacgatgcccacccgggcggagcttgggcatatgactgagtaaaccccagcagacgctggctaacacctcttttacaatcgatacgcggtcatcggctgccttttgcaatagcgcgcatttaatgtaaaaaataaatctgtcaccactactgccgatttctgttttttgaaagttgcagatatcggcgaaagcatactgtcatgtagtctacgcagtctgggttggttcaattcaatctaatcgacgactctaaccgtaaagccctggcaacggagctgcaacactggcactttcgaatagacccacttaaaattcggcgctggtgatcgatatccactaacggaaagtatttgagtgaaaaagctgttaaaaaatcacgcggtccttctgctttggctggtattaccaggttgctccagtttgttttccggcaatcgggaagtaccaatttcagaggaacagaaagtcaggcttcaaacactaggagaagcgtcctctgtcatattgccgagggtcaatactggtaaggagggagtatataccctggtcgtggcgttcgatggcaccaacaacgaccttttcaataccccgagctcggaaaacgccacggtggttggcaggctttatcaggatgtcatcgacgaggtcagcaagggtagtgaaaatgcgtcgattcctgtgaaagctctttgggcagaatactacccaggtccgggttgcccttcctgggtagcatgtccatttgattctgccattggctggagtacctggctgacagctcgccgcgcggtggccgatgtgaagtcaaaaattgtcaccatggatgctgaagtcagagagattcgtgtcgttgtcatcggattcagtcggggcgcggcgacatctcgatatttcctgaatctattggcccgcgagccattgcgtaacgtacatggcgaaacactcactgtgcgctcctacgcacttctattcgatacagttgcaactggtttggcgaataatctggctctgtcgttaccctctaatcttgaatttgcataccactttgtggcccagaacgagactcgtaggttttttgggctagtggtcgatgccgatgaagattatgaaaaaaatccgcttgcaaaactcttttactttccacagcgaattgtgactattgaagtgccgggggcgcattcagacttgggcgactcttacaagaaaggtgctggaatggcagtcacgcagttttcccgaaagactatggcagcgatggggttgaggccacctttgagaaattacaattgcgacctgcctgaaaacagcgaacagccaggttgtcgcgtgttggatgaagggctccatgattcacgaggactgatcgatctctggatgggggtgccatcgccttatggttgttccaattatcgtgatattaccgtgaagcgaagtcagatcagtctggacgatgcgatggacctgacgttgcggcgttataaagggattgaggacatgccgactatcagtggcagctggttactctttaattatctcgaaaactatcgcttcaccagtctgggtgggccgaatccggttttacttccacgacccagcgacatcggcttcaacgctgtggtcataccggtaggcgaccgaaggaaagtggtactcagggggttaaacaacgatcaggtatacaccgtgccggagcaagtgctgcagcaggtgcgtgaaacatcggggccttcccaacttgaactgaatctgatcaaggggcagcctcgctggatcgtgaatggttgtatgccggacgaggactgagtcaactgacatccctcggtcaaccagatcggcatgaaaatatcaaattcgcgggtacagcctctatcgaaggacggggacaggcttaattttcttacttcaggcgtccgcttctggccgataagggccgctctactacaaaacccaaccccttgcccgacgaacctggcccagactgagtacaattcgcgcccaatgaatctgggccagaaaaatggacatatcgaacgaggaactcaccgcgatggcgtctccgaacaaacagcaaaagcgcgcccagcgggctaaggtcaaggccaagcagaaccgttcgggtaaggccaaggccaatgttctgcatccgttgctggccaatccgctgatcgatgagccgttcgacgatgtcgagattgacctgagcaccttcgacttcaaggacattgaagagaacggtttcgacccggcgcactttgacgatctgttccaggcgatgagagctgctgaaggcatcagtctgctagcgatgtgcttggtcttcctgcaatacccggtgttggagctggtggtcgcagaggaagcggaagaacctgccgtcgacttcatgatgggcttgctgatcgtctatcgcgggttgtttcacggcgaagacgaagacacggcattgagttgggtcggcagcgagaccttccagagcgcctacaacgaagcatcagtgatcttgcagaagaagcacgctcgccgtacttcggcaaaacccggctagccgcactcgccgcccctctaccccaccgttccccgacgccggcatagcctttaccgagcttgggccggtgatcgatgcgattcacaccggcttacgtcctgatcgtgtttgcagtgtggccgatgcagcgttagacaccggcatgatcaccgcggggctgtgcacggagcacagccagccgcatccatcagaacccgtaccgctcagcgcctgccggaaactcttcaaccccgccgtcggcccaatacctcattagcgaaagcggcacctgccactttcttcccctgccccgtttcactgtcggggcataccgctggtgaaggaatcccgatgaagcatccgaaactcatccatcacggcgcgcgtgaaggcgtcacagggtcgtgccatcagttctggatggatgacagttccagcgtattgatcgattgcgggcagtttcaggggcaggatgcgggtccggacgacgatgagctggctctggatttctccatcgagggcatcaaggcattgatcgtgacccacgtgcatatcgatcacgtggggcggattccgaacctgctggcggcggggttcagcgggccgatcctgtgcagcgagccgtcggcccggctgttgccgatcgtgctggaggacgcctttcgcctgtccatcagccgcgatcaggatcaactggagcgatatctcaaggtggtcgagcagcgcatcatcgccctgccctacggccactggttcaccctgaacgaggccgagagcggcgagtgcaaggtgcgcttgcagccggccgggcacgtgttgggttcggcttatgtcgagctggagctgcgcgccgccgatgccaatgccgatgccgagcgggtggtattcagcggcgatctgggcgcgccgcattcaccgttgctgcctgatctggtgccccccgagcgcgcggacctgctgatcctggaaagcacctacggcgaccgtcgccacgaagaccgtgcgcatcgccgcgagcggttgcaggcagccatcgagcgggcgctggccgacgagggcacggtgctgattccgtcgttcagcattggccgcacccaggagctgctgtacgagctggaggagatcctccatgagcgaagcgagtcggcgccagccagtgacacgcccaacgcatccgcacggcaggcgaaggaaggcgacccggatatcgactggccgcatatcccgatcatcctcgactcgccgctggccggccgcttcaccagcacctacaaggagctgcaggcgttctgggacgaagacgcgcgcgagcgcctgggcgaaggccgcaagccgctgtcgttcaagcagctcatcaccgtcgacagccatgacgagcacatgcgcattgtcgaacaccttacccagaccgcgcgccccgcgatcgtcattgcgggcaacggcatgtgctcgggcgggcgcatcgtcaactacctgaaggcgatgctgggggacccgcgccacaacgtggtgttcatcggctatcagggcaagggcacgccggggcgggatatccagacgcacgggccggacggcggtttcgtcgatctggacgggcagcgcatcgacatcagcgccgggatcgacagcgtcggcggctattccgcccatgcggaccaggcggatctggtcggcttcgtcacccggatgaagcagtggccgaagcaaatccgcctcatccacggcgaagacccggccaagcaacaattggccgaagtgctgcgggcgcgctaccgggacgccggaaaggacggggatatcagcattccctgatgaccacccaaggcctgtccatcgatcgcgggcgcgcgcacgaagcgacgcgggacggcgctgaacgacccgctcgcgggccgctacggcatcgcgcctgcgctgcgtgccggtgctagagtgcgtgctccatcagcgcacaatccccctagcgaggcctccatgctcaaccatgtaatggtcggttcgaatgatcttgaacggtcgaagcggttctacgacgccgtgctcggcctgctcggcgcaggcgagccgatccgcaacacgggccccaccgggcacacccgcctcttctaccggcacgacggcagcctgttcggcgtcaccgagcccatcaacggcgaaccggcgacggtcgccaatggcggcacgattggcttcaaatgcaactcgcccgagcaagtccaggcatttcacgacgtcgcggtcgcccatggcggcaccacctgtgaagacccgccgggcctgcgcgaaagcagcctcggcgcgatgcacctgggctacgtccgcgacccggacggcaacaagctgtgcgcgatctaccgcgcgccataaccgcccactgagcgccgcacacccaagtgcggcactgccctgaccgtcgatgcgccgcccgctgcggcgcatcaggcgtcatgaggcggcgtcgcagctcccatctgatcgaactcctcgtaccgaattcgccatgcagggcggcgtggtctcgccctcaccgcttccggggcgggagacgcagcgcgtcgagcaccagcctgaacgccggcgagggctgcttgcggctggggtagtacaggtagtagccatcgaacggctcgcaccaatcatccagcacccgcaccagccggccttcttcgaggtgcggggcgaattcgtcttccggcaggaaggcaatgcccaggccctcgagggcggcgagcacgatatgcggcgtgctgttgagcaccacctggccctcgacgcggacgttcagtgcctgctcgcctttctcgaattcccagacgtacagcccgccatgggtcgggaaacgcaggttgatgcagcggtgcgcggtcagctcctgcggcgtactcggcctggaatgctctgcaaaataagccggcgatgccacggcggccatccgcagcggcgggccgatgggcatggcgatcatgtccttgtcgatggtgtcgcccaggcgcacgccggcatcgaagcggtcagccacgatgtcgcgaaaaccgtagttgacgtcgaactcgacgttgatatcagggaaggccttgagcagcggcgttagcttgggcagcagcagggtccgcaacacatggtcgccgcaggtgatccgcaccgtgccggccggtttctcccgcaggtcggtcagcacgtccagttcggcctcgatctcatcgaagcgatgaccgatggcccgcaacagccgttcgccggccggcgtcggcgagacgctgcgtgtggtgcgggtgagcaggcgaatgtccaggcgcttctccagcccgctgaccgcctggcttagcgccgattgcgagacacccagctgcgccgcggcacgggtgaagctgccttcccgcgcgacggtgacgaacgagaggagatcgttgaggttgcgtctgaccatgggcctagggtctgttgatgtttcgtctagcttggcacaaatgactgattagcaatgcttatagcggctttaagcattcattagctaatcaagatagccctatcccgagacaatgctcggcagagacgtcgcgttgccgccggctcgcaatccattgcgagtaagcagccgccgcgtcagccaggcactgcggccattgccgccaccgaggggtatcgccacccatgaccagctgcataaccgacgcaacatccgacgcccgcgagaccgcacggcagccagcgcattggggcggcgtgttcgccatgtcgatgtgcgtcttcgcgctgatcgcctcggagttcatgcccgtcagcctgctcacccccatcgccgccgatctcgaagtcagcgagggaatggctggccagggcatcgcaatttccggggcgttcgcggtagtgatcagcctgttcatctcggcactcgccgggggcatgaaccgcaaggtgctgctcttggtgctgaccggcatcatggggctgtccggcgcggtcgtcgccctagcgccgaactacgccacctacctgctgggccgcgcgctgatcggcgtggtcgtcggcggcttctggtcgatgtccgcggcgacggccatgcgcctggtgccgccggatcaagtcccgcgcgcgctggcggtgttcaacggcggcaatgcgttggcgaccgtgattgccgccccgctgggcagctacctgggctcgatcattggctggcgtggtgccttcctgtgcctggtgccggtggccctcgccgcgctggtctggcagtggatcagcctgccgtccatgccctcggattcgcataaagcccggccgttgcaggccttcaagctgctccggcaaccggtggtgaccctgggcatgctggccgtcggcgtgttcttcatgggccagttcacgctgttcacctacctgcgccccttcctcgagacggtgacgctggtcgatgtcgccatgctgtcgctggtgctgctggtgatcggggtgatgggctttatcggcacgctgctgatcagcgcggtgctcaggcgtggcctgtatccgacgctgatcggcatcccgatgctcatggcggcgattgcgctgctgctgacgctgttcggacacacgatggccgttgtggtcgtgctgctcggcatctggggcctcatcgccaccgctgccccggtgggctggtggagctggataccagcgacctttccgcaacacgccgaggccggcggcgggctgatggtggcggtcattcaactgtcgatcgccatgggctccacgctgggcggtgtgctgttcgacgccagcggctaccgcgccaccttcttcgccagtgcggcgctgctgctgggcgcagcctgcctcaccttcgcgacgtcacgtacgcaggccgatggctcatgaggcgtcggcacaaccaaccccggccaagcggctgccactcactgaatgaaaggacgggacgatgaaagaactgctattggcggtaggcctcatgaccagcacctacacctttaacgcgatggggcaggacatgtccggcggtgccgacaacttttacaagagcgaaagcctgacccaggagaaagtccggttcgacaaccagtacaggatgaaggtggcgggcaacctgttcatgcccagcaacgccgaccgcaacacccgctacccggcgatcatcgtcggccaccccatgggcgcggtgaaggaacaaagttcgaatctctacgcgcagaagctcgccgagcagggctttatcacgctcgccatcgaccagtcgttctggggcgagagcgaaggccagccgcgcaacgcagtggcgccggacatctatgccgaagccttcagcgccgcggtggactacctcggcacgcagccgttcgtggaccgcgagcggatcggcgtgctgggcatctgcggcagcggcagtttcgtcatcagcgcggccaagatcgacccacgcatgaaggccatcgcgaccgtcagcatgtacgacatgggcgcggccaaccgcgacgccttgaacaagtcgcagacgctggaacagcgcaaacagatccttgccgaggcggccgagcaacgctacgtcgaattcaccggcggcgagacccgctacaccagcggcacggtgcatcagctggacgccgacacccatcctatccagcgcgagttctacgacttctaccgcacgccacgcggcgagttcacgccggccagctcaacgcccgaactgaccacgcacccgatgctgaccagcaacgtgaagttcatgaacttctacccgttcaacgatatcgagacgatctcgccacgcccgatgctgttcatttccggcgacgaggcgcattcgagggaattcagcgaagcggcctatcgcctggcgggcgagccgaaggaactggtgtgggtcaagggcgctgggcacgtcgatctctacgaccgcgtcgacctgatccccttcggcaagctgaccaccttcttcaagcacaacctgggcgagtgatcgagaaaactgctcggccaaggccgtgacatcagcccatccgatacggagagacctatgcgcaagccactgataaccctgttgacctcagccctggtgccgatggcgttcgccgccgaaagcaacaccgaagaccaacgcatcgccgtcgccggcagccaggcatccatcgccggcccggaagcgtggttcaccggccatgcgcgcatcgacccgctctacggcgcgaacgaacatatgaacgcctccggcgcctacgtgaccttcgagcccggcgcacgctcggcctggcacacccatcccaagggccaatatttggtggtcaccgctggcgtgggacgcacccagcaatggggcaagcccgtccaggagatcaagccgggcgacgtggtctggtgcccaccgggcgtcaagcactggcatggcgccgcgccgaacaccgccatgactcacattgccgtcaccgcggtcgacgaaaagggccagaacgtcgagtggctcgaaaaggtcagcgatgcgcaataccagggctcccggtaacgcgcattcggacaaggctcgctgtcgtcacgtcgcaagcctcctgcttcgctacggcgcgctggaggtcgccagccgcacgccgaacgcaaccagcacgccaccggtcacccgatccagcgcccgggtcaacgctgcgcgccgcaacagcttcccgaggggaatggtcgcggcgatcagcacggcgaaccaggccagcgtcagcagcacgtgcaggcaggcgaggaagaacgagtagcccgccacatcggcgccgagcgggacgaactgcggcaggaaagtcacgtagaagacgccgattttcggattgagcaggttggtcagcagcccgcgccagaaggcctggccgttcccagcagacatgcctttgcccgtccccgtatcgaacgacgcgcggggccggaacagcagccgcgagcccagccagatcagataggcggcaccggcgaacttgaccaccgtataggccagctcggaggcctgcagcaacgcgcccagcccgagcgacaccgccaccccccaggccaggcagccgaggcaaatgcccgccccggccagcaccgcctggcgccgcccttccagcgtcgctgtgcgcaacacgatggccgtatcgacgcccggcgtcacggtgagaagcgaagcggctgcgataaaggcgagcaagagcgggagatcgatcatcggtaacgttcctgagcattcgaaggcaaagggatatcgaccctatctggcccagcgcaggccgcagctcggtctggtatccaggaggcggggcatgatctcaccacgagtcacccgttgcatcacgctgacacgattgatcgtccgtccgcgatcgacgtccgctcctcgatacgccaagcccaaggtgcggcacaggcgatcagcggataccgccggcaccgagccattctccacgcaggtacgtccgtggagtcgaacctgagtcgacgaggccgcacgactcccgctgttaggctataaagattgcggcagccacgccggaggagacgccatgacccgacctaccgtgagcgaaaaacgcgcgacctttcgcgagatgcaccgtgcggggtgctttctgctgcccaatccctgggacgccgctggcgcccgtctgctcgagcagctcggctaccgggccctggcgaccaccagctcgggctatgcctggtcgcaagggctggcggacggccaactgtcacgcgccgataccctggcgcacctgcgttatatggcggccatcagcgatttgccgatcaacgcggacttcgagagcggtttcgggcgtaccccggaagaggtcttcgaaagcgtcagcctggcggtggacaccggcgtggcgggcctgtccgtcgaggattcgaccggcgaccctgaccaacccgtgcgcgacaaggcgcaagccgtggagcgcctgcaagcggcgcgcgccgccatcgacgctctcggcggcgacaccctgctggtggcgcgcgcggaaaatcacttcctggggcgtaacgacctcgacgataccgtcgaacgcctgctcgcctattcgcaggccggcgccgactgcttgtatgcgccaggcctcaggacccgggaggagatccagacggtggtcagcgccgtcgcgcccaagccggtgaacgtgctgatcggctggagcagcgagctgacggtcgaggcgctggccgagctcggcgtgcgtcgtatcagcgtcggcggggccttggcccgcgccgcctggggcggattcatgagcgcagcgcggacgatgatcgagcaaggtcgtttcgatggcttgcgcgatgcgctatcgggtgcggaactcgacgaacggctgcgctcgaacaggtccggtaactgaaaccgcagcagtgcccgcaatcactaccagcacgtcccccgtcaccagggcaacacctccccgctgtggcgtagaacccgccactggcgtccgcgcgtggacgccgcgcaaggcttcggtcaaggcggccgatcccgccggacgccccaatgatcagggcgctaaagccttcgggaaacgagtccagcggcatgtcgatctgctgcggtacagattcaggacaggcttaggggctacgggggtcggtttcactacgccagcgctcgatatgcccggcgagcagatcggcaatgggcaggcacgcgccgagccggtagaggttccagtaatgcccttccagcgtacggttgaccagtagcgtgccggaggctggctgcagactgccgagcgcggacatcaccaacggaaacagctcgaccagttgctggtgcagcgatgcgccgcggaagtcccactgggcaccgggctggagcagggggtgcagcagctggtggatacgacggtacagcccatgcggcggcacgctgccgggctggcgtccgccgagtgcctggaagcccgcctccagcgcctcgctggaggggccgcgcagcgcatcgaagagctgcacgtaggcccgcaacaagggcgtcgacagtggcacgacggcgccgaagtcatagatcaccagttcccccgcctcccgccaggcgaggttgcccgggtgcgggtcggcatgcagcagccccatcccgaaggcctgttcggccagccattgacagagggtttcggcgagctgctggcgcgtgtcggcggtggccaggtcgacctcgttcatcgagcgccccggcagttcctgctgcaccagcacccccgggcggcacagttccgtcgcgacaaatgggatgtccacgcccggccactcggcgaaatgcgcaccgaagcgctcggcgctgcgccgttcggcgtcgtaatcgagttcctgttcgatggcgtgttgcagttcgcggtagaccgactcgagtcgcgccgccggcgtgccgaacaggcgtccgaggggcatcaggcgccgcagctggcgcaggtcggcgttgcagatcgcacggatgccgggatactggatcttcatgatcagcgcccgcccctgccggtcgcgggcgcggtggacctggcccagcgacgcggccgccgcgggccggtgctcaatggattcgaacagctgatagagctggccgtcgtagagccgttgcagatgcgcttccagcgaggcgaacggcagcgacgggacctgattctgcagacgggccagcgccgcgctgatcggcggcggcaaaacgtcctgccactgcgacgcctgctggccgagcttgagtaccggacctttcatctgccccagggtgtcgcccagcagcgcaccgaccggtgtccaatcgacacgcgaggcgccgggggtgatgcgctgcaccagcagattgccggcgatgcgcgcacccgtgccgcccagatgcagaaagcgccccaacgccgaggccgacggccgtgagaatcgagacatgcagattacccgcagtggccaagcgtcgatcatgggccagaaggcctgactatccaagcgccagcgaattgcaagctgttgcagccgggagggcgtctattcgacaaggccttgcgataacgctccttaaaaagatgtcatcttgccagcatgcggaacggcacggcagttgccgagtccgatgtcaggctacgcccctggatcgggcgcctgccgaccgcaacactgggcctcggcgctgcttatggcgatccgccaagggtttttgcccgagcgcctaaccggcctttacgggcgtgtcccgactgctacggcgcacccacgcccgacgtcgcggaacagagatacgctgcctgccccggcggacgcggcgtaaggagtatctggatgaacgatttcgatgagagccgtatggcggcgggcgaggaagatcggcgcatttccaccggcagcgaaggcctcgacgacatcctcggcggcggcctggatcccaatcggatgtatctctacgagggcagccccggttcgggcaagaccaccatcgccttgcagtttctcctcgagggcgtgcgccatggcgagcgggtgctctacgtgacgctgtcggagaccaagcgcgaactggaactggtcgccaagcgccacggctggacgctcgagggcatcgatgttttcgagctagtgacgccggagaacacgctcgatcccgagctcgaactgaccgtgctgcatccggcggaaatggagctgagcgaaacgaccaaacaggtcttcgaccgggtcagcgagaccaatccgacccgggtcatcttcgacagcctgtcggagatgcgtctgctggcacagagtccgctgcgttatcgccgacaggtgctggcgatcaagcactttttcaccacccgtcgctgcacggtgatcctgctcgacgaccagacttccgaaagcggcgatcttcaattgcactcgatttcccacggcgtggtgaagcttgagcagctggccatcgactatggcgctgagcgccgccgtctgcgcgtcatcaaaatgcgcggcatccagttccgcggcggttatcacgacttcacgatcaaaaaaggcgggctggcgatctacccgcgcctgattgccgctgagcaccactccccgttcgtcggcgaactcacttccagcggcaacgacaagctggaccagatgctgggcggcggactggaacgcggcaccaatgcgctgttcatcggagcggccggggtcggtaagtcctcgcttgccctggcctacgccgatgcggcctgcagacgcggcgaacaggcggcgttcttcatcttcgacgaaggcatcggtacgctgctggcgcgcggccgggcgctcgggttggacctgcaaccctggatcgacaacggcctgctgcatctgcaacaggtcgatcccgccgaactgtcgcccggtgagttcaccgccgcggtgcgccatagcgtcgaggtgaagaaggcgcagctggtggtgatggacagcctcaacgggtatctgaacgccatgccagacggccgcttcctgatcctgcagatgcacgagctgctgagctatctcggtcagaaaggcgtgatcagcgtgatggttctggctcagcatggcctggttggtccgatggatacgcccattgatatcagctacctcagtgatgcggttatcatgctgcgctatttcgaacacgccggtgtggtgcgacgtgcgctgtcggtggtcaagaagcgcagcggacgtcacgaagacaccatccgggagtttcgcctgggtgcctccggaatccaggtcggaccgccgctcacgcacttcaccggtatattctcgggcacgccgcagtacaccggcgatgcgactcctctcatgaaagacgagcatgacgacgcctaagcgagacagccctttagtagtcgtcttcgcccccatcggccgggatggtcctgccgcggccgatgtgttgcgccgcagcggcatgcaggccgaggtgtgtcacagcctggccgaagtgctgcagcgcgccgaacacgacgccgatgcggtgttcatcgccgaagaggccttgttcgggcaggacctccaggacctcggcaactgggtcgaccagcagccggcctggtccgattttccgttcgtggtgctgaccagcaagcatcgacagccggcggtcagtgcgtggcgtcaacgcatggtcgcgaccctgcgcaacgtttcgctgctggaacgcccggtgcagagcatcaccctgtccagcgcgctgctggctgccgtccgcggccgccttcggcaatatgaagtgcgcgccttgatcgaggcccgcgaacaggcttcgcacgagctcgaagccctcgtggtcgagcgcacccgcgcgctggagcaggccaacctggaactgcgcacccagatggacgagcgtgcgcacatcgaagaaaccctgcggcagacgcaaaaaatcgaagccatcggccagctaaccggcggcatcgcccatgatttcaacaacctgctcatggtcatctcaggcgggctcgacatgctcgaccgccgcgccgatccggaacggcgcaagcgcctgatggacggcatgcgccaggcggcccaacgaggctcggccctgactcgtcagttgctcgccttttcccgtcgccagtccctggcgcccgagccggtggacctggcccagcgcatcagccagatgcgcgaactgctcgaccgcagcctgcgcggtgacgtgtatgtgaaacaggaattcgcgccggacctgtggccggtcgaggtcgatccgggcgagctggagctggtgatcctcaacctggcggtcaatgcccgcgacgccatgcccgagggtggctctatcctgctgcaggcccggaatgcaccgaacgagcaggtgctgggccggcgtggcgacttcgtccggctcgcggtgatcgacaccggcaccggtatcccggtggaggttcgcaaccgggtcttcgaccccttcttcaccaccaaggaaatcggcaagggttccgggctcggacttgcccaggtttatgggttcgcccggcagtccggcggttcggtgtggatcgataccgactgcgttcagggcaccagcgtggtgatgctgctgccgcgcgccaccagcatgccgagccgggccaaggatcaggcgcaggtcgacgaggccgtcgacgtgtcggccggcaacgtgctgctggtcgatgacgacgtcgaagtggcggcgctggtgggcgaaatgctcgagcacctcggctatcaggtaacccatgccgctagcgccgccgccgcgctgggtgcgctggccaacggtcgcagtgtcgacatcgtgttttccgacgtgatgatgcccggcggcatgaatggcctggaactggcgcgtgaaatccgcgcccggcggttcgacgtaccggtgctgctgaccagcggctacgccgaagcggtcaagcattccgccgaagccgaaggcgtgcagattctggccaagccctatcggctggaagaactcgccgctgcactcatggccgcgctggaacgcgtccaggccgccccagcttccgagcgtgttcagggctagccgaactaagcgagactccgaccgtcgaaacggcagccttgacgcccatgcgccgatcccgggccgcttggcgttcgtccgcagccatcgaaaggtcccgccatgccctgtttcccccgcctctgccattacgcgccgctgcccgtctcccgcgccatgctcttggccagtctgctgctgagcggcggcccgctgctggcccagacgaacgaacaggcccttggcgatcgcgatgcgcagaacaagcgctggagccaggagatggcgcgcaaaccgatgggccatccgccgccggtcgatgccaggtacaaccacatcatcacctttggccaatccctcgcttcggccgccgaaggctggcccgcgctctccaagcaaccgcgttacgacaacctgatgctgggcgactcggtgcgctcggcgaccttcagcggcgcgcgcttcatcccggtcggtgaagcggcattcaaaccactgcgcgcggtcgtccagctcaagcgtgagccgaaggtcatcctcgatagccaggcggtggcggcgctggaggagcacgcccaggaagaaggtgaatcggtggaagtcggcgcgctgaacatggctcggcatctgtatctggcgagcaaaggcatcaaggccgaccccgagcacctgttccttgccagcaacgctgccacgtccggccgttccattgcgcaattgtccaaggtcggcggcacccatgagtatcgccgggcgctgcaggcggtcgaccaggccaagcaggtcgcggacgcagcgaatgccagttaccgcatcagcgccttcttctggctgcagggcgaatacgactatgcgcaggttcagggcgggatcaacgaccaggcctattacaagcagcgcctgcgccaactgcgcaacgacctgacggccgacaccgcgcaggccatcgcagggcagccagacgcgccggcgttcattacctaccagaccgatgccaagtcatcggtggtcgatggcagcctcgacatcggcatggcgcagtgggaactcgcccgggaagagcccggttggtacctcgccggcccggtttacccctacgtggacaagggaacgcacctgtccgccaatggctatcgctggttcggccagatgctcggcaaggtctatcaccaggtggtggtcgagcgtcgcaactggcagccgctgtcgccgctcggcgcctcggtcgaaggtcgagaggtattcatcgacttccacgtgccctcgccgcccctggccttcgaccagccctacctgggttaccagcagcgaatgatcgaaaaccgcggcttcacgttgagcgatgcgcagggtgaggtgccgatcgaagcggtcgatctggtcgccgacaccgtggtgcgcctgaccgctggacgcgagctggtcggcactccgcgcatccgctatgccagccacgccgtgggcggtgcgggcgagttgcgcgacagcgacccgacccgggccgacgcccgctatgaatacctgccggctgaaggcatgccggacgaggcgaatatcgctgcgctggtcgacgccccctacccgctacacaactggagcatcgccttcgagatccaggcgcgccgggacgacaccggccaggccccgcactgaccgatcgggtgcagcgcttcaggcgatactgcgcaggcgcgcccgatccttcaccggcgaggcgccgaatagccggctgtattcgcgactgaactgcgaagggctctcgtagccgacccgatagccgaccaccgacacgtccagcccctcggccaacagcagacgccgggcctcctgcaggcggagctgcttctggtattgcagcggactcatggcggtcagcgccttgaagcggtggtgcaggctcgagctgctgaggttgacgcgccgggccagttcatcaatgcgcagcggctcgacgtagttgcggttgagccattcgatggcgtcgttgacccggtgcgactggctgccctgcagcgcgacggcctgcagatgccggccctggggaccacgcagcaggcggtaaaagatctcgcgcaggaccagcggtgccagcacgggaatgtccttcgggctgccgagcaaccggaccaggcgcacggtggcgtcgagcaacggcgcgtcgatgcggtcgacgtacataccgcggccgtccggctcgacgcccgaggcgagtggctctgtttcgttgagcaggccgctgatcagggtcggatcgatgtccagacggatgcacatatagggctcttccgggcacgcccgcaccacgcaacctgccaccggcagggttaccgacaccaccagataatgcagcggatcgtacgtatacagttcgtccgccagacgtacttccttgccaccctgaacgatgatgcatagcgccggcttgtgtacgccgtaggtcatgtcgccgggccgctcgcagcgaatcaggtagagcgggtcgatggcggtcgggtgcatgccgtcaccctcgacgaagcgctcgaccagctgtgccagctcggcgcgctgggcgctggtgtcgtcatggggggttacgaaggaattcatggaacaagccttcctgagtagcgaaggccgaaagcttagcagctcggtgagcattagcagtcactccaggcgtacgcccgtcgtgccatctcggctcgtccggccatcgcagatcaggccgttcgcgagcgaaccgggcagattaccgccgccatcagggttaccgccccgccaatcgcgcgggctgcagacaacaacgccggcacggggccggcgctgtctgactgccttgcgatcagctgcgggcgcgttcggcgtcgcgcagggccttgacctggtcgtggttgcgctgcacgccttgcatctgacgttcgaccaccgcacggacctccggcggcaactccttctccagcgctttgcggtagctcttcaacgccacgtcttcgccacgctcgcactcgttgagaatggcctcgtcatccttgccggtgatggacgtcttcagatcgatccagcgccggtgcatgtcgccggccatgctggtcccggtctccggatcgccacccagcgtacggaccaactcctgcagttcggtcgcggccgtggcacagtcctgggcacgttgggtcatggtggtcttcagttgcgggcttttcagatcctcggcgcattcgcggaagcccttctcgccgtccttgcaggtttcgatcaggtcgttgagtacggaaacggtgtcttcggtatccatgcaacagttctcctcggagattgataacggccgggaaagccacggccaacctgttcagtcgactgcgccgtttcggcaaaggttcagctgccccgcccggtgggcagtcacactcggcgcggaaaccatagagtgaagcaggtgcccgatacatcaatggtggcctgccctcgccaccgtgcagctgcatgaccgagcgcacgatagccagccccagaccgcaggaatctcccggttgggcgcggcctgtcgagcaaaaccccgacccgcctgttcgccgagcgcgcccgtaacaacccggacgcagccaacctcaacaccttcgatgaactgctgctgcttggcggcggcgttccgttgcgggtcggcgacgaagtgataggcgccataggcgtagccggtgccggcggccgaaaccgacgaggcctgcggcacccaagcaatcgctcggctacttccttccagaccctgcccggagaacaaccatgcacaccttaaaaacactttgcgccagcctcttcctcgccagcctgtccagcctcgccatggccgctgacaacccgctcagcgtgcatgtgctcaacctgaacgacgactgtttaccgttgcattgcgcggcaactggcgctcacttcatggcgcccggctatccgcacccggcaccgaggcggccggactgagggtttcaagcggggcgcccgtcccggcagcgtgccgttcgaggcgtcccgctgtctcctgaccaatcttttcgcgctgaaggttgtccgaagaaaacttacgtcgattcgagcttgaggctcgaacggactttttcgttttcgagcccagccgccgatgccgcaatacctcgctcccgttccccgctgggaaccgcatgaacgtccttcgatgcccggatccccggcgatcctgctgcatccgatgccggtgcgcatcgcctatgcctgtgtcgccgtgctggtgggcatcaccggtggcctgggcaatgccttgtttatcgccaacctgccgagcatccagggcgacctcggcctgacgccctcgcaggcggcctggctgccggcggcctatttcatggtcaacgtgtccgccaacctgctgatgatcaagttccgtcagcagtacggcctgcgccgcttcgccgagatcggtttgacgctctatgccctgctgagcatcgcccacgtgttcgtcgaggggctggagatggccatcttcgtgcgtgcagccagcggcctggcggcggccaccacctcgtcgctgggcctgttttacatgctccaggcgtttcgcaagtccgacctgccgaaggcggtgattctcggcttcggcatttcccagctgggcacgccgttggcctggctgatgtcgccggcattgctggagatgggcgagtggcatcggctgtacgtgttcgagagcggcctggcgctgtgctcgctggccgcggtggtcgtgctcaagctgccgctgggcgagcgcatcaaggtcttcgagccgctggattttctcaccttcgccctgctcgctccggcactggcattgatcgcggcagtgctggcgcagggccgaatcctctggtggaccgagcagccgtggctcggttacgcgctgatcgccgcgctattgctcatctgcgcggcgttcatgatcgagcaccaccgccgcaaccccttgctgcacacgcgctggctgggcaccgccgagatgctgcgtttcaccttcggtgcgctgatgctgcgcctgctgctgtccgaacagacctacggcgcggtcggcctgctgcagacgctcggcatgggtaccgaacagcttcagccgctgtacgcggtcatcctgctggggctgaccatgggcatcgccggcagcgcgatgacgttcagcccatcgatggccttcccgcagatcctgctgtcgatcgtgctcatcgccatcgccagctttctcgatatcgacgcgaccaacctgacccgcccgcatgacatgttcctcagccagggcctgctcgccttcgccagcggcatgttcctcgggccgctgctgatcaccggtatcgggcgggcgctgcgcaacgggccgaactatctggtgaccttcatcgtcttgttcactatgacccagagcctcggcggcctggcggcgccagcgctgttcggtacctatcaggtgatgcgcgagaaataccactccagtcacctgaccgaacaggtggtgcccggcgacccccgcgtcgccgcgcgcctgcaagcccagagcctggcgctgacgccgcgccagaccgacccgcgcctgcgccaggcacagagtgcggcgcagttgagccaggcggccacgcgcgaagccaacgtactggccttcaatgacgttttccggctgatcggcatacttgccatcgcggtattcggctggacgctctatcgcaccctgcgcatcgcgcagcagaacaggaacgctgcctctccatgagtgaacgtacccaaaccgaggacacggaaaacctccagcccgcccaaccgccgcaaccgtcggcggccgcgaccgatgccggcccggcacctgacgacccgccgaagaccatcaagccgagccgtcgctcggtcatcctgatggtggtggtcgcactggtcggcgtgctggcgatcctctatgcctggcagctgtggccgttcagcggccgcgtggcggtcaccgagaacgcctatgtgcgcgggcagatcacggttctcgcaccgcaggtcaacggctacgtgaccgaggtgctggtgcaggatttcgaacgggtcgcccaggggcagacactggtgcgcatcgacgatcgccagtaccgccagaccgtcgagcagcgtcgtgccgaactggccgcgcggcgcttcgatctggaaaacctcgaacagaccctggcctcgaacgaggcgacgctggcctctcgtcgtgccgaactgtcttccaccgaggccgagctgcaacgcgccctggccgacgagaagcgcgtcaacgagctggcccagcgcggttcggtctcgatccgcgagcgcgaccagatccgcgccggtgcccgggccgcagcggcccgggtgaagcaggcgcaggcggcgatcgccatcgccgagcagacgctcaaggccagcgaagtctcccgcggcggcctgcaggcgcaggtcgaaatcgccgaagccgcgctgcaacgggcgcggatcgacctggataacacggtgatcgaggcgccacgcgacggccaggtcagcgaggtcacggtacgccaaggccagtacgtgaccgccggttcgcaactgctctatctggtgccggaacagctatgggtgatcgccaattacaaggagacccagacgttcgccatgcggcccggccagccggtgcagatcgaggtcgacgcactggacggcgcgcgcctgagcggacacgtccagcggctggcgccggccaccggttcggaattcagcgtgttgcgcccggacaacgccaccggcaactttaccaaggtggtccagcgcgtcccggtgcgtatttccatcgatccggaccagccgttggcccaacgtttgcgcccggggctttcggtggtcactcatgtcgacaccggcgccgccgtgcaatccgatcaatctgtcacggacggcgcgcaatgagccgacgcccatatgccctgccctggctgatcacggtgctggtgctgctgcccctcgccggctgcatgccgccgcgcaagccgttgccaccgcaagccgcgttcacgccgccttccgactggcgcgagccgggcgcgaaaccggtcgagatctccgcgaactggtgggaagccttcgccgatccccgcctgacagcgctggtcgaagcggcgctggcgaacaacaccgatgtgctgagcgctgcctcgcgggtcgaacaggcgcgcgagcagatccagctgtcgcatgccgccctgctgccgtcgctggacgccgcactgggcgtgcagcgcacccgcgagctgagcgtgctgggcatcacccataccaccgccgtgcagccgtcgctgcaggtgtcttacgaagtcgatctctggggccggctgcggcggttgcgcaaagccgctgacctgcagtttcaggcgaccgaagccgagcgcgacgcggtgcgtctggcggtggccagtaccaccgctcgggcctacgtctcgctgctgtcgctggaccggcaactgcaagtcacccgagaaacggtcaagtcccggcaggaggcgctgcgcgtagccgaagaccgcgccagcctcggctacacctcgcaactggagctgacccaggcgcagtcggagtacgaagccgccgccgagcttctgccgcgcctgcaacaggcgatccgcgaacaggagaacgccctgcgcctgctcaccggccgcttgcccggcaaggtcgaacgcggcgccggcttattggccatcgagccgccaccggtgcccgccgtgctgccttccgccctgctgcgccgacgcccggatatccagcaggccgaactgctactggccgccagcagcctgaacctgcaagctcaacgcgaccgttttctgccccaggttcagctgtcggccagccttggccggttgttcgtcaactccctcgattacgaccccgtgcgggtctgggatgtcggcgccagcgtgctcgctccgattttcaatggcgggcggctggaagccggtgtgaacatcgccaccgcccagcgcgaccaggcggcgttcgcctatcgcgccacggccctgcaggcgttcaacgaggtggagaacagcctcgccgcggtcggcaacctgcgccagcagctcgcgcgcgtctccgcacggcgcgccgtgctggagcgctcactgacctacgccgaagaccgctaccgcgcgggctattcgtcctatctggaaaccctcgatgcccagcgcaacctgttcaacaccgagctggccgccgtgcaattgcgcgaaagccagctcaatgcgctgatccgcctgtatcaggtgctcgggggcggctggcaagccagccgcgaaccgcctcaacctggctgatcgactcgcagccggcgcgaccgcaccaagccgtcgagcatcacctcgccgatcacgaacagcagcaaactgacgcccagcaccggcaggcagatgccgaacagcacggcaacggccagcgccaccaaccgcgccgacggcgacagcgccaccagcgactgcaccaggccaatgcgctgcgccgtagcgcgccgcaaccccatcacataaccgaaggccaccagcgtcgccagtcccagtgcggtagctgccagcaacaactggttggccaggccgaacagcacgcccatgtgcgcgtcgatgccccagcgcgtgagcttggcggccagcgggaaggtggcgaagtcgatgcggtcggtgatgcgcaaggtgcgcgggtcgaccgccacggcatcgacctgggtcggccaactgcggtcgatctcggtcaccgtccaggcacgatccggcgcgctggccggtaggatttccagcttgccggcgtcgataccggccttacgcgcggcggcgagcacggcgtcgaacagcgttgaatcctgtggttgcggcgccggcatcgccatccccgcgtggtgggcgtgctcgccgagcggcgcggcggtcgcaccatccagcgcggtggaaacactcggcgtcgacatgcccagcgcggcacgggcgacgccgatgttgtcgccggcccagcgcgaccaggtcagccccgtggcagaaaagaacaacaggccgatcgacagacacagccccagggtcgcatgccagtgacgcagcccctgccggcgtggccgcgccgtaccccgtggccggcggcgaatccaccatagcgccagcccacccaacacggcgacccagagccaggacgcggccagctcgctgtacaaccggccgggctcgcccagcagcaggctgcggtgaaactgatcgagccaggtgcgcagcggcagtacgccgctggtgccgtagaccggcaggtcgccgcggatttcggcagtcaccggatcgatgaacaccgcgcggctttccgagtcgcccagggcgggcgtcctgaacatcacccgcgtcgtgctgccggcttgcgctgccgggcgcaccgcggacagggtcgcggcctcgccgatgtacgcctgggcgacgtcgacctgacgcgccagcggcaatgccgcaccggtgctttcggtgtacagctgtgccgcatacaggcggttctccagttgcggggtcagggcgtagaccaggccgctcaaggccgcgacgaagatgaacgggccgaccagcagcccgacatacagatgcagacgaatcaacaagccgagcagcggtcgttgcgttcgggacaacgaagatggcgcctcggaacgggcgccagaaattggtgcagacatgggtgttcgctcgatcgggggccgcggccgaacaaggccagcggcaaggcaagccagcggcgcgcaacgcgaccgccggccatgggcaaaccgggagtgaccgatcagacgactggggacgcgcgcggattgaggctcggccagcagtaccgcggcgaagcgtgcacggcgttggccagcggcagcaggcccagggcggcgcggcgcagcagctgcaactgcggtgtgctgggtgtgatcgccgccagcgccgcggcgcctgcggcacagcagcaaggcatcccgagcgcatgggcagcgggtttcggctcggactgatcgctatgcgcggcgtgccccttatgcgccgcctcgacctgagcggcgaggggatgcccaccgtgctggcgagcctcggcctcggcgcagtgtcccgccatgcccatcatcggcgcggcggtgcccatcagcggcatcgccaacagatgcagcaacaccgcgaaggtggccacccagaccggggcgcgacgggagcggaacatggtcaacgcggggctccgatgaacgagaaggcgacacgccaggacaggcgcagccaaacacccgatcggctcgcgatgcggctgtggcgcggattgtaggtgcgcgcggcgccgactgccatggcgcgattcctgagggtgctcgacggcaggcgtccgataccgctgccgccctgccctgcctcgcgcctgttcaccgagtcgaggcggccagcggctgaggcatccccagcaggaagccctgggcattggtcacctgcaagccgcgcaataccgccagctcgccatccgtttcgacgccctcggcgaccaccttgctgcccgtctgctcggcgaagcggatcagcgccgcagccatggcgcagcaatcgctgtcgtggtcgacgttgttgatcaggctccgatcgagcttgatgacgtccggtttgagtttgaggatgtgccggaaactggcataaccggcgcccgcatcgtcgaccgccaggcgcaggccggcgcggcgcagcggctcgagaatctccgcgatcaggctgtagtcgacgatggaccggtgttcggtcacctcgagcatcaagcggtgcagcggctgactggcaagcagctccaccaccgaaccgtccaccaaagcatccggacagacgttcaacgacaggtagacgttatcggggatcagtggcaggccggtcagcgccgcctccagcaacatgcgctcgagctccgtgcgcagcccgacctcaccggcctcgtcgaaccagcgatcaggcgaccggtagggctccggacgaaaccgggccagcgcttcgtagccgacgatggtgtcgttggccaggtggaaaatcggctggtagacgatccggaaatcgcgtttttccatcaccgtcctgatgcgctcgagcttctcgccgtgctgccgctggctgaaggcgtgtcgctcgagcaagccccctgcaaagcgggcgaacaggcgcaaggcggtcagatcgcagccgtccagcgtcctgtccggctgcgttgcgaagcagcagaaggtcccgtacagcgacccatcgctgaagcgaatcggcacgctggcatgcgcgccgatcggcacactgagcgtctgcggcagcgtcagcgcttcctgaatccctgccgcatcctgaatcagttccggcaggcggccgtcgacgattcgctggcaatagctctcctccagcggaccactctccccgaccgccagcgccagcggcatcgcgcgtgggtccccctcgacatggcggaatatccgccgcccctcgcggaactcgccgatgaaggcgacctccatgcgtaggtgccgccggaccacgcccagggcctcgaccaacatctcgtcgatggacagattgatcgactcctcgccgccgagtttcaagggcgataggctgctgtaatccagatcggtatcccggctcatggtgggtactccgctcattcaaccagcgcactagaatcgtaggcgtctcaacgttggcggcacaggccggaacggttgcaaagcctcatgtttgagcctagcgccgattcagccgctactcggcagcggacgacggccggcgcttggttggcctttttgacgcatcgctgccggcggctgccaaggtgatccaggtcggtgcgtggtcactcgcatgttcctgatcgcgcacccagcggtcgacgcccgcatccagcagacgaggcgccaagtcggcactgagcaggaggtggtcgatgcgcagaccggagttcttttgccaatgctgtcgaaagtaatcccagaaggtgtagatgcgctcgtcggggtatttcgcgcgcagcgcatcggtccagccctgctgcagaaggcgctggtaacaggcgcggctttccggctgcagcagcgcatccttggtccaggagcgcgggttgtagatgtcctcgtcggtgggcaccacgttgtagtcgccggccagcaccacggggtggccattgtcgaacagccccgccgcatgctcgatcaggcgctcgaaccaggccagcttgtagtcgaacttcggccccggctgcgggttgccgttgggcaggtaaagacaggcgacgatgatgccgtgcgctgcggcctccagataacggctgtggctgtcgtccgggtcaccgggcaggccgcggcggatctccagcggatcgtcgccgcgtgacaggatcgccacgccattccaggacttctgcccgagccagatcgcaccgtaaccggccgcgcggatgtcatcgatgggaaagtcggcgtcctgcgccttcagctcctgcaggcaaaccacgtcgggctgctctcgctccagccattcgagcagattgctccgccgcgcgcggataccgttgatgttgaaagtggcaattttcagggagtccacgggtagcctcgcgccgatacatgacccttgttgtgactcgcccgcgaccggcgtggttcgacatattaaagatcgcggtcaagaccgctcccacaatcgccgagcggacgccatacccccgtgggagcggtctcgaccgcgaatggaagccaagtggaccgtccaggctatgcgctagctagcgatcccttgtcgccattcgccctgggcggcgtggttcgacatattaaagatcgcggtcaagaccgctcccacaatagccgagcggacacctcccccgtgggagcggtcttgaccgcgaatgagagcccgatagctgctcaggctatatgcaaaaaaccgggcaccgcatgacctacagcccagtccgcctcagcggttttcccagtaacccggcgcgttgtagatcgtcttcaggtaatcgatgaagaagcgcaccttcgccggcaggtagcgctgctgtgggtacaccgcctggatgtcgtaggccggtagtgcgtactcgtcgaggaccgtcaccagctcgccgcgcttgagctcggcctggatctcccaggtcgagcgccagccgatccccagcccctgcttgacccaaccgaacagcaactcgccgtcgttgcagtccaggttgccggccacgcggatcgccacctgtttgccgtcacgcaggaaggtccagccacgctgctgcccgccttgcaggttgaaggccaggcaattgtgccgcgtgaggtcttccagggtccgtggcacaccctggcgctcgaaataatccggcgagccgcagaccacgcggcggttggggaacagcttgatggcgacgtagttggggtcggtcacctcgccgatgcggatgcccatgtcatagccgtggcgcaccagatcgaccacgctgtcggtgaagttgaacgacagctgcaggtccggatatcgcgcctggaacgccggggcatgcgggccgatatgccggcgaccgaacgccgccggcgccgagaccaccaggtgtccgcgtaccgaggtgcggtcgtggctgatgctcgcatccgcttcgtcgaaatccttgagcagcccgcgggcgcgttccaggtactgctcgcccagatcggtcaacgccaacccgcgcgtggaacggtgcatcagcttgacgcccaggtgccgctccagcgcatcgagccggcgccccatcaccaccggcgtcacgccttccttcagcgcagcggcggcaaaactaccgttctcggccaccagcacgaagctgtgcaaggttgtgtagcgatccattcgatactcctgatatcgacagaactgaagtttcgaccaattccctcatttcttccaggccttcatccttgggccacgtataaaaactatcgaacaagaaccagacacgctgttgcgagagagacacgcagcagatcgtgaacaaatccaagagtcaggaggaaagacccatggcccgaatgagagcaatcgatgccgccgtagcggtattgcgcaaggaaggcatcgatactgccttcggcattcccggtgcggcgatcaacccgctgtattccgccctgcgcgccgacggcagcatccgtcacattctggcccgccacgtcgaaggcgcctcgcatatggccgagggctatacccgcaccaaggcgggcaacatcggcgtgtgcatcggcacctcgggcccggccggcaccgacatgatcaccggtctgtattccgcctgggccgactccatcccgattctctgcatcaccggccaggcgccgcgtgcgcgtctgtacaaggaagacttccaggccgtggacatcgagtccatcgccaagccggtgaccaagtgggccgtgaccgtgcgtgagccggcactggtgccgcgcgtgttccagcaggccttccacgtcatgcgctccggtcgcccgggcccggtgctgatcgacctgccgttcgacgtgcagatggccgagatcgagttcgacgtcgatacctacgagccgctttccgtctacaagcctgcggcgacccgcaagcaggtcgagaaagccatcgacatgctctgcgccgccgagcgtccgttgatcgtcgccggtggcggcatctacaacgccggtgccgaagcgctgctggttgagttcgccgagaccgttggcgtgccggtgatcccgacgctgatgggctggggctcgatccctgacgaccatccgctgatggccggcatgtgcggtctgcagaccagccatcgctacggcaacgccaacatgctggcctcggacttcgtgctcggcatcggcaaccgctgggccaaccgccacaccggttcgatcgacgtctacaccaaggaccgcaaattcgtccacgtggatatcgagccgacccagattggccgggtgttctcgccggacttcggcatcacctccgatgccggtgccgcgctgaagctgttcgtcgaagtcgccaaggaacgcaaagcggctggcaagctgccggaccgcagcagctgggccgcggactgccaggagcgcaagcgcaccctgctgcgcaagacccacttcgactcggtgccgatgaagccgcagcgcgtgtaccagtgcatgaacaacgcgttcggcaaggaggcctgctacgtcagcaccattggcctgtcgcagatcgccgccgcgcagttcctgcacgtctacaagccacgccactggatcaactgtggccaggccggcccgctcggctggaccatcccggcagcgctcggcgtggttgccgcggacccgacacgcaaggtggtggcgctttcgggcgactacgacttccagttcatgatcgaggagttggccgtgggtgcgcagttcaagctgccctacatccacattctggtgaacaacgcctacctcggcctgattcggcaggcgcagcgcggtttcgagatggattactgcgtgcagctgggcttcgagaacatcaatgccgaccagagcggcatggaaggctacggcgtcgaccacgtcgcggtggtcgaggggctgggctgcaaggcgatccgcgtgttccgccaggaagacctgcaaccggccatcgaacaggcccaggcgtggatggccgagcatcaggtgccggtggtgatcgaggtaatcctcgagcgggtgaccaacatcgccatgggcaccgagatcgacgccatcaacgaattcgagccgctggccgagggccgggaagacgcaccgaccgcgatcgcgttgctggattgaccgttacaccgagcgcgacctgccaccaacgcgtggaagaggcttcgccgtcttccaccctacggcaggaacccctcgggatcgtagggtggatgtcgcgaagcacatccaccgcatgcagtaccaaggtggttaccgcaccaccgcaaagcaacacataagtgtccctacagacagaaggaaatccatatgccccgctttgccgccaacctgtccatgctgttcaccgagatggactttctcgaccgcttcgccgccgctgccgaagccggcttcagcggcgtcgagtacctgttcccctacgactacccggcagaagagatcaaggcgcgcctggacgccaacggcctgacccaggtgctgttcaacctgccggccggtgactgggccaacggcgaccgcggcgtggcctgcgatccagcccgggtcgaggagttccgtgccggtgtcgacaaggcgatcgcttacgccaaggtactgggcaacacccaggtcaactgcctggccggtatcgccccgaaaggcgcggacctggacgaactggaaaggaccttcatcgagaacctgcgctacgcggcgaagaagctggaagccgagggcatccgcctggtcaaggagatgatcaacacccgcgatatcccgcgtttcttcctgaacaacacctcgcaggccatggaaatccgcgccaaggtcggcagcgacaacctgttcctgcaatacgacatctatcacatgcagatcatggaaggtgacctggcgcggaccatcgaaaccaacctggcggcgatcaaccacgtgcaactggccgacaaccccgggcgcaacgagccgggtaccggtgagatcaactaccacttcctgttcgagcatctggaccgcatcggctaccagggctgggtcggctgcgaatacaagccggccaccaccaccgcagccggtcttggctggatgaaagcgcacaacgctgtctgactcgaactgaatgaaaaaggagaaccctcatggctaagatcggatttatcggcaccggcatcatgggcctgcccatggctcagaacctccagaaagcgggccacagcctgttcttgtccgaacaccacgatgcggcacccgccgccctggtcgaagcgggcgcggtcgcccttcccagcccaaaagaggtggctcaggaagccgagttcatcatcatcatggtgcccgacacgccccaggtcgaagacgtcctgttccgcgagaacggcgtcgctgaaggcgtcggccagggcaagctggtgatcgacatgagctcgatctcccccagcgctaccaaaggcttcgccgagaagatcaacgccaccggcgcccgctatctcgacgcgccggtatccggcggtgaagtcggtgccaaggccgcgaccctgtcgatcatggtcggtggtagcgaagagagcttcgcccgcgccctgccgctgttccaggtgatgggcaagaacatcaccctggtcggtgaaaacggcgccggccagacggccaaggtggccaaccagatcatcgttgcgctgaatatccaggcggtcggcgaggccctgctgttcgccgccaagaacggtgccgatccggcgcgtgttcgtgaagccctgatgggtggtttcgccagttcgaagattctcgaagtgcacggcgagcgtatggtcaagggcaccttcgatccgggcttccgcatcagtctgcaccagaaggacctcaacctcgccctggccggcgctcgcgagttgggcctgaacctgcccaacaccgccaatgcccagcaggtcttcagcacctgcgcggccatcggcggcagcaactgggaccattcggcgctgatcaagggtctggaacacatggccaacttctcgatccgcaaggactgaaacagctccgagcccgtggaatcgagctagcgcgcccacttttcggacagacagaatccaagtggtgggatagcgcaagccctaggccgcgacgctccgagagttggaccaccggtacacaggcatcgcggtattacgcttcggcgaacccaggccgcgaatcggatggaatcgccacaagcgcttccgtcagcaggcttacgccaagccggtgtttcaactgctgccctcgggcggccccccttttcgacccgcccggcacgaggagtcacggcccgactgccgggtgggtcgattccagaccttagcgcttgcattgccgagctctaaggtctggaatcggctccagacccattagaaggagcagtacatgagcctcgacccgcaagccttcctacgcgacctgttctgcgccgccatcgacgccgcccatccgcgccaggtactggccgaccatctgcccgccgaccgtagcggccgcgccatcgtcatcggtgccggcaaggcggccgcggccatggccgaagccatcgaagcggcctgggagggcgaactttccgggctggtggtgacgcgctacggtcatggcgccgactgccgcaagatcgaggtggtcgaagccgcgcaccccgtccctgacgacgcaggcgagcgagttgcccgccgagtgctggagatggtcagcaacctggaggaaagcgaccgggtgatcttcctgctctccggcggcggctcgtcgctgttggcgctgccggccgaaggcatcagcctcgccgacaagcaggcgatcaacaaggcgctgctgcgctccggtgcccacatcggcgagatgaactgcgtgcgcaagcacctctcggcgatcaagggcggtcgcctggccaaagcctgctggccggccagcgtctacacctacgcgatctccgatgtacccggcgatgaagccacggtgatcgcctcaggcccgaccgtggccgacccgaccacctcggccgaagcgctggcgattctggcgcgctacgacatcgagattcccgaaaacgtccgcgcctggctggaagatccccgctcggaaaccgtcaaaccgaacgatccgtgcctgtcgcgcagccacttccagctcatcgccaaaccgcagcagtccctcgatgccgcagccgagaaagcccgagccgccggcattacgccgctgattctcggtgatctggaaggcgagtcgcgggaagtggccaaggtgcacggcggcatcgctcgtcaggtggtcctgcacggccagccgatcaccccgccctgcgtgatcctctccggcggtgaaaccacggtgacggtgcgcggcaacggccgtggcggacgcaatgccgagttcctcctgagcctcacggaaaacctgcaaggcctgcccaacgtctatgcgctggccggcgacaccgacggcatcgacggttcggaagacaatgccggcgccctgatgacgccagacagctatgcacgggccgaagccctcgggttcagcgcggcggacgagctggccaacaacaatggctacggctatttccaggcgctcgacgccctgctgatgaccggcccgacgcgcaccaacgtcaacgacttccgcgcgatcctgattctgccgccgtcccgctaggggcggcgcgacgcgcgttcgttacacgcgtctgctacacgcgtctgctacgcgcgttttataaaaacaactgccgatagagcctgccatgacacccgacaagaaggtcaagatcctcgccaccctgggccccgccacccgcagcatcgatgatgtacgcgagctggtggagaacggcgtcaacctgttccgcctcaatttcagccatggcgagcacgccgatcatgccgagcgctttggctggattcgcgaagtggagcgccagttgaaccagccgatcggcattctcatggatctacaggggccgaagctgcgggtcggtcgctttgccgaaggcaaggtgcagctgtcccgtggccagaccctgcgcctcgacctcgacccgaccccaggcgatgccacacgggtcaacctgccgcacccggagatcatcgacgcgctgcagccgggcatgagcctgctggtggacgacggtcgcctgcgtctgacggtgatcgccaagcacgccgacgccatcgatacgcgcgtggtggccggtggcgagctgtccgatcgcaagggtgtcaacgtgcccgaagcggtgctcgaattgagccccctgaccgagaaggaccgccgcgacctgacgttcgggctggagctgggtgtcgactgggtggcgctgtcgttcgtccagcgtccgcaggacattcacgaagcccgcgagctgatcggcggccgcgccttcctcatggccaagatcgaaaagccgtcggccgtgcagcatctgcgggaaatcgctcgtctgagcgatgcaatcatggtggcgcgcggagaccttggcgtcgaggtacccgccgagaacgttccgcgcatccagaagaacatcgttcgcacctgccgccagctggggcggccggtggtggtggccacgcagatgctcgagtcgatgcgcttctccccggccccgacccgcgccgaggtcacggacgtcgccaacgcggtagccgagggggccgatgcggtgatgctctcggcggaaaccgcgtcaggcgactatccgctggaagcggtcagcatgatgagcaagatcattcgtcaagtggaaagcggtccggaattccaggcccagctcgaggtgcatcgcccgaacgccgaagcgacactgcccgacgccatcagctgcgccattcgccgtatcagcagcatccttccggtcgcggcgctggtgaactacaccgaatcgggtcgatccagcctgcgtgcctctcgtgagcggccgagctcgccgattctcagcctgacgcccaacgtggcgacggcgcgcaagctgaccgtggcctggggcgtgtattcggtgatcgatgcgccgatgcacgacatggagcaggtctgcctgaacgcgctcgacctggcgcgggcccagggcatggcgggcaccggggacaccgtggtgatcaccgccggcgtgcctctggggcaacccggcacgaccaactcgttgcgtatcgagacgcttaactgaccgcaccctcgcctgtatccatcgatgcaggcgaggccgacttcccccgccctcgccagacccagcccatgcgacatccccacctgcggtattcagcacaggctgcgctcaacggtgtcagccagatctttctgcaggcgaacccgatctgcgggttgctgatagtggcgaccatcgccctgtatgcccctgcactgctggtcggcgccctcctcggcctgctcagcggcaccgtcaccgcgtggcgactgggctatgcgcgccaggatatcgaggccggactttacggttacaacgcaacgctactgggcttgctgatgacgctcgtgctgggcaccggggcatcggcgctgctgctggtggtgctgagcggcgcgctgtcgagcctgttgcaacgatacctgttgcggctgatgcgtgagcacggcggccctgcggtgtttaccctttccttcgtactgcttggctggctggcgctggccctggccggggtgctcgacacggttgcggatgcgcggctacccgatccagcggtagacggctggggagcacttggcgcgatggccagcggcatgggtcaagtaatgttcctcggagcgcccgaggcggggctgggactgctggcggcgatactggtggccgaccggcgcgccggcttgtgggcactctgcggctcaggcgtgggcgtctattgttcgctgctgatggggctcagcacgccacaggccttggccggcctcgatggctacaacccggctctggcggcattggcgctgagccaggtacaccgctcggcgctggcgcccgcgctgggaatcgtactggcgatcgcctgccggttggccttcgatcggctgggtcttgcgccattgaccatgccgttcatcctgtcctgctgggccgtggcactgggcacgcgtctggcccagtgccgcttcggcgtgcggcacgcctgagtcagcccttggtcgcgcgtggatcctggtcccgcgggtaggtccgctcttcctcgatctggccatcgagcgtgtggatcttcaccgaggcggtgcgcagcttcatgtagtcgcgggtctcgttgatgatgtcctctttggtagaagcttcgagcagtgcccgcttgtctccttcctcgcgcaatacccagcgatcgccgtcgtgggtgatgtggtagttgtccatgtagccctccctcgggtcatcgatagtcagagctatagaacacgggccggcgcagcggttcgatcgatcgttccggcggagcagcatggtcgtgcttaccgcgcagggttctttcgaccctgatcagcagggtcgtctgcaccctgccccgtcccgacgcccttgattccggtcaattccaggctggaacggttattgaaaggcttcaggtgacctgtccgcgacgcgcgagcaaacgcgctgttcattagaggcaggcctcccagtcaattggagcctatccatgctttgtgccgaacaacgtgccctgatcaaagccaccgtaccgctactggaaaccggtggtgaagccctcacccaacacttctatcggtcgatgctggccgagcatcccgaggtacgcccgctcttcaaccaggctcaccaggccagcggcgaccagcctcgtgccctggccaacggcgtgttgatgtatgccaagcacatcgaccgcctcgaccaactgggcgggctggtctcccagatcgtcaacaagcacgtggcattgcaggtgttgcccgagcattaccccatcgtcggcgcctgcttgctgcgcgccatccgcgaagtgctcggcgaagaaatcgccaccgacgaggtcatcgcagcctgggccgccgcctacggccagctcgccaacattctcatcggcaccgaggagcagctgtacagcgccacggcagaggcgccgggcggctggcgcggcgcacgaccgttccgaatcgcgcgcaaggtcatcgagagcgcagagatcacctcgttctatctggaaccggaagacggcggtgaggtggtcgcgcacaagccgggccaatacatcggcctgcgcctgcacatcggcggcgaggaaatccgccgcaactattcgctgtcctcggccagcaacggtcgtggctaccggatcagcgtcaagcgcgagccaggtggtgtcgcctccagcgcactgcacagcatggacgtgggcgagcgcctcgaactgttcgccccagccggcgatttcacgctgcagcccggcgacaagccgctggtgctgatcagcggtggcgtcggcatcacgccaacattggcgatgctcgaagacgcactgaaaaccgagcggccgattcatttcatccactgcgcacgcaacgccgacgcccatgcgttccgccagatggtcgacacgctggccgagcgacatggccagctcaagcgattctattgctatgacgaacaccgcggggacgcgccgcaaccggacgctgtcggcctgatcacagaggagcggctggatgaatggctgccggcagaccgcgacctggatgcctacttcctcggccccaagcccttcatggcggcgattcgccgacagttgcgcgcccttggcgtgccggagcagcaggcccgctacgaattcttcggcccggcttcggcgctggagtgagccccggcgggccggctccacgtcggcccgccatcccacctgatgaggtgatcctatgtttccacatccacgtgatccgcatcgcctgctggccgccgccagcctgaccatggccctcggcatcgtgttgctgctgttcggcgtcgctggcgcctatgtcttcgaccggcacctgagcctcggcgcggtggtcgcctgccacgcgctggtgattctcggccctacggcactcaagatcggctacgtgatccgcctgctcgcccagcgccagctgacactgagcgcctaagttcgccacgacaacttccaatagttgcgggcgactgccgtttcgctgcgctttcataacgccattacttcattggccgatactaaccattcgtctgccgcttgttcgcttctggaaactcctgagacacaaccgaactctgaaatattgaaggctgatgaagttgttcagtcccgcagaaagtctctatccatcgaggagaaaaagacatggcaaacaagaatcctggcaactttgccaacgatcgcgaaaaggcgtccgaggctggtaagaagggtggccacaacagcggcggcaacttcgccaacgaccgcgagaaggcttccgaagctggccgcaaaggcggacagaacagtcacggcggtggacgtaacagcaacagctgatatgtctcttataaaaaaggcaagggttgaaaaacctttgccttttttattgccgtttctttctcggctagttttcttgcaacctccatcgcgacaataagccggcgccgtaagtgagacgatagttattatcgaggcctatatccgcacgatgaataaactcgagaagagcaacgagcatgaacgatagcgataaacagaaagcgccgatcaatcccggcgacgaagcggcgccaggcacacccggcactggcgaaaatgtctgcccggtgtgtaacggtagcgggcgcatcgacacggaggaatgccaaaactgcggcggtaccggtaaggtgatcgaaggcatcggcggcgcctgaagccgtcatggaatcgggagcacctcatgggcgtcagcgcgtttaccaaccggatcatccagagcttgatggataccgactactacaagctgacgatgatgcaggcggtgctgcatcactacccgaacgcggaggtcgaatgggcctttcgcagccgctccgaggaagacctgtcgccctacctcgacgccatccgcgagcagatggaggcgctggcagagctccggttcgagccggcggaactggcgtttctggaaaacatcccctacatgcagccggacttcatccggtttctcggcctgttccgcttcgacccgcgctatgtgcgtgtggagctcgaggccggcgaactggtggtctatctgcgcggcccctggttgcacgtgatcctgttcgaggtgccgctgctggcgatcatcagcgaggtgcgcaatcgcgtccgctatcctcacgtgacgctggagcaggccgaagctcgtcttgacgaaaagcttgagtggctgagagccgaggccagcgaacaggagctggcgggtttcaacctggccgacttcgggacccgcaggcgtttctccttcgccgtgcaggcccgggtcgtcgagcggcttaaaaccgactttcccggcaacttcgtcggcaccagcaatcttcatctggcgcacaaactgcagctcaagcccatgggcaccatggcgcacgagtggattatggcccatcagcaactgggcccaaggctgatcgacagccagagcgccgcgctcgactgctgggcccgcgaataccggggcgcgctgggcatcgccatcaccgattgcatcaccatggatgccttcaccgccgacttcgatctgtacctggccaagttgttcgacggtttgcgccacgactcgggcgacccgatcgaatgggcagagaaggcgattgcccattaccgtcggctggggatcgatccgatgacccggcagctggtgttctccgatggcctggatttccccaaggccctgggcatctatcgggcgctggccgggcgcagcaataccagctacggcatcggtactcagctgacttgcgacattcccggcgtcgagcccaccaacatggtgatcaagatgaccagctgcaacggccagccggtggccaagatctcagactcgccgggcaaaaccatgtgccgggacgaggcgttcgtggcctatctcaagcacgtgttctcggtaacgcactagggcgcactcaggccgatggaaggccggcgccgggcatctccatctcgtccgacgcgaagcacagacggttgcgaccggcggccttggccagatacatccgcctgtcggcgatgtcgagcagctcctgggcgctctcggcgaagtcgacgcagcgttccgccagaccaatgctggcggtcaggctgctgccgtccgggcgcagccccaaaccactgcgcaccatgcgatccaaggccaggcgcgcctgctccaggtccgtatcgggcatgatcacgacgaactcctcgccgccccagcgcagcagcgtgtcggtgctgcgcaggctggcgaacatgttctccgtacattcgcgcagggcccggtcgccagcgtcgtggccgtaggtatcgtttatcgccttgaagtgatccaggtcgatgaaggcgacggcgagccccgtatcgtgtcgacgtgccgtatcccactgcagcttgagaatctcctgaccgctaccccgggaaaaaacacccgtgagagggtcacggatcgcctggcgaaccagcgcgatcatgaacgccaactggctgaggcttgccagcaccgcgaccccggcgatcagcatcagcaaccagaagccgccggcgaacgatggccagttcagcgtcgaccaggagagatagcccgccaccacctgagccaacagcaggaggcaggccataacggtgttttccagcagcgtcagtggaaatatcgccaggccggccatcagcacgaagggcaggaaggcgtagccggaagccacggcagcggaaaaggctgtcagctgatagttgcccagcagtgtgtgcgaggcgatgtagaaggctgtcgggatcgcgaacagcagcgcaagggcgcggtacgcatcgaacaggttgccgctgggacgatagaacagcagcaggcatgcaaaggcggcgcaggcgagcaggcgaaacgtcgccaacccgagccagagtggatagctgaaggccatcagatcgatcacgccccataccggggtgagaatggcgaacaggaaggcgaatagcctgacccgattgacgatcaaggtcgcgcggcgctgggtcagcagcagcggatgccgatgcggagtggccagtttcacccactctttgggccgcaactcgctgggcagcaggatggccaggcggctcgacagcaggtcgatcaaggacggcatttctctattcaccatgagcaatggacgggcgcgccacgcccgggtgtcagtcggcagcggatgatatcaccatggcatcaacccgatacattgcgccccccctccggtcgtcgccatccggtggcgagcacaggcccatcaagtcggcggctctcgtgttgcatcaacgtcacggcactctccagcgttacggccgaaacggccaagccacgagtcggcaaccgggaaaattttgtaacaagacaccaagtcgcacggatacgggccgtcactcatccgttcgagcgacaaaccgccaggccgacaaatggcgcttaagagcgcttatgccagtgccccctggcagctagcgtagatgtaccggagccttgattccggaagccaagaacaacaataaggagaagcttgtgcagagcgttctaaagccccttgcgctggcggtgctactggcggccataccggttgcggcagacgcggcgaccagcccgtacagtcagttcgtgaccttcggtgactcgctgagcgacgccggaaactttcccgacctgggcagtccgctgcttgccaccggtagcctgctggatggcaatcccaccggaggcctgcgctttaccaaccgcaccggcccaaactacacggccgataacagcgaatacttcggccaggttgttacccaggtactcgccaaccgcctgggcctgcagtcgctcccctccacacccttgctacccggcgccctgaccggtaacccggatggcaccaactatgcggtcgggggttaccgttcggatcagattctcaaatcgctgaccgagacctcgatcgtcaaggctccgagcggcgctacacgcagccgtctgggctatctggtggagaaccccgaggtcgacccggacggtttgtactacctcaacggcggcgctaacgacatcttccagctcgtcaacgggactgctcccctgcctatcacgatggtgcaatccgccgccaatatggtgaaggctgtgggggtactgcaggcggctggtgcccgctacatcgtgatttccgacctgcccaatgtcggcgacacgccgctgggcaacagcatgcccggcttcggtgcgtacctgaacggtctgagcgactccttcaacgccgaacttgccgcgggccttcaggcgcagggcggcaattacgtgttgctgaacaaccgcctgctgctgtcggaagttcgcgccgacctcgcccgcttcggcttcgacccgacgatcgaccaggcgaccgtatgcttcagcggtgacggctgcgtgagcgaccccacctacggtttgaccagcctcgtgggcaacaccaataccaacgccgatccgaaccgcttgctgttcaacgatgcggtgcatccgaccactgcggttcaccagatcagcgccgactacgtctactcgattcttgccgccccggcagagatttcgcggttgccggagatgggccgctcggctttgcgcagccacctgcagatgctcgacaacgagctggaggcgcagcgtggtcgctggcagccggtcggtcgctggcgcaccttcgtgcagggtggctacgaccgccccgaatacgatggtttcggcggcggcgatggcgacagcccaacgctggcgatcggcgcaaccaacagggtcagcgaatcctggttggcggggctcagcctgggcctggcgcagaactccctgagcctgggcgaaggcgattcggactacgacatgcgcagctatctggccagcgcgttcgccagcttccagcaggaccgccttttcgccgacttcagcgtcagcgccggttacctcgactacgactcgctggatcgcaccttcgcgctgggcgtcacggagcgctcagagaaaggcagcaccgaaggcacgctctggggcgtatcggccaagtccggcttcaacctgatgcagatcggcgacccgttgcagttcggcccgttcatcggtgccagctaccagaaggtcgaggtggacggctacagcgagaaaggcgccagctcgacggcgctgagtttcgaggatcaagagctggagtcgctgcgcctgtcggtcggcatgttcggcaactatgcgctgaccgatcggacgcgcctgtttgccaatgtggcccgcgaggtcgagcgcaaggacgatgaacgcgaagacctgcggatgtcactcaacagcgtggcgaacaacacctttgcgctgcccggtgccgctcccacgggcgaccaaacccggttcagcgtgggagtcgcccatcaattgacgcccgggctgagcctgcgcgccaactataactaccagggcaacgataaccgcaaccagggagtcggcgtttccctcgccctggatctgtaattccgacgctcctcgtttggctgttttgccaagccgctgcacgcactgtgcagcggcttttttatttgccgcgtaacgcgttagcgctggtcgagctgctgctgcagattggcgacctggccctgcagcgaattgatcgtgcgcgtcacctgggcgcggaacgaatcgaactccgccgtcttgacgcccggggccgctgccggagccgatggccggttgtccagttcgctacgcagcaccagcagatcctgttcgagtcggctgaccgcctgactggcgtctcctcgctgtttcaatgcggcgatatccttgctcaacccatcgacccgagccgacagtttgctcatttcgtcggcggcccctttcaggccggccaccgacgacttgagcgctgcctgctcatcgttgaggttcttgaccgtctcggcgatcgtcgcggtactggcctggtgctcgcgcaggtcggtggcgacacgcccgacacggatgccctgttcatcgaggcgtttgtcctgattgccctgcctgccgagcaggctctgttgctcggtggccatcgcgcgctgctgctcgaccaggtccagcgcctgcttctccaactgcttgatgcgcagcttcaacgcctcaccttcggtggtcacgttggactcagtcgctacgatcttgccggagatatcctgcagccgaccggtggcgtcctcgctgatacgggcaaaactttcctgggtcgcgaccagctgggcctcgagccgggaaacctgttgctggctccaccagcccagcgcacccagcgcgcaaaacagcgccacaatcatgatccacagcggcgcggtacccgccgcgcggcgcttctgccgtgaacgagggccatccggctcacgatccgcaggccgctggatcggctcgagctcaggcgcaggatagggatcgcggtcacgaccagcagtcaggctcggtacgtggtccagttcgtcgtgggcatcgttgcgcatggggtacctttggcggcgcgaggcgaaaaacagcgcgcagtataacgattcagcagcgccacttcagcggcgtcgaccggcgaggctgcacctcgaacaggcgtggaagcccttcagcggctcaagaccgtgcaaaccctgagcgacaaacggtgcagccatgatcaggacatgcccgtcgtggcaggcctctttccggtgtgaatgcaggcaaaccggcgctttggcgacacctcgcatggccgcgacggcgaacccgaaagagtggtacggctattgctctacacaacaggccagcggacagcattttccgacagggatgtcgggcccaggcacgggaacacgaagcgatggggagagcgaatcatggagatcaacaaggcggtgcttgattgcatgcagcatctgcggcgccgactgcgcgacgaacagcagctcgacattcgcttgagccagccagatgcggtccaggcaatgctgacggcctgtctccgttcgaacaacgaaacgactcgcgacctcggcaagcagctggccacctatagcgacctacccaccccaaccgcgaccaagccaccagcatccgaacatcacgacaggcatgtgccctcggtccgtatctatcgcggccagcgtgtcatgagctagggccctgcgcggcgatcagccagcgccccaccgatcgtgtcagttggcgagtgagttcggcgagtagctcgccaccgttgcgccagtgatgccagtacagcggcacatcgatcggcgggccttgaaacacgttgaccagcgccccgctggccagctcggcctctacctgcaactcaggcaccaagccccatccgagatcgctctgcagcaagcggacgaagccctccgacgacgggcacaggtgatggctgaaggcaccgttcagccccagtgacgccaggaagcgatgctgcaattggtcgtccggaccgaacacgatcgccggagcctgcaacagggcctgcgccggcgctcctggcccaaggtggcgcgcaacgaacgccgggctggccaaggcgcgatagcgcatggccccgagaaacagactgcgcgcgcccgccagcggacgctccacggcacatacgcaggcggcgacctcacctgcccgcatgcgcttgaggcccacgtcctggtcttccaccagatgatcgagcaccacagcattggccgtgcagaacggcgcgaccgcctgcgcccaccaggtcgacagactgtcggcgttcagggcgatacgtaagcgttcgggtaaccgcccctcgtccagctccggcacctgaccctgtagatcacgctccagcaggcgcacctgctggacgtggttgagcaggcgccggccaacctcggtcggctgcggcggagtggcacgcaacagcactggttgcccgagcctcgcctcgagcaacttgatgcgctgggataccgccgactgcgacaagcccagcgcccgcgcggcccgatcgaaccccgcctgctcaaccaccgcggccagagcgttcagcagcttgtaatcgaacattagatttccttatgaggcataacgcgatttcgtttttcttatacgaaacaaccgccgagactgcgagcattcattcaacggaacaggcaaagatcgatgtggcagagctatgtgaacgggctgttggtcgcagcggggctgatcatcgcaatcggcgcgcagaatgcgttcgtcctggcgcagagcctgcgccgcgaacatcacctgcccgttgccgccctctgcattctgtgcgacgtggtattggtgagcgccggggtgttcggcctcgccgcggtcctcgcggcgaaccctctgctgctgcagatcacgcgttggagcggcgtggcgtttctgctgttctacggtgtcgtcgcactgcgtcgtgcggcacatccgcaggcgctgcaagaagagacacagcggggcccgcgctcactgcagagcgttctgctcgccgcgctggcggtcaccttgctcaacccgcacgtctacctcgacacggttttgctgatcggttcgctcggcgctcagcaacccgaacccggcgcctacaccctgggcgcagccagcgcttcgacgctgtggttcctgattctcgcgctcggcggggcctggcttgcgccctggctggcgcgcccgctgacctggcggctgatcgacctcggcgtggcagcgatgatgttcaccgttgcggcccaactggttttcgtcgcctgaggaacgccgccggggattcgcggtccacgcaaggggactcagcacccgagcccgcacaagcctcggttgccaggccctggcctcggcttttcccacacagttgtcgcgtggttttgccgtaggctgggtgctatgatccttggtccgcgggcatggagtggaacgcttcagcccgccacaacggccgcccgtgaacggccgaagaatgcgcatgcatgcagcgcgaagggaaagacaggcgtaaacggatgagcatcggtgcagtagttttctccgttccgcgaagcgttggccaccagcgcggactgcctccttccgagccgcatctattctcgacacctgagcaggagatacaccatggctttcgaattgccgccgcttccgtttgaaaagaacgccctcgagccgcacatttccgccgagaccttcgaatatcaccatggcaagcatcaccaggcctacgtgaccaacctgaacaacctgatcccgggcaccgagttcgaaggcaaggatctggaaaccatcatcaagacctcgtccggtggcatcttcaacaacgccgcccaggtctggaaccacaccttcttctggaactgcatggcacccaatgccggcggccaaccgactggcgccctggccgatgccatcaacgccgcgttcggctccttcgacaagttcaaggaagagttcaccaagaccgccatcggcaccttcggctccggctgggcctggctggtgaagaaatccgacggcagcgtcggcctggccagcaccattggtgcaggcaacccgatgaccgctggcgacaagccgctgctgacctgcgacgtctgggaacacgcctactacatcgattaccgcaacgcgcgtccgaagttcgtcgaagcgttctggaacatcgttaactgggacttcgtcgcgaagaacttcgctggctgagttacaggcctgctcacggaaccgctcgccggcccgtagcaagtgaatcgaaagcccgcatcagacgatgcgggcttttttttcgtctgttcaccccgtccggcctcgaccaaccgccccgtgccggtgtggccgagtatgcttgcgcaaccattcccgtcggaggctttgccccatgtccaaaacagttctgatcatcggcgcgtcacgcggccttggcctcggcctggccaaacagttttccagtcagggatggcaggtcatcgcgacagtgcgtgacccacagcgcgcggatgccctggcgtccgtcgccaacatgcgcatcgagcagctcgatatagacgatgcggccaacgtcgatgccctcgcccgacagctatccggcacgtcgctcgacgcgcttttcatcaatgcaggcatttccggttcccgcacgctttcggccgacacggccacgcccggtgagctcaaccaactgttcatgaccaacgccgtcgcgccggtacgtttggccaagcggatgctgcctctggtcgatccgcaggccggcgtcatcaccttcatgagttcgatcatgggcagcgtggaaaccggacccggcatgggcatgccgctttacggcgcgagcaaggcggcgctcaaccacctgactcgaaccttcgtcgccgaactcggggatgacaccgggattaccgtgctgtcgatgcatccgggctgggtaaagaccgacatgggcggagcggaagcgccactggatattgagaccagctgcgccggtatggtcgaacaggttcgtcgcgctgccggccagggcggccatcgcttcatcgactaccggggcgaacagctgccctggtgatgagttggccgtggcaaggccagcccttgaatgaaaatgcgggtggccgcctcagctgccacccgcactcatatggggcccggagaatcccgaacggcttacgccttgggcaaggtcacgccacgctgcccctggtatttcccgccacgatcacggtatgaggtttcgcactcttcatccgactcgaggaacagcatctgcgccaccccttcgttggcgtagatcttcgccggcagcgtagtcgtgttggagaactccagcgtcacgtggccctcccactcaggctcgagcggcgtcacgttgacgatgatgccgcagcgggcataggtgctcttgccgagacagatggtcaggacattgcgcggaatacggaagtattcgacggtgcgcgccagggcaaaggagttcggcgggatgatgcagacgtcgctcttgatgtcgacgaagctcttctcgtcgaagttcttcggatcgaccgtggccgaattgatgttggtgaacaccttgaattcgtcagcgcagcgcacgtcgtaaccatagctggacacgccgtaggaaatcaggcgctcattgccctcggtgcgcacctggcgctcgacataaggctcgatcatgccgtgctcctgggccatccggcgaatccacttgtccgatttgatgctcatgacgggcgtcctgatttggctggtagggtcaaagaaaggcatgcatcttaccgagcccaaggggtgggttcaaagcccgccacctgggaccgtgcgccacgcccatcgggcgttgggaagaaactgaaaataaagctcgcattgctgcggaaatgcggtatctttcattggctgctgctgcatgtgtcaccgtgaatcgctacatgtttagatttcgatccgatcattgctacgactcctttaactccttgcacacagtcaccgttcggggtagttgcccgttcaatcacatctacattgttcaaggagacattcaaatgtccaatcgccaaaccggtaccgttaagtggttcaacgatgaaaaaggcttcggcttcatcactccgcaatccggtgacgacctcttcgtacacttccgcgccatccagggcgacggtttcaagagcctgaaagaaggccagcaagtttccttcgtcgctacccgcggccagaagggcatgcaagctgaggaagttcaggttatctaacctgaagcttcactgctgaaaaagccccgcttcggcggggcttttttatgcctgtagtttttgtaggcatggctggagcagaccggacgcctcgcaacgccgcatggcttgagcaggcgagctaacgtcgcactgggttgagagcccggccatccggctattccagccaccagcctgaaaagatgcccctctaggagcgagctcgctcctagagggttgtatcgatggcgccggacaatgccacctcgcgggctgcatccaagcgccgccaagcagcgatcagtcgtcggtcaccatgatgttcggcatcgactgcgccacgatttgcccgctctgggaaatccgcgctccgacgctgcgcgccatctgctgatagatcatagcgatctggctttccggatcggcaatcgcggtcggcttgccggcgtcggcctgggtgcggatcgccattgatagcggcagggatgccaacagctcgacgttgtactgcgccgccagcttctcgccgccgccttcgccgaacaggtgctcggcgtgaccgcaattcgagcagatgtggatggccatgttctccaccacacccagcaccggaatgtttaccttgcggaacatttcgacgcccttctttgcgtccagcagcgccaggtcctgcggcgtggtgacgatcaccgcccccaccaccggcaccttctgcgccagggtcagctgaatgtcaccggtgcccggcggcatatccacgacgagatagtcgagatcgttccacgccgtctgggtgatcagctgcaacagcgcgccggaaaccatcgggccgcgccagaccatcggcgtcttgtcgtctgccagaaaggccatcgacatgatctgcacgccatgcgcctcgagcggaatgaacgccttgccgtcgcggatctgcggccgtgtgccttcgggaatgccgaacatgatgccctggctcggcccgtagatatcggcatccagcacgccgacacgcgccccttcccgcgccagcgccagcgccaggttggccgcggtggtggatttgcccactccgcccttgccagacgcgacggcaatgatgttcttcacattgccgagggcttccacttggtcctgcgccttgtgcgagcgaatcacgcagtcgacctgcacgtccgcgcgggtcacgccttcgagcccttcgattgccatggcaagcatctgcgcccaaccactgcggaacagtcctgccgcgtagcccagctcgatctggacgctgacccgatcgccctcgacatcgatcgaacgcacgcaaccggcactcaccggatcctggttcaggttagggtcggtgtactgacgcagtacggcttcgacagcttcgcgtgtgacggtcatgactactcccaaagaaacctagtaaaacagacgggcatcttacctcgcgacagcgcctgagctcatcaagcgcggcaatcaggcgcggcgcaggccattcgaccctcgccgcccgcgccagtgcggatgaaaaaaaaccgccgcacctttatagtggccgactcacttcgcaacctcgactgcagatttcccaatgtccgaagcccgccagatcctcgttaccagtgccctgccctacgccaacggttcgatccaccttggccacatgctcgagtacatccagacggacatgtgggtgcggttccagaagctgcgcggcaatcagtgcatctatgtctgtgcggacgacgcccatggctcggccatcatgctgcgtgccgaaaaggaaggcatcacgcccgagcagctgatcgccaacgtgcaggccgaacacagcgctgacttcgccgacttcctggtggacttcgataacttccattcgacccactcggaagaaaaccgcgagctgtccagcctgatctataccaagctgcgcgatgccggccacatcgccacgcgctcggtgacccagtatttcgaccccgaaaaaggcatgttcctcgccgaccgctttatcaagggcacctgcccgaagtgcgcggctgaagaccagtacggcgacaactgcgaaaagtgcggcgccacctacgagcccaccgagctgaaaaacccgcgctcggccatctccggcgccacgccggtgctgcgcgactccaagcacttcttcttcaaattgcccgacttcgaggcgatgctcaaggagtggacccgcagcggcagcctgcaggactcggtcgccaacaagatcgccgagtggctcgacggcggcctgcacgagtgggacatttcccgcgatgcaccctacttcggcttcgagatccccgatgagcccggcaagcacttctacgtctggctggacgcgcccatcggctacatggccagcttcaaggatctttgcgcccgccgcccggaactggacttcgacgccttctggaacaaggattccagcgccgagctgtatcacttcatcggcaaggacatcatcaacttccataccctgttctggcccgccatgctcgaaggcgccggcttccgcaagcccactgccgtcgcggtgcatggctacctgacggtgaacgggcagaagatgtccaagtcgcgcggcaccttcatcaaggcacgcacctacctcgagcacctgaacccggaatacctgcgctactactatgccgccaagctgggccgcggcgtggatgacctggacctcaacctcgaagacttcgtgcagaaggtcaattcggatctggtgggcaaggtcgtcaacatcgctagccgctgcgccggcttcatccacaagggcaacggcggcgtgatggtcgatcgcaacgccgcagcggaactgaccgacgccttccagaccgccgcgccatccattgccgaggcctacgagaaccgcgatttcgcccgcgccatgcgcgaaatcatggccctggccgaccgcgccaatgcctggatcgccgacaaggcaccctgggcgctcaacaaacaggaaggcatgcaggatgaagtgcaggccatttgcgccaccggtatcaacctgttccgccagttggtgatcttcctcaagccggtgctgccgaacctggccgccgacgccgagcgcttcctcaatgtcgagccgctgcgctggactaatctgacgacgctactgagcaaccaccagctgaacgccttcaccccgctgttgacccgtatcgagcctgccaaaatcgacgcaatgatcgaatcatccaaggaagacctcgcctccaccgaagccgccgcgccgactggcaatggcgagctgaccaaggagcccatcgccgcggaaatcgctttcgacgcctttgctgccgtcgacctgcgcatcgcgctgatcgaaaagtgcgagttcgtcgaaggcgccgacaagctgctgcgcctgacgctggatatcggcgacgccaagcgcaacgtcttctccggcatcaagagcgcctacccggacccaagcaagctggaaggccggctgacgctgtacgtcgccaacctcgctgcgcgcaagatgaagttcggcgtctccgaaggcatggtgctggccgcaggccctggcggtgaagagatctacctgctcagtccggacagcggtgccaagcccggtcaacgcgtcaaataaggatgcgaaagctggcgcccggcgcaatgccggacgcctgtttcgaggcaaaataaccgctccaccgcatcacgcgctgccactgaaccgaggcggttatgaccgattcacctgacgccagccgctgcccgatttgcggcgaacccaaccaatgcgcgctcagcgatccggctaccgccacacggccctgctggtgcttcaccgccgagatcgcacccgaagcccgcgaacggattcccgcagacgctctgaataaagcctgcatctgcccgcgctgcgcgcgcggcgagtcgcctgcaaacccgtaatgcgcctcgaccgcttcctcgccaacctgccccactgcagccatcgccaggcacgcctgctgttggccttgggccgtgcatcggtaaatggcgagacggtctgcagcggcacccatgacgttcgcatcttcgaccgtatcgagctggacggcgagctattgcaagctggcaagccggcgcgcttctttatgctcaacaaacccgccggctgcgtcagcgccaccgccgatccgcaacaccccacggtgctggatctgctgaacgagccggacaagcaagagctgcacatcgccgggcgcctggacttcaacaccaccggcctgatgatcatcaccaacgacggcctttggtcccgccgcctcacccaaccggaaagcctgctgggcaaaacctatctggtggagactgaagaccccatcgaccccctctgcgtagagcgctttgccgaaggtctctatttccgcttcgaaaacctcaccaccctgcccgccgaactcgaactgctcgcctcccatcaggcacgcctgaccctgcatgaaggccgctatcatcaggtcaaacgcatgttcggccacttcaacaacaaggtcaccggcttgcaccgcgaacgcatgggcccgctcaccctcgaccccagcctcgtacccggcgactaccgcagcctgaccgccagcgaaatcggccagatctgagcctttcgccgaatagccctctcgcccgcttcaattccaagctgccttctggtacaaaggcacccttcgcgggcgtcgtataatggcattacctgagcttcccaagctcatgacgagggttcgattcccttcgcccgctccagatcaaaaagccctgcacttgcagggctttttcgtcacaacatcaaccgcatcaactcttcgggcaagccggcagcaacgtccggttttgtgtgccatcgttacgcgtgaactggcagccataggcggggttcgcgactacgcgtgggttgatcacatcatcaccggccggcttgatgccctgctgttcccattgcagcatcgccgccatcgcttcgacctgttcctgataagtgaaatcgcagtggctgggcgcccggatggcgcgttgcaccaggaggtcgccgttgccgttggcgatcgcgttgcgccggtagatctgctcgtgcttgaacggcacgtagaggtcgcccaaggtgtgaatgctgacgacgggaacgttgaattggccgttgaccactgggatccagcgcaggccgtccgggcggatgctgttggccggcggatggccgatcacacggatgatcgagtcgttgaattcgcgttcgtcgcgggacatcgccttgttggtatcgaactgatagcgggtggtgaggttgccggagagcgagtcggcgaggatgccgtccaccgagccatcgcgcccaccggtgccaagcacgacgctttgcaggctggtacggaagccttcggcgaagataggccgctcacctccgctgagctcgcggacgatgccttcgagcttctcgccctgggccgacggatcggtcgggtagctgtcccacagcgtgccgatgatctgcggcagcttggcctggaagtccgtcgccgggaagctggtcgggccctgccctgccaggtgctgcgcggcgagggtgaagttcatcaggtattcgaactcatagacgtcacccgtgacgccgcacatcggcaccgagccgctgtagcgcaccggattgttggccgtggcgtaggtttccgcctctaccgctgccgctgcgacgtggccgcccatggaatggcccgtgatgtaggtcttggtcggctgcgccttgccggtcagctcgctgaaggccagcgccagggcgttggtgtcttcgataccggcgcgcacatcgtagtagttcttgctgtaactggaggcggcccaggcgtagccctgctgcagcaaccatggccggatcggtggcggcccgacggtcaattcagggcccgtgccgcgatagccgtgggcgtacatgaccagcatgccgttccagttcggcggtacctcgatctgataggacgaaccctggtaaatgcccgtccagcgttcgctgggcaggcccggaaacggatccagcggcgagacgatcggtacgaagatgcgtgcatcctgaaggcgggactcgctgcctgagaccggtggtttgatcggcttcgatcgtgcctggacatcggccgtcattgcgatggtactgaccagcatggcgccggcgattgcacgcgtgcaggctgaagccaacttgcttgggagcatgggtggttcctcagttgtttttgttgttgttctgtctatgcaagcagtgccgggttgccgcgccgagccttgcgcgcacagcgaccaaccgaggcagcaaggtatcgacctgccaaatgagaggaatgttcgggaggcggggcaacagcaggatcggaaatgaaccgactgcggtctcgcttatggggcgggcagccgatgcggtgaaataccgcgaagcaagggtgcgctgacgcttacatggccagccggagagggacagcgagacggccgaggaaaaggcaatcggaccggaagccgttggcgaccggtccgacagtggacgcgcgatcagcagttgcccttctttgcctgtcccggcgggcaatgcgtgccgccatggtggccgccgccatcgccaatatcgatgccgatgcccggcaaacgcaggctgcaaccactcatcaacagcgcggcgagcgcgacggccagagtacgtgacatgaatgcggttctggtcatggaatactcctgatttcccatgggagtcggccattccggctccgtttgtgcagtatcggcctctttacaacgagacgacagcggcttttaacccatagcgcgaagacggtcgcaatcgtccggcaggttgcgtggcgccaccgccccacgacgaggcgtggcccgcgcgtgctgcgtctggaaaggcgcaccgggagcgggccgcgtagatgctgctagccggcgtgatattccgcatcagccgcttcgaagcgctgctgtatggacgctgcaggctccttgctcatgaggctaaccacgtagatggccaagctggcgaggatgaagccgggaatgatttcgtacagtccgaggccgatgaactccttccagacgaccacggtaatggcgccaaccagcatgccggccagcgcgccgttgcgggtcatgcgcttccatatcaacgaaatcagcaccaccggaccgaaggcagcgccaaagcctgcccaggcgtaggacaccaggcccagcaccttgctgtccgggttcgaggcgataccgatggcgatcagcgcgatcagcagcaccatgccgcggccaacccagaccagttcggtctgcgatgcgcccttgcgcaggaacgccttgtagaagtcctgtgtcaatgcgctggagctgaccagcagttgcgcgctgagggtactcatgaccgctgccagtacgccggagaggatgatcccggcaatccatgggttgaacatcagcttgaccagctccatgaacacacgctcaccgttctcggtgaccgcaccagccagggtcgggttgtcagcgaagtaggcgatgccgaggaagcccacggtgacggcacctgcaagtgtcagaatcatccaggccatgccgatgcggcgggcgttgggaatggtcttcaccgagtcggcggccatgaagcgcaccaggatgtgcggctggccgaaataaccgagcccccagccgagcagcgagatgatcgcgataaaggacagtcccttgaacatgtcgaagttggaggggtcctgagcggcgatggtgtccatcacggcgcccatgtcacccagcgagaggatgacgaagatcggcgtgatcagcagcgcgaagatcatcagcgtcgcctgcacggtatcggtccagctcacggcaagaaagccaccgacgaacacgtagacgatggtcgccgccgcgccgacccaaagcgccgtgtcgtatgacatgccgaaggtcgattcgaacaggcgtgctcccgcgacgatgccggaagcgcaatagatggtgaagaagaccagaatcaccagcgccgagaagatccgcagcaggcggctggtgtcctcgaaacgatgggagaaatagtccggcagggtcagcgcgttgtggttgtgctcggtgtgtacgcgcagtcgtccggcgacgaagatccagttgagccaggcgccagcgatcaggccgatggcgatccagctttccgacaggccagcgacgaacaccgccccgggcaggcccatcagcagccagccgctcatgtccgacgcgccggcggacagcgcggttacgaagctgccaaggctgcggccgccgaggatgtagtcgtcgaagttcttggtggctcggtaggcggtgaaaccgatgagaatcatcgccgcgatgtagaccacgaacgtgatcagggttggggtagacacattcattgttgtttattccttgtgtgctgccgatacatggtcggcttaacaggcaaggatagcggctagacgggttcttggctcgtgaccgggcggttttgcccgagcagatgacggccagcaacgggaatcgtgacatcgacatcgtttcgctcaccgacgaacctgacgggaattggcggtagcccgccgaacgcgaccgggatactgagcgaccatctggctgcgcagccattgtcatcacctgaccggctggatttcgctcgcaagccggattccgtagcggacatccggcgtgtcgtcgccacagccaaacagatcgccaccttgactgtctcaaccattacggctgcccctgtcggcggcccctcgcagcccaaggagatccgccatgtcagtcagcatcgataccgctaccggcacctgctccaccacgctcgaaggcactacgtaccgcagtgcgatcatggacgttcgggtcagcactgatccggcggcccgcatgtccatggcccacatcgacggccatagcacccacgtcaccgaggacatggccgagcacctcatcgccgcgggtgccaaagacgaccgcgagaacctggttgtcgacgattaaccgcgcggcatgagccgaagccgagcggtggtcggcattctcagcaaacaaaaaacccgctgccggagcaccggcagcggggttcatcgtgttacggcagcggtgactcagcggccctggtactcgttctcagcgtcttcgaagcgcttgatcatgctcggcgaggcgcccgcgccgaccttgctgaagaccacgatggcgaggctggcgaggatgaagcccgggatgatttcgtacagccccagcccgatgaactccttccagaccaccacggtgaccgcgccgacgatcatgccggccagcgcgccgttacgggtcatgtgcttccacagcagggagatcagcactaccggaccgaaggcagcgccgaagccggcccaggcgtaggacaccaggcccaggaccttgctgtccgggttcgaggcgatacccagcgcgataaaggcgatcagcagcaccatcgcgcgcccgacccagaccagctcggtctgcgaggcattcttgcgcagcatggccttgtagaaatcctgcgtcagggcgctggagctgaccagcagttgcgcgctcagggtactcatgacggccgcgagcacaccggagaggatcacgccggcaacccaggggttgaagaggatcttcaccagctccatgaacacccgctcgccgttggccgtgacgggaccagcctggtccggatggccggcaaagtaggcgatgccgaaaaagcccaccgcgacggcgccggccagggtcaggatcatccacgccatgccgatgcggcgggcgttggggatggtcttcaccgagtcggcggccatgaagcgcaccaggatatgcggctggccgaaatagccgaggccccaggccagcagcgagatgatcgcgacgaaggacaggccgttgaacatgtcgaaagcggccggtttcagcgtctcgatggtatccatcgccgcgcccatgtcgcccagtgccaggatcacgaagaccggcgtgatcaacagcgcgaagatcatcagcgtcgcctgcacggtgtcggtccagctgaccgcgaggaagccgccgatgaatacatagaggatggtcgctgccgcaccgatccacagcgcgacgtcgtagggcacgccgaagctgctctcgaacaggcgcgcaccggctaccacgcccgaggcgcagtagatggtgaagaacaccagcaccaccagcgccgagaagatgcgcagcaggcggctctcgtcttcgaagcggtgcgagaaatagtcaggcagcgtgagcgcgttcttgttgcgctcggtgtgcacgcgcaggcgtccggcgacgaacagccagttcagccaggcaccagcgatgaggccgatggcaatccagctttccgacaaccccgccgcgtagatggcgcccggcaggcccatcagcaaccagccactcatgtccgaagcaccggcggacaaggccgtgacgaaactgccgaggctgcgtcctccaaggatgtagtcgtcgaagttcttggtggcacggtaggcgataaagccgatcaacagcatggcgccgatgtagatcacgaaggtgatcagagtaggtgtactgatgctcattttgttccctcgttagttgttgttgatgggcgcgagggttatcccgatcccacctggcagagggcgacggcggatcacgccatcaccgggacgggtccaactggacccatcagtggcggaagagcgatccgccgactgttctgattgttgttgtcatccgttcgcctgagcgttcggggtgaaaccatgtacggcaaatcaaacgcttcgccccgagggcgggcctcccacaaataaaacagtgcacaccgatcccaatgtgggaggcgcgccctcgcggcgaatggcgccggccaggtgcccgaaaagcttcgccccgggtcgggcctcctacaaaaaacagcagtgcaggccgttcccaatgtgggagtcgcgccctcgcggcgaatggcgccatcccggtgcccggaaaagcttcgccccaggtcgggcctcccacaaaaacagcagtgcacaccgcccccaatgtaggaggcgcgccctcgcggcgaatggcgccgtcccggtgcccgaaaagcttcgccccgggtcgggcctcctacaaaaaacagcagtgcacgccgttcccaatgtgggaggcgcgtcctcgcggcgaatggcgccatcccggcgcccgaaaagcttcgccccgggtcgggcctcccacaaaaacagcagtgcacgccgtcaggcctgccagagacccatccctgtcagtcgtcgaccagcgacagcaaggacgcgttaccaccaaccgccgtggtgttggtcgaggtggtgcgttcgttgacgaagcgcagcaggtagctcgggccgcccgccttcgggccggtgccggacaggccgcaaccgccgaacggctgcacgcccaccaccgcacccacctggttgcggttgacatagaggttgccaacccgcgccagcgcttcgatgcgctcggcggtttcctcgttgcggctgtgcacgccgagcgtcaggccgtagccggtggcattgatgtcggcaacgaccttctcaaggtcggccgcgtcgaaacgcaccacatgcaggaccggaccgaactgctccttcttcagctcaaggatgctgccgatctcgaacgccactggcgcaacgaaatgcccgttcaggctgcccggcagcttggcttcggcgatcagcttgccttctgccttgagctgctgaatgtgcgccagcaggccttcgcgcgcttcggcatcgatcaccgggcccaggtcgttttcgcgcaagtgggtcgggccgaccttcagctcggccatcgcgcccttgagcaactcgatgacgcggtcggcgatgtcgcgctgcacatagagcacgcgcagggccgagcaacgctggccggcgctggtgaaggccgaaccgacggcatccttgaccacctgctcaggcagtgcggtggaatcgacgatcatggcgttctggccaccggtctcggcgatcagggcggcgattgcgccctccttctcggccagctggcggttgatgatgcgcgcggtgtcggtggaaccggtaaagcacacgccgaccacgcgcgggtcgcggcagaacacgccgccgagggtggcgccgtcgcctggcaggaaggcaatcgcctcttttggcaggccggcttcgaacatcagctccagcgcgcgcgcggcgatcaggctggtctgctcggcgggcttggccagcacggtgttgccggcgaccagcgccgcggtgatctgcccgagatagatcgctagcgggaagttccaggggctgatgcagacgaacacgccgcggccttcatggaacagctcgttgcgctcgccggtcggccccttgagttcttcacggccgagcttcaggcgcgcctgcagcgcgtagtaacggcagaagtccacggcttcacggacttcgtcgatgccgtcctgcagggtcttgccggcttccagggtgcacatggccatcagctcggcgcggttggcttccagcaagtcaccgaggcgctcgaggatctgtgcacgctgctcgatgggcgtggcgttccagcgcggccagaaggcggacaggccatcgatggcctgcctggcctgctcggcggtggcgaactgggcggtgcccacttcctggctgagctgatacgggcaatgcaccttgtgcggcgcgccggtgagcttctgcccaccgatcaccggggcagcctgccactggcggtcgaggaaagtctggtaggcgctggacagttcgttccactgggtctggatgttcatgttgatgccttgcgagttggtccggttgccgtacagcgccggcggtagcgggatgcgatggttgccgagggtcttgaactggcgcagctgggtaaccgggtgatcgatcagggtctcgaccggcacgcgcgggtcgaccagctggtggacgaacgaggagttcgcaccgttttccagaaggcggcgcaccaggtagggcagcaggtccttgtgagcgccgaccggtgcatagatgcgcacgttcttgcggtacttctcgatcaccgtgtcgtacagcgcatcgcccatgccatgcaggcgctggaactcgaactcgcgcggcgtcttcagctcgccgaccatcgacaggatgcagctgacggtgtgggcgttgtggctggcgaactgcgggtagatcacgccacgggtctgctctgacagcaggtagcgtgcgcaggcgagatacgaggtgtcggtgccttccttgcgggtgtagaccgggtagccatcgaggccctggacctggcactgcttgatctcgctgtcccagtaggcgcctttgaccagccgcagcggaatccgcgcgccgagttccttgcccagcagggtcagccacaccagcaccggcaggcagcgcttggagtaggcctgaatgaccaggccgaactcgccccagccggcgatggccgggtcgcgcatcagcttttcatagagttccaacgacagctcgaggcggtcggcctcttcagcgtcgatggtgatgccgacatccaggcggcgggccagaatcgccagctcgcggacgctggcgaacagctcggtgagcacgcgctcacgctgggccacttcataccgcggatgcagtgcggaaagcttgatcgacaccgacgggcgcgggccgggaccgacctgcggctcggcaccgacgatttccacggcctgacggtagtcggccatgtacttgcgcgcgtcttcggcggtcaaggccgcttcgccgagcatgtcgaaggaataggtgtagcccttctcgcgctcgggacggccgttcttcagcgcctcggaaatggtccggcccagcacgaactgcttgcccatcagcttcatggcctggttcatcgcggcacggatgaccggctcgcccgaacgcttgatcagccggccgatgacattcttcgggcgcccgtcggcgttttccggatcgaccaccttgccggtcatcaccaggccccaggcggcgaagttgaccagcacgttgtcgctctgcccgaggtggcgctcccactcggctgcgttgagcttgtcgcggatcagtgcatcggcggtagccgagtccggcacgcgtagcaacgcttctgccagacacatcagcatcaggccttcgtgggtgtcgaggctgtactgacgcagcaacgcatcgagcgtatcgaccgcgttgtcgcggccgcgcacggcttcgatcaggttgcgggcttcgcgacggatggcttcgatgcccgcgtcgccggggtcggccagctgcaggagctcggtgaggtaggccgcctcgtcaacgctgtagttcgcgctgatggcggggaaaaattcggcggctttcaggttggcgaaatcgccctgcaagacttgaccggctttgaacatcgcgccgctcctctcgtggagtgttgttgtactggcacggcgtgcttgcgctcgaaatacgcagcagctgccgaacgggtaggcgaatctaaggcgcggacgtttcgcgttgttgcgcaaagctacggaactttttcaaaaagctacgcgtttcggctcatgtcaaaaggctgtcacgaaacgtcgctaaagcggtgcgggattactggcgttttggcggcagcgcaccttgttggtgcgccgtgaagaagctcagtggtcgctcttgcgcagacgcttgggagtcaatccaaggtagcgccgggtcgcggtggtcaatgcgctctggctggagaagccacattcttcggcgatgcgcaccaagggcaacggactttcgcgcagcagacgcgtggcacggtccagccggcttttaagcaggtattgatggggcgtcaggccgacgctgtccttgaactgggcgtggaaatggctgggactcaggcaggcgacctgcgccagctcggctacggtgatgcgccgggccaggttgctttcgatatgcgcatcgaggcgtgcgatatccagcggccctttcggcggacgctgcgcctcgccgaatacccgcaagtgcagcgccctgagaagaacgccacccaacgcccgcgccagcagcggatcgctgccatagcgcgccagctcggcaccggcgtagttgagcaggttgtggaaatcggcatccagcgccgggtagcgcggcgtctcgaacagttgcgccagcaggcgcggatcgtcgtcgctgacgtcctgatcatccagatcgatgatcagcatgcgattgtcgcccttgccggcaaattcgtgctcggcatgcccgggcaccaggcaggcgcgcatgcggcaaacctcgccacctgaaccatccacctcgaactcggcactacccgacagcgacaggaccaactgatggtagtcgtgcgcgtgttcgtgggccttgtcatcgaggcgaagcagacgtgcgttgagcatggcggggtacctgaagtgtccgggcactctaccgaaggccggtgtttttttacagcgatcggccatccgttgcggtgatcggattgaaatcatttggcggatacccatctaaagagcacgtactcgcaacaggtgccgcatgaacgacgacatccatcaggaattcgaacaggacctctcctccacgggtctggtgctgccggatcagaacctgcccgacaagctgtacatcattccggtacataaccggccgtttttcccggcccaggtgctgccgatcatcgtcaatgaagatccgtggtccgagacgctggagctggtcgccaagacgccgcaccagcgcctggctctgttctacatggatgcgccggcagcggacgccaccaccttcgatcccgacagcctgcccgagcacggcaccatggtccgtgtgcaccacgcctccaaggaaggcggcaagctgcagttcgtggcccagggcatgacccgggtgcgcattcgcggctggctgcggcgcaagcctccctacctggtggaagtggaatacccgcagagcgacgaagacccgcgcgacgaggtcaaggcgtacggcatggccttgatcaacgcgatcaaggaactgctgccgctcaacccgctgtacagcgaggagctgaagaattacctcaatcgcttcagcccgaacgcaccctcgccgctgaccgatttcgccgccgcgctgaccaccgcacccggggcggagctgcaggaagtgctcgacaccgtgccggtgctcaagcggatggaaaaggtcctgccgttgctgcgcaaggaagtcgaggtcgccaagctgcagaaagagctgaccggagaggtgaaccgcaagatcggcgaacgccagcgcgagttcttcctaaaggaacagctgaagatcatccagcaggagctgggcatcaccaaggacgaccgcagcgccgatgccgacgaattccgctcgcgcctggaaggcaaggtggtgccgcccgccgcgcaaagacgcatcgacgacgagctgcaaaagttgtcggtgctggaaaccggatcgcccgaatacgcggtaacgcgcaactacctggactgggccacctccatgccctggggcctgtacagcgaggacaagcttgacctggaacacgcgcgcaaggtgctcaacgcgcaccacgccgggctcgacgacatcaaggatcgcatcatcgagttcctcgccgtcggggccttccgtggcgagatcgccggttccatcgtgctgctggtgggcccgccgggagtgggcaagaccagcatcggcaagtccatcgccgaatccctgggccgccggttctaccggttcagtgtcggcggcatgcgcgacgaggcggaaatcaaggggcaccggcgcacctacatcggcgccctgcccggcaagctggtgcaggcgctgaaagaagtcgaggtgatgaacccggtgatcatgctcgacgaggtcgacaagctcggcagcagccatcagggcgatccggcctcggcgctactggaaaccctcgatccggagcagaacgtcggctttctcgatcactatctcgacctgcgcctggacctgtccaaggtgctgttcgtctgcaccgccaatagcctctattcgatccccggcccgctgctcgatcgcatggagatcatccggctgtccggctatatcaccgaagagaagctggccatcgccaagcgccacctctggccgcgtcagctgcagcgcgccggggtgccgaagaatcgcctgacgatcagcgacagtgccttgcgcagcctgatcgaaggctatgcccgggaagccggggtgcggcagctggacaagcaactcggcaagatggtgcgcaaggccgtggtcaagctgctggacgagcccgaaagcaagatcaagatcggcccgaaggacgtcgagagctacctgggcatgccgttctggcatcccgagcagttgctcaccggggtcggcgtggtcactggccttgcctggaacagcatgggcggcgccacgctaccgatcgaggcgacgcgcatccacacgctcaaccgtggcttcaaactcaccggcaagctcggcgatgtcatgaaggagtcggccgaaatcgccttcagctatgtcaactcgcacctgaaggaattcaagggcgacccgagcttcttcgaccaggccttcgtccacatgcatgtgccggaaggcgccacgcccaaggacggccccagcgccggcatcagcatggccagcgcgttgctgtcgctggcccgtaaccaggcaccgaagaaaggcgtggccatgaccggcgagctgaccctcaccgggctggtgctgcccattggcggcctgcgtgaaaaagtcatcgccgcgcgccgtttgaagctctacgagctgatcatccctgaactgaaccggggcgacttcgaagagttgccggactatctgaaagaaggcctgacgatgcatttcgccaagcgtttcagcgacgtggtcaaggtattgttctgagattgcgccgacagcctccgagatcacggagcgctgtcggcggccgtattgccgcatcccgatcgggcacgctttacgatgggcgcctggcgccttatggttcgattcagacccatcccgaccagagccgcccacgccgatgcctaccgccctgccccgcctactgtccttcgtaccgctattgctgcttgctggctgcgccagtgcgccgtccggcaccgtcgcgctgagcgacgaagccgagtgtccggtaaccctgcggccggggcagaaactgatcgtcagcctacccagcaacccgaccacgggctaccgctggcatgcccgggaaatttcgggtgaacagctgaaaagcctcggcccggaagtgttcagttcgccgaagaacgacctcgtcggcggcgagggcatctcgacctggcgctttcaggcggatcagccgggcagcggacggctctacctcacctatgagcgcccctgggaaaccgaaggcgagccagccgggctgttcgactgccgcattgaggtgcaatagcctcagcgggcacaaccccggctgtccttcggcgacggcgttcgagtcggctttccgctacaatgccgcccctgttttcagcctgcccagacgttaccgtgagccacgaacccgaccgcctgttcgcccagccccttgcccaaccccaggacttcgttttcaacgaagacgttgtgcgggtgttccccgacatgatcaaacgctcggtcccgggctaccccaccatcgtcgagaacatcggcgtgctggctgcgcagttcgcccagccgaacacctgcctgtacgacctcggctgctcgctgggcgcggtgacccaggcgctgcgtcggcacgtcaaggccgacaactgccaggtcattgccgtggacaattccacggccatggtcgagcgctgccgtgaatacctgcatgggcaggactcgatgtttcaggaactgcttccggtcgaagtgatcgaggccgatgtactcgcactcgaatttcaacccgcctcgctggtcgcgctgaatttcaccttgcagttcatcccgccgaaacagcggcccgcgctattgggtgccatccgccaggcgctggtgccaggcggcgcgctgatcctctcggaaaagctgcgtttcgaggacgaggaggagcagcaattgctcaccgatctgcacatcgccttcaagcgcgccaatggctacagcgagctggaaatcgcacagaagcgcagtgccatcgagaacgtgatgaagcccgacagcctggaaacccaccgtcagcgcttgctggacgctggtttctccaaagtggtgccctggttccagtgcctgaatttcgcctcgctgatcgccctgccatgaatctcgacctgactcccctcgcctggcgcctggccggcaccccgctggccgcctgggccaacggcctgcagcaacaactggacgccaagctcgccgtcgggcatggcgatctgccgcgctggcggcgggcagtcgatgcgctgccgaacattcagcccgaggcggtcgagctgcgcgatgcctttcggctggatgccgattgcgacgaggcgacacgcgccaccacccgtgacgcactgttcggcctgtcgccctggcgcaaagggcccttcgatgtgttcggtgtgcacgtcgacaccgaatggcgctcggactggaagtgggaacgcgtatcgccgcacctgaacctgaccggcaagcgcatcctcgatgttggctgtggcaatggctattacatgtggcgcatgctcggcgccggcgccgactcggtcgtcggtatcgatccgaactggctgttcttctgccagttccacgcgatgaaacgctaccttgccgagcaccctgtctggcacctgccgatggccctggaagaactgccggcgaagctcgaaggcttcgatacggtgttctccatgggtgtgctctatcaccgccgctcgcccatcgatcatctgctggaactcaaggactgcctgctcaagggcggcgagctggtactggaaaccctggtggtcgaaggcaacgagcacaccgcattggtccccgaggatcgttacgcacagatgcgcaacgtctggttcctgccctcggtggccgcgctggaatgctggttgcgccgggcggggttcattgatgtgcgctgcgtcgatatcagcgtcaccagcgtcgaggaacaacgcagtaccgactggatgcgctatcagtcgctacctgacttcctcgaccctgatgaccacagcaagaccatcgaagggttgccagcgccgatgcgcgccgtcctggtcgcacgcaaaccctagcgctggcgctggcaacgctgctcctcgatcaattgccgcagcggcatttgcagcttctccagaagtcgcggccggctcagatcacgcatccgcagttgcctgtcactgagcctgagcaggcgcttgtacagacgccgcttgcgccaggcgacgaaccagtcgatcaccatctgctgaagttcgaatggccacatcgctggcatgtagaagtccggcatcgccgggcggggacggtcgtcgaccttatcgcactgttgctgccgttcagaatgacgcatcgcatcctcctgtcttcgcgagggtgctatgggcgcacccgatgcccgccgaccgactcgtggtcggcagaatcagcttgagcgcccttgacgattcagacaaacgactacaatgaaatctacgattcaacaaaattgaaggcggccccatgccaggtatgcccgaagaacttccccagtccgccatgcccctgcttgaaatcgatgtgctgcgcaccttcgtctctatcgctgaaagcggaagcttcacgcgcgcggccgggcaggtctttcgcaccacctcggccgtcagcatgcagatcaaacggctcgagaccatgctcgactgcgccctgttcgtccgcgaggcccggcgcatcacactcaccgatgacggcgaacggctgctcggttacgcccggcgcctgctcaagctcaatgaagagacggtcagtgcgttcatctcgccgcggctgaacgggcgggttcgtttcggtacccccgccgacatcggcacgcacatcctgcctggcctgttgtcgctgttcgcccgtacccatccggggatcgaggtgaatgtgtcggttggccgcagtgtcgacatgatccagcgcatcgacgccggcgagctggacgtcgcgctcatcagcgtcggcaacctcggccaggacgactcgcgcggcgaagtcattcacagcgagccgctggtctgggcgggccgagccggtggcgtcgcggtcgagcgcaacccgttgccgctggccctgtcgagccccgaatgcgcgtggcgacgccaggcgatggacgcactggaccgcgccggtcgcccctaccgcattgcctactctagcgagcagtgcgccgggcaagaagcggcgatggtcgccgacctggcggtggcgccgtatccgttgagcctgatcaggcctccgctcaagcgcctggaggaaggcgacagcctgcccagcctcggcgaataccagatcaaattgctttgcgccgctggccgcagcgaggcggtagacgtgctgtcccggcacgtcatcgcggcgttcgccgcttatcacaaatgatcgactcggcagcgtagagacagcatggcgaaatggttgatggcggcaggcttgctactgctggtgctcggcgcggtccttcactacgcgccgggactgctgagctggttcggcaagctgccgggagatatccgcatcgaatcggaacgcagccgggtgttcattcccgtcacctcgatgatcattctcagcgtgatcctgacagtgctgatcaacatcttccgccgctagttgcttgacgaggcgagccgtaggcaaccggaccgcctcgatcgatcaaccgcgcgcggcggcgctgaggatcaggtgcttcatttccttcacggcctgcttgaagccgacaaacaacgcgtgcgcgacgatggcgtgaccgatgttcagctcattgacgccgcggatcgcggcgacggcttccgcgttgtggtaatgcaggccatggccggcattgacgatcaggccgtggctcagaccagcctcgacgccgtcgcgaattcgcgccagctcgcaggcgcgttcagcgacgccgtgcgcatcggcatagcgcccggtatgcagctcgatggccggcgcaccgatgcgtgccgcggcctcgatctgccgtggatcggcatcgatgaacagcgagacctcggcaccgcaggcggtcagccggtcgaccgcttcgcggatgcgcgcttcctgccccgccacatccaggccgccctcggtggtgagttcctgccgcgtctccggtaccagacacgcatgctccggacgtagccgttcggcgaatgcgagcatcgcctcggtcacgcccatttcgaagttcattcgcgtctgcagtgcgtccttcatcatcagcacgtcacgctcctggatgtgccgacggtcttcgcgaagatgaacggtgatgccatcggcgccggcctcctccgcatccagcgcggccttgaccgggtccggatagcgggtgccgcgcgcctggcgcagggtggcaacgtgatcgacattgacgccgagcaggattcgattggcttcagtcacgcgggacctccttgatgttcatgaacagttcgcggctgaccagtggccggccacccagatgtggcgccagcgcctggcgcatcagccttttcgcagccgccagcgtgccgggtacttcccagtcggcctcggccatggccaagagttccgcgccgttgaagaggccgggctggaactgccccacggcctcgaggcctgcctcgggcaacaaacgataaagcccgccgctgacgatcggttgatcatcgatatcctggtcgagggcgaagccgtaacccagctcggtcagcaatcgccattcgaaggagcgcaggatcggctccagcgggcgcttggccgccagcgcgggcagggtcgcgacatagtgttcgaacagggcgggatgggcgtcttcagccgggagcaggcgaatcagcagctcgttgagatacataccgctgaacagcgcattgccgtcgagccagtacgccaatcccgcactctcgagacgcgccaccgacttcagctcactccgaccacgaaactcgacgtcgagcggcacgaagggacgggccagcgtgccggaccgcccccgtgcgccgcgaagcaccgcacgcaggcggccttcgggcgtaaagaaatccaccaacgcgctgctttcgcggtagggtcggctatgcaggacgaaggcggtctggatggtcatggtttgggctggaggctggataagcgtagggcgggtaaaacccgccatcagtaggccgccctcgatcagggcgagttgccagcacctgggttcacgatgcggcagagccgcgcgttccaagctcagagtcgctcttgccgtccagcgtccagggctctcgtcgtccctcgcctactggtagcccagcgaatgaagcgcgcgctcgtcatcggaccaaccgctcttcaccttcacccagaggttgagcatgaccttggagtcgaacagcacttccatgtccttgcgcgcctcctggccgatacgcttgatacgctcgcccttgtcgccaatgatgatttttttctgcccgtctcgctcgaccaggatcagcgcatggatatgcagaacgtgcccctgctgcttgaaatcctcgatctcgacggtgatctggtaaggcacttcggcgcccagctggcgcatgattttctcgcgcaccagctcagccgccaggaaccggctgctgcggtcggtgatctggtcttcagggaaaaagtgttcaccctcgggcagatgcgaggcgaccagcttctcgaacacgtcgaggttctgcccatgctgcgccgagatcggcacgatctccgcgttcggtagctgctgcgccagccattcgaaatgcggcagcagttcacccttgtcctcgacgcgatcggtcttgttcaccgcgacgatcaccggaccctcgacgtattgcacgcgctcgaggaccaactggtcttcgtccgtccagcgcgtgcggtcgactacgaaaaccaccacgtcaacgtcctttagagccgacgaagcggtgcggttcatgtagcggttcagcgcggtttcgccgttcttgtgcaggccgggggtgtccacataaaccgcctggaccgcaccttcggtcttgatcccgagcatattgtgacgggtggtctgtggcttgcgcgaggtgatcgcaagcttttgtccgagcacatggttgagcagcgtcgacttgccgacgttggggcggccgacaatagccacatagccgcagcggctcacttcgtcctgcagatgttcatcagtcatgaccgttctccacgcccagcgctatgagtgccgaggcagcggcaacctgttcggcgatgcgccggctggcgccctgcccttgcgtcttctcgttgagcagtgacacctgacattcgacaaagaaggtccggcaatgcggctcgccctggatcgccacgacttcgtacttcggcaattcacaggcacgcgactgcagaaattcctgcaagcgcgttttcggatccttgttggtgtcgaccagcgtcaacccttccagttcgttggcgagccaggcgagcacgcgatcgcgcgcgacctccatgcccccgtccagatagattgcgccaatcagcgcctcgagcgtgtcggccagaatggactcgcggcggaaaccgccacttttcagttcccccgaacccagccgcaggtattcaccgagttcgaagcctctggcgagtaccgccagggtttcacctttgaccaggcgcgcgcgcaagcgcgacagctgcccttccttggcctggggaaaatgactgaacagcgcctcgccggcgatgaaattgagaatggcatcgccgagaaactccagacgctcattgttgcgtccggcatagctgcgatgcgtcaaggccagcagcatgagctcctgatccttgaattgatacccgagcctacgctcgagacgggctaacgaagtgctcacggcatccttaggcgatattctttgtcgaagttcgccaccagatcgaggttacggatcaggggctcgcgtttttcgtaatccaggtggactttgaactcgttgttctcgatgacgaccgtcagcgccttctcaagatcgagatcgcgaatgccgttcacgtccatccccttgcggacatggctatagaaatctcgcacggtgcggatttccagcgccggttcactttccacccctgagatgatcttgtccatggacatatagtcgaagtagtgcggcagcatcttgaatgcggtgctggcaaaaaacgcgaccagcgcgagcaccatgatccagctcagcatggacagccctttttgcgaacgagcgaaactcatgtcgacctctatgtcgtacggcacccacggatcggggcgactcaaatatagcgagccggaccggaggaaccgggccctgattcacagactcagtgaatcagcccgactcgggaaaaattcggcaggttgctgaacttgggatccggccagctcatccatacggcaaacgccttgccgacgatgttgcgatcaggaaccatcccggcaagctcggccggaatcgccggatcgtgccagtagcggctgtcgttggagttatcgcggttgtcgcccatcatgaagtaatggccggcgggcacgtgccattcacgattgggctcgacccgatagcgtcccatctccttgcggatcaggtgctccacctcgcccagcttctcgcggtacagcttggcactgcccaggcttcccggctcttcgccgatcagcatctcggcaaccgggttgccgttaatgctcaggtgcttgtcgctgctgtagcgaatcacgtcacctggcaacccgatcacgcgcttgatgtaattgatgttcggatcgctcggatagcgaaacaccatgacatcgccacgctgcggatcgctgacatcgatgaccttggtatcgaccaccggcagacgaatgccgtaggcaaacttgttcaccagaatgaagtcgccgacttcgagcgttggaatcatcgatcccgaaggaatctgaaagggctcgatcagaaacgaccgcaggaccagcacgatcgccaataccggaaagaacgatttgccgtactcgatcagcaccggctccttgttcaaggcatcgagcgcagattggtccggctcgccggcctgcccttcgtagttcgctatcgcagcccgacgacgcggcgcgaagaacaccaggtcgagcagtgaaaggaagccgcagaccgcaacggcaatcaccagcaacagcggaaaattgatcgacatcagctatctaccttcagcactgcgaggaaagcttcctgcggtatctcaacgttaccgacctgcttcatccgcttcttaccggccttctgcttttccagcagcttgcgcttacggctcacgtcgccgccatagcatttggccagaacgttcttgcgcaacgccttgacagtgcttcgcgcaacgatctgaccgcccaatgcggcctggatcgcgacgtcgaacatctgccgaggaatcagctctttcatcttctcgaccaggatgcggcctttatagtgggcgttgtcccggtgcacgatgagcgccaaggcatcgaccttgtcgccgttgatcagaatgtcgagacgagtcaggttagccgactggaaacactcgaagctgtaatccagcgaggcatagccgcgactgaccgacttcaggcggtcgaagaaatccagtaccacttcgctcatgggcaggtcatagcgcacctgaacctgcgtgccgaggaattgcagatcccgctgaacgccgcgcttctcgatacacagggtgatcacgctgcccaggtgctcctgcggcaccaggatattggcgcgcacgatgggctcgcgcatgtcctcgatcgaggacaggtccggcagcttggacgggctgtcgacgtaaatgacctcgccgttcttcagcgccagctcataaaccacggtcggtgccgtggtgatcaggtccagatcgtactcacgctcgagtcgctcctggatgatctccatgtgcaacatgccgagaaagccgatacggaaaccaaagcccagggcatcggaactctcgggttcgtactgcagcgcggcgtcattcagcgtcagcttctgcaaggcttcgcggaaatcttcgaaatcatcggagctgaccggaaacaggcccgcataaacctgcggcttgacgcgtttgaagccgggcagcatctcgacgtcgggagtgttggcgagcgtcagggtgtcgcccactggcgcaccgtgaatatccttgatccccgcgatgatgaagccgacttcgccggccttcaggtctgccgtggtggtgtgcttaggattgaacacaccgacgctgtcgacctggtgcatcttgccggtggacttgaccagtaccttgtcgcccttcttgatccgaccatgacgcactcgtaccagcgagacgaccccgaggtagttgtcgaaccaggaatcgatgatcagcgcttgcaacggtgcgtctatttcaccggttggcggcggaatgacctgaaccaggcgctcgagcacctcgtccacgcccatgccgctcttcgcactgcaggcaacggcgtcggtcgcatcgataccgatgatatgttcgatttcgcccttgaccttgtcggggtcggcctggggaagatccatcttgttcaacacgggcatcacttccagcccctgctcgatggccgtgtagcagttggcaaccgactgcgcttcgacgccctgccccgcatcgaccaccagcagcgcaccctcacatgccgcgagcgaacggctcacttcataggtgaaatcgacgtggccgggcgtatcgatgaagttcagctgataggttttgccgtctcgcgccttgtaatacagcgtgacgctgtgcgccttgatggtgatgcctcgctcgcgttcgagatccatcgaatcgagcacctgggcgttcatctcacgctcggtcaggccaccacacatctggatgaagcgatcagccagggtcgacttgccatgatcgatatgcgcgatgatggaaaaattgcggatatgactcaggtcgctcacaactaaaacactcgaatacgccgcgggccgattgcccgccgaaaatagccgcaaagtgtacctgataggtctaatcagcgccacgccagaccccgcaacgggtctcagccctttaaaaaaatggcggtcaggcaataaaaaagcggcccgcaggccgctttggaattgccgattccgcctattcggcgagcttgaaggtaatgaaactcgcacgcccctgccgcaatacccgcatggagaccgatcgattcttgggcaactgctctgcaacgcgtgcaaacgtcgaaaccgagtcaattgcctggttattcaagtgagtgatgacgtcacccgggcgcaagccgatcattgccgccggcccgctcgatacctcggtaatcaccacgccacccggcaggtcgaggctgcgcttctgctcggcagtcagctccgacaccttcacaccaagcctgttgttgctcttctcggcgttgcgctcggctgccgcggcctcctcgccttcgtccggcagggccccgatctgaacggtgagcgtttcacgctcgccatctcggacgatttccagcttggccttggtgttcggcttgatggcgccaatcagatgcggcaggtcagccgacatatcgatcgcatggccgtcgacgctgagaatgacatcaccgactcgcaaaccgcccttggctgccgggccaccgtccatcacttgtgccaccagcgcaccagccgggcgctcgagcccgaacgactcagccagatcccgattcacctcttggatagcgacgcccagccaaccccgactgaccttaccctcggtacgcaactgatcggcgacatccatcgcgacgtcgatcgggatggcgaaggaaagccccatgaaaccacccgaccgggtaaatatctgcgagttgataccgatcacctcgccttggaggttgaacagcggcccaccggaattacccggattgatcgcaacgtcggtttggatgaaagggacatagctctcgctgggcaaattcctgcccgtggcgctgacgatgccggccgtcaccgtgtgatcgaatccaaacggcgagccgatcgcgagcacccattcaccgaccttcagcgcgctggagtcgccaaggcgcaccgttggcaggccggtcgcctcgatcttgagcaaagccacatcggtacgaggatcagccccgacaagcgttgcctccagttcgctccgatcgggcaagcgaacgatgatttcatcggcatcggcgaccacgtgattgttggtcagtacataaccatcagcggcaatgatgaatccagagcccagcgactgcgcgtcgggctgctgcccttcaggcggggccggaaagctgtgtccgaagaactcacgaaagatgggcggcaagccctcgagatcaggcatctgcgcggccgcgccacgggcctgcacgtgctgcttggtgctgatgttgactaccgccggcgaagcgctttccaccagcggggtgaagtccggcagttgcgcattggccagcgcaacctgcccaagacaaaacaatgcagcgagaaaggcgaagcagctattccgtgaaaccctcaagatcactctcccttgtcagaatcgtattggcctgaccacgaccggccgctcccaccagcacgggtcgcagtacgaccggttgcagcgccgggtcgcacgccgtttgctgactgcgcttgcgtaccgccagccatgacagcacaaagccactaatgccggcgagcatgacgtacggctcgctggcgccgagctccgaggccaggagcgacgaggcaaacaatgcaatcagtgggaagagataaacaaggagggccccacgcagcaacacgctttcacggatgcctatgacgaccgagtcgcctacgctcaggtggcagtcggatagggcccgtatcaatccgcgccgttcacggacgccaagcctgtccatcaatccctgaccgcagccgtttctggccgaacaaccagagcaggtactgctgcgccgggtctcgacccaaaccgcaccagcctctacggcaactacccgccccggttcttcgatcatcgcgaagcctgttcagctccagcgcgcatggacaatgcgattcgctcggcagtccctaacgggatttcacccaccacggtgaccatcacgtcgccgccctctgtggaaatacgcttggataccgcgactgtgggtcccatttgactgcgcgcatcctcgacgaccgcgccgtgcagtggctcgagaaacaccgagaagcgggcgagtccatcgccataggaaagccaggtcactttttcatccgaagccgggctgggacgaacgttcgagtcaagcaactggaacccatccggtagccagtcagaacgccacttcggaggcgtcgacgattcttccgcggccagagagacggacttgcagctcgagccggcacggacatcggcaggcccgatggtatcaggcaggaattgagtgaactgaaagcgctcgagtaattggccgttctcgtcgagcaaaagcgatttgagcggtagcgccgtctctcggtccagatgcagctcgaagccgtagcggtgctggtctttcggcctgatcgacaacgctacggttgaccgtcccgcgacgcgggattcaccaatgacctgaaagttgtaccacttggacaacgcctccggctccaacggctgctgccgccatggctggccgtcgcgaacctgcgaagccatgtcctcgctggcgcactggaccttgccatcgaccagcgaaacctcgacagcaggaccgtccagctgcaagagccgctcgtgcagttggtcaccttctacgagttgccagaccgcatgactggaaaagctaccattgcgttcgtagacgaatgtgccctggtaactctgcttcttctcggccgccgctagtcgttgcatccaagtatcggcatcagcagcgaaggccggcatcgatagccagcctcccagcaccacacacagcggtattacacgcatgttcttccttaacgatcttccatgctggcagcgcgcgcatatggcaacgcaccttcagagccgctaccaaacgcggcctgttgcgcatgctggcgaacatacgtcggcagccgcttttcgtgccagccttcagcagaagcctgcgcacctgtcgcttgtacgtcagacgggcccgcgtcttcgctataaccagccagcaccgctgggccctgattggcctgcggtaccgcgatgctgggttgcgccgcctgctgcgcaatctgcgggccagccacttcgctttgattgtacaagcgtacgccggccagtacagcaacggtgaccgatgccgcaacggcgagccgacccaggttgccccaagcaaagcgctgaggcttggccattgtaatggctggctcatccgccagagccgccgagaccgccgaagcgatatccaggcgaggctcgatcagctccttgtgcatggcggcacgagcgatctgataacgcgaccaggtcgatcgcatatcggtgtcgccgtctgcggcgagtactcgacgtaattccaactcgtccgcttcgttatccatcaccgcggacagcgattcatgcagggcttcacgactcatggcggttcctctcttggctgtcgccgctgtctcaggattcatgcaacaggggttgcaatgctttatcgatggcttcccgcgcccggaatatccgtgagcggaccgtacccaccggacactgcatgacgtttgcaatgtcttcataactaagaccatcaaattcacgcagtgttagagccgtgcgtaaatcttctggaagttgttggatagttctatgaactgtgtcctcaatttcatccctgagcagcgcacgttccggcgactcgatgtccttgagggcgtgatccccttcgtagaactcggcatcttcagagctgacatcgctgtctggtggccgtctccctctggccaccaaatgatttttcgccgtattgatggcgatgcggtacagccaagtataaaaggcactgtcaccgcgaaaattcgcaagcgcgcggtaggctttgataaaggcttcctgcgcaacgtcctgagcctcgtgagaatcatgtacgaagcgcacaatcaacccaagaatcttgtgctgatatttcagaaccaacagatcaaaagcccgcttgtctccccgctgcacccgctcgaccagttgctggtcctgctcctgggttagcataaacactcctccatgatctggaaggaatgctgcgctcgcctgcgagctgacctgccagaatagacccgggctttacacaaaagttctcccccttcaagcaagctttcctgcaacacacctgacggcattagcgagcaacgcatcgaaacggatcgtctcgacgacgcactcctggtatctacagcaaaatccagccgcccaccgatcgatggccagctggctggcttccacaactgtctatagagacaggcctgcaagaaaagttccaaagcagcaactacatgaatgcgggccgctattttgcaggtgggcgcgcctatatactagcgctcgcctcactgtgagattcgaaatgagccgacattaccaatacgacgtgttagtcatcggcagcggcgccgccggtttgacgcttgctctcaacctaccggccacgcttcgcgtagccgtactgagcaagggcgacctggccaacggctcgacgtattgggcccaaggcggcgtggcagcggtgcttgatgacaccgacacggtcgaatcccatgtcgccgacacactcgtcgccggcggtgggctgtgcagggaggacgccgttcgcttcaccgtcgagcgcagccgtgaggctattcattggctgatcgaacaaggcgtacctttcacccgcgacgatgccgaccgcgaagacggcagtttcgaataccacctcactcgcgagggcggccacagccacaggcgcatcattcatgcggccgatgccactggtgcggctattttcaacaccctgctgggacgcactcagggccgggacaacatcgatctgctgcaccagcgcgttgccgtcgacctgataaccgaacgcaagctgggcctgaacggcaagcgctgccttggcgcctatgtgctggaccgggaaaccggcgaagtagacactttccaggcgaaattcgtcgtactggccacaggcggtgcagcgaaggtctacctgtacaccagcaacccggacggcgcatgcggagacggcattgccatggcgtggcgcgccggatgccgagtcggcaacctggagttcaaccagtttcaccccacctgcctgtaccaccccaaggccaagagcttcctgatcaccgaagcattacgcggtgaaggcgcagtgctcaagctgccaagcggcgaacgcttcatgccacgcttcgatcccagagccgagttggctccgcgcgacatcgtggcccgagcgatcgaccacgaaatgaagcgactgggcgtggactgcgtgtatctggacatcagccataaacccgccgatttcatcaaggcgcactttccgaccgtctatgaacgctgcctggaattcggcatcgacatcacccgcgaacccattcccgtagtgcccgcagcccactatacgtgcggcggcgtggtggtcgaccaggccggcaggaccgacgtgcccggactctacgcaatcggcgaaaccagctttaccgggctgcacggggccaaccgcatggccagcaactcactgctggagtgcttcgtctatgcgcagtccgccgcccaggacatgctgcgagaactgccgtccatcacgccaaccggtcaactgccgatctgggatgccagccaggtcaccgattcggatgaagacgtcatcatcgcccacaactgggacgagctccggaggttcatgtgggactacgtcgggatcgtccggaccaacaagcgcctggtgcgcgcgcagcaccgggtacgtctgttactcgcggaaattgacgagttctacagcaattacagggtcagtcgcgacctgatcgaattgcgcaacctggcgaccgtggcggatctgatgatccgctcggcgatgcagcgtaaggaaagccggggcctgcatttcaccctggattaccccgagcagttgccgcaagcgacggatactattctggttccgcccacctacggcgactgaatttcagcctgagccgaaagcgccgatgctcatcaggcgacattgccccacgtggaatgcacaggccacgcacgaaccagccaccttgaaccctgaagcgcaggatcacgaagagtggcaacgccaggctgtcaggccgcaactggacgggctgccagccggcactacggctccagagcgcccagccttgctgatcgtggcgaaggccgagccaggcggtgtctcgactcagcagaatgtgcgacgggaccacccaggcggcatgtagcaggcacaacgacaagccaagcatctgcagccaaaacggaactggcagcacgagcagcgtgacgaccgccaaaaccaataccgccagataaagtgccagcaacaggccagaggtttgccagcggcactcgaacagctggctacttgggctggacacgatcgaggatcatgcgaaccatgtaacgcaggtcgtcgtcctccggctcggcgcgctccatgaaccagccgaacatgtcctgatcctcgcaactgagcaatttgcggtagcgacgctgatcttcttcatccagctgcgggtaaacctccttgacgaaaggcaccagcagcacatccagttcgagcatgccacggcggctctgccagaacaggcgattgagttcggattgttcgaccatgcaaagaggctcctgaaattaagccggcattatagcgactggcgcacccggccggcacatcccttggcaggcgttgcgaagtgtcagctgaggcacgctgcgttttgccaacctcctgctatgatgcggtccggtttacttcacggcgacccgtcatgactgacactgcttttttctgcgtcctgtcgcacgaaggcatcctggccgtacgcgggccggacgcgagcaaattcctgcagggccaactgacctgcaacctcaactatctcgacgcccaacactcgagtctcggtgcacgctgcacgcccaagggacgcatgcagtcgagctttcgcatcctgccggaaggtgacggtttcctgctggcaatggaccgcgaactagtaccggcgcagctcaccgacctgagcaaatatgcggcgttctcgaaatccaaactgcatgacgaaagcggcgattgggttcgcttcggcctcagcgagggcgatggcgtcctgatcagtctcgggctggacttgccgcaagccgccaaccagatagtcagcgctcattcgatgatcgccgtgcgcctggccgacggccgcgccgagctctggacccggtcgtccgatgccgacaccgtgggtcgacgactggccgcgcagttgcctcaagcgccgctcgatcgctggctactggcgcagatccgcgccggtattggccaggtgctggcaggtactcgtgagatgttcatcccgcagatgatcaatctgcaggcgctggacggggtcagcttcaagaagggctgctacaccggacaggaaatcgttgcgcgcatgcagtatctgggcaaattgaaacgccgcctgtaccgccttgccgccgaaagtaccgacaccgaggtgccggcacccggcctcgaactgtactcgccggtccacggatcgagcgtgggcgaggtggtcctggcggccagcgcagaggggacgctggaactgcttgcggtattgcaggaggatgcggccgccgatggccgcatctccctgggatcgccagacggctcgccgctcacgctgctcgacctgccctacacgctagacgcggaccgagaaatccagcgctagtccctgcctgcaacgcaacagaatcatcgataaggaacgacatgagcactcttgccgagaaggtccagcgggacttgatgcaagcgatcgaaaacgacgaactggtcttgccgacgctcccggaagtggctctacgggtccgtgaggccgccgaagaccctgacgtgagcatcccgacgctggcgaaggtgatcggcaatgatgcagccctgacggcgcgcatcatcaaggtggtcaacagcccactgctgcgtaccaaccgggaaatcaacgacctgcagatggcgatcagccgcttgggcatcaactacacctccaacctggcaaccggcctggcgatggaacagatgttccaggcgaccaccgacgtcgtggaccgcaagatgcgcgaggcctggaacaagagcacggagatcgcagcgatcagccatgtgctgtgccgcaatttcacccgcctgccggccgaccaggcgactttggcgggcctggttcatcagatcggcgtgctgcccatcctgacttatgccgaagagcacagcgcactgctcagcgactccataagcctgaaccacgtgatcgatcgcattcatcccgtcatcggcgaaaagattctgcacgcctgggagtttcccgattcgatcgccgtggtaccgggccagcatctggatttttcccgcgtatcggacaaggtggattacgtcgatatcgtccaggtcgcgacgctgcagagccatatcggcacctcccacccctatacgcagctcgactggaaccagattccggcattcgccaagctggggctcgatccagccacgctgctccaggaagatgaagacctgtccgcagcgatggatgcggcgatgagcatgttgcagtaactcttcccctcgcgcgggtgccttccggcacccgcctgcctgcttcaaccgatgcgaccgttctcctaccgctcgccggggcgcaggaacccctgccagcgactcccagtcacaaatatagacggcgctcttgccgcatcttgcttgtgccactggtcctgcctcggcaccgcatcgacttgtcagtagatgaaggagaacaacatgacgaccaaagctttcctatcaggtaccgcagcagtgctgttcggtgtagcggcgaacttcgcgctggccgcagagggtgaaaacttcgtcgacgaggcctcagccaagggcatggcggaaatagaaaccgccaagctggcactggacaagggcaccgccgaggacgtcaagaccttcgcgcaaaagatgatcgacgatcacaccaagtcgaatcagcaacttgccaagcttgccggccagaatgacgaccttgaaatgtcagacgaagcgacgctgatggacaaggccaaggccatgatcctcaaactgcgtgatggcgaaaacttcgatcaggcctatgccaacaatcaggtagtggcccacgaacagaccatcgagctgtatcgcgaatacgcgaagaacggtgaaaacgccgagctcaagcagttcgccgaatccacgctgaaagagctggagcagcatttgcagcacgcaaaggaactggcctccaagcacggtagcaagcagtaagcacaatgcctggcgcttcggctgcggcgccaggctcacaccacggacggtaacgtccagtcgatcggcgccaatccttgctgtttgagaaactggttggcccgactgaagtgcccgttgccaatgaatccgcgatgtgccgacagcggcgacggatgaaccgacttgagcaacaggtgcttggttggatcgatcagcttggctttgctctgcgcatgagcgccccaaagcatgaacacgacgctcgagcgcctttcgctgaccagctcgatgatcctgtcggtcagccgctgccagcccatcttggcgtgcgaccctgccattccttgctcgaccgtcaatgaagtgttgagcatcagcacgccttgatccgcccaatgctgcaggtaaccatggcgtggaatctccagattcaggtcgcgcttgagttccttgaatatgttctgcaacgacggcggcggcgcaactcccggctgaacggagaagcacaggccatgcgcctgcccgggaccgtgataaggatcctgcccgagtatcacgacccgcacttgctccaatggcgtcgagttcagcgcgttgaagatcaacggacccggcggatagatgacctttccagacgctttttcacggcgcagaaaatcgccgagctcccgcatgtagggttgttcgaattcgtcgcgcaaggcgcttttccagctgtcttcgagtttgacgcgatcaccttgattcatggagctgccctggtatgccgaggcgctgaccctaaggaaagctcagcaacgagtcaatgcgagtcccggcagcacccaggcacggcagacgatatgaaaatgtcgcccaccgcacacttgcacgatcgcgcccgcctgtacgaccaatgagcaggtgacgggcagtacgggcgcgcgctaaaaaagcgccttgccaacaacaattacaaccaggaatcgccatgaaacggagcatcctgctggctttggggctgggcttctgcctggccgccgaggcggccgagccgatcacccttgggctcaactatccgcgcacgggcagctataaggaggaaggactgtcacagatgcgcggcgcactgctggcgatcgaagagatcaacgccaaaggtggcgtgctgggccgaccgctgaagctatcgagccgcaattccgcctcgcgacccgacaaggccgtcgccaacgtcgacaagctggccgacgaaggggttgccatgctgttcggcggcgcatcgagcgcagtcgccatcgccgccggcaagcgagccaaggagcgtggcctcctttatttcggcactctcacctactccaacgacaccactggcaaggacgcccatcgctacatgttccgcgagtgcaacaacgcctggatgagtgcacaggtgctggggcaatacctgaacgaacacctgcccgacaagcgctatttctacatcacctccgattacacctgggggcacaccagcgagagctcgctgcgccaggcaaccggcacccaggacaatcgccagcatccgggcatcaagacagcatttcccggcgcacgcctgtccgactaccgcgaagcgctgacccaggtcgccaagagcgacaccgaggtgctggtactggtgctcttcggcgaggacctggtgcgagccatgcggatcgccgacgagctgggcctgaacaagaaaatgcagatcgcggtaccgaacctgaccctgagcatggttgaaacggcaggccccgacatcatgcgcggcgtgctgggcaccgagccctggacctggcgcgtccccgagctcgaagggtcggctgcaggccagcagttcgtccagcgttacgacgagcgctatcagacccacccttccagctcggccgcttcggcctacagcatcgtctatcaatgggccgacgcggcgacgcgtgcacgcagcctcgacagcgagcggatcatcgaggcgctggaaggccatcgctacagcctgctcaaggacgaacaacagtggcgcaccttcgatcaccagaacctgcagacggtctacgcggtaagggtcaagccgcgcgaagacgtactcaaggatcggttcaagcaggactacttcgacatcgttcaccgtctgaccggcgagcaagcggcaccctcgctcgccgcatggcaggcggaacgacgcgcggccggccaaccgctgacgcttcaatgaccgacggcggacggcacgggcatttccgcaacgccctgtgccgtcccgcttcatgaccgatggctttcgccgcgagggccgactcgcgcggcactggggccgcgtcgcatctcatctgcaatcagcgcaccccttccctgccgctgcccgcttgcaacgtacgagctatttgcctatctgatacagaccaatcgcagtaatcctgacgaggatgatcacatcatgagcaacactgccgttgaaccctacaaatctggcgttttcgatctgacccacaagctgaccgtggaaaaacacggccacaccgcgctgataaccatcaatcatccgccggccaatacctgggatcgtgagtcgctgatcggcctcaagcaggtggtcgagcacctgaaccatgacgacgaggtttatgcgctggtcatcagcggccagggcgagaagttcttcagcgcgggagccgacctcaagctcttcgccgacggcgatcgagcacgcgcacatgagatggccaagcgcttcggtgaagccttcgaggcgctgcgcaactttcgcggtgtgtcgatcgccgcgatcaacggcttcgcccttggtggcggcctggagtgcgcactggcctgcgacatccgtatcgccgaacagcaggcgcagctcggcctgccggaagcttcggtcgggttactgccctgcgcaggaggcacccaggcgctggcgtggctggtcggggaaggctgggcgaaacggatgattctctgtggtgagcgactgagcgcagacacggcgctccgtatcgggctggtggagcagatcgtggaacccggcgaagcccgcggacacgcccttttgctggcttcccgagtcgcgcgtcagagcccggtcgcggtgcgcaccatcaaaccgttgatcgactccatgcaccgccgcggcccagcgcaacaggcctcggccgagcgcgaggcgttcgtcgacctgttcgaggcgcaggacacgctggaaggcgtcaacgcattcctcgaaaagcgcgacccgcgctggaggaactgctgaaccggccggcctagaagcctgacgaacctcagatagcgtcccggcgcggcaggccgggcgcagtctgacacccctctgcgccaggaatcggcagagcgtctttaacggcgcggctggcgatcgccgaaatcgcgcgggtacattcgcaagtcccctcggtcgcggatcagcggcgaccggccgtactgctggggtcgatcgtggtgccagcgctgcggacgatcgatgccggacctgccacggtcattccaatgccgacgatattcaccgtgacgctggtgcctccagctctgcgggtcggcctggcggtgtcggtcgtagtagcgcggagggagctgcccctggtagcgtggcggcaggttctgtggatattggcggtattgcggataagggctgcgggggtcgtactggtaggcgcggctttccacgcgatagctgccgccatccggctggtaaacccacacaccacctcgcgaatccgcacacgcctgcgtcacgaagcccatgaacagcagcatgatcgccatcggtatcttcatcgaacacctcctggccgctctgcctgacagctgcggcctttgacatctgaccacaacgaacggccgtctggcattcatgccgaccgcaggtgcgtatccatatgtgtcaccgagccgcagcgcccgcggggcctgtgaatggctacggccttgtatggctgccgtgggttcccgataatagcggccttttagcctcggctcgtgcagagcgccacaggaacccgcgatgaccgaactcgccctgatcatggttagcgccatcctggtcaacaacttcgtgcttgtgcagtttctcggtctgtgcccgttcatgggcgtttcgaagaagatcgaaaccgcaataggcctttcgctggccactaccttcgtgctgacgctagcagccatgtgcagctatctggtgcaacagtatgtgttgaaaccgctggacctggagtttctccgcaccatcagcttcattctggtgattgcggtggtggttcagttcacggaaatggtggtgaacaagaccagccccctgctctatcgtgtcctgggcatcttcctgccgctgatcaccacgaactgcatcgtactgggcgtcgccctgctgaatgccaacaaatccgaattcaccttcattaccgccacggccaacggttttgccgccggcctgggcttttccctggtgctggtgctgttcgccgccatgcgtgagcgcatcgccatcgccgacgttcccaaatcgttccagggcgcagccatcggaatgatcacggctggccttatgtcactcgcgttcatgggcttcagtgggttgatcaagctatgagtctggtcgtaatcgccgtgctcgcgctccttgcgctgtgcctgatatgcggggcgatcctcggattcgccgcggttcgctttcgtgtcgagggcgacccgatcgccgagcagatcaacgcgctgctgccacagacccagtgcggccagtgcggctatccaggctgcaagccctacgccgaggcgatcgctggcggcgacaagatcaacaaatgtccaccgggtggcgagtccaccatccaggccctggccgacctgctcgatgtcgaacccgagccactggatgccgtcgagggtgaggtgccaccacgcgtcgcgtatatccgtgaggccgagtgcatcggctgtaccaagtgcatccaggcctgcccggtagacgcgatcgtcggcgccgccaagcagatgcatacggtgatcgtctccgaatgcaccggatgcgacctctgcgtcgagccctgcccggtggactgcatcgacatgatcgaactcggcagcaacctgcagagctggaagtgggagcaacccttgatgcctggccagctgatcgccactgaccgggagcaggccgcatgacttcgctgaacatctgggacatccacggcggcatccatccgccggagcgcaaggagttgtccaaccggacgcccgtccagcgaccgcccgtgccggcgaaactggtggtgccgctcgcccagcatctcggcgcaccggccgaaccctgtgtcacgcttggcgaacgcgtcctcaagggacaaaagatcgccgaggccagcggtttcgtcagcgcaccggtgcatgcacccacctccggcatcgtcagctacatcggcccgcaaccctacccgcatgtttccggcatgctgagcgccgccatcgtcatcgacagtgacggccaggacgaatggaccgagctgcgaccgcaggcggattaccgggccatgccggccgaccagctgctggaaaccatccgtcaggccggaatcagcggcctcggtggtgcgggctttccgacggcagtcaagctcaccgccccgcccagccagaagatccgcacgctgatcatcaacggcaccgagtgcgaaccctacatcaccgccgatgacctgttgatgcgcgagaaggccgctgagctcgtcgccggcatcgaaatcctgacccacctgatccaagccgagcaggtgctgatcggcatcgaagacaacaagcccgaagccatcgaagccgtacgcacggcggtcggcaagcgtgactttcagatcaaggttttcccgaccaagtacccgtccggcggcgagaagcagctgatccagattcttaccggagaggaagtacccagcggtggcctgccggccgacatcggcatgctctgccagaacgtcggtacctgcgtggccattcacgacgccgtactgctgggcaagccgctgatctcgcgaatcaccaccctgaccggcgaagcgctggcacgcccgatgaacgtcgaggcgctgatcggcaccccggtgagcgagctgctcgcgttcgcagggctcgacactggcaagctcaaccgcctgatcatgggcggcccgatgatgggcttcaccttgccatcaatggacgtccccctggtcaagaccaccaactgcctgctggccacgaccctggctgaactgccaccgccgcctccggcgttgccgtgcatccgctgcggcgaatgcgcggaggcctgtccggccaacctgctaccgcagcagttgcacttcttcgcgctaggccaggagcacgatcagctcaaggcgtacaacctgttcgactgcatcgaatgcggcgcctgcgcctatgtctgcccctcgagcattcccctggtgcagtactaccgcgccgccaagggcgaaattcgtgcgctggaacagaaacagcagaaagccgagcattccaaacaacgcttcgagctgcgccaggagcgcctgcgacgcgccgaggagcagaaggaagcagaccgcaaggcgcgggccgagcgcgccgcacgcgccaaggcagcccagacggaaaccagcgcgccagccaacctggacgatccactctcccgcgtgcaggcgaacaagacggggctgtcggaggagcagaaaaaactcaagatcgaagcgagcatggcccaggtcgccctgaagaaagcggagaagcaactcgccgcgcatgcgacagccgaactcgaggcccaggtcgccgagctgcgcgaggcggccgcgacagcgcagaaggccctggacgagaccatggcgctcgcgcctccgtcatcggcagcacccgccccggcaaacagcgacgcggccaagaaagccaagatcgaagccgccatgctccgcgcgcaactgcgcaagctggagaagctggaaagccccgacaccgaacagcaggccgagctgacccgccttcaagcgcaactcgccgacgccgaaaaagcattggccgaggcacagggcagcgcagccaccacggcgccggccaagcccgccaatgacgatgtattgaagaaagccaagatcgaagccgccatgctccgcgcgcagctgcgcaagctggagaagctggaacgccccgacaccgaacagcaggccgagctgacccgccttcaagcacaactcgccaacgccgaaacggcgctggccgaagcgcagggcagcgcagccaccacggcgccggccaagcccgccaatgacgatgaattgaagaaagccaagatcgagctcgcgatgaagcgggccgaactgaagaaagccgagaaggccggcgcagacgacaccgagctgagccggcttcgtgatggcctggccagtgccgagcaggcactgcacaaggctgaagagaactgcggcaagcccgcgccggtgctcgttcggcatgacaaacgcccgctggacgaccagacccgcatactgaaaaccgatgtggcctacgctcgcgccgacttgcgcaagctggaacgcgatgcggccagtgacgccagcgcgatcgaggccgcccgggcgcgactggatgaagccgaacgcaaattgcaggcacataccgattcgttaggggccgaagcgccgccggcgtgaccgtcctggggcggcgccgctgccctacactgcttaaaccggagagccaatggccctgccccgcatcacttcaccgcataccaagggaaacaaccgcacccagcgggtcatgttgctggtgttggccgcaacattgcccggagtcgtcgccctgacctggctgtatggtgccggcaccctgatcaacctgctctgggccagcgtagtggcgcttaccgtcgaggcgctgatcctcaagattcggcaacgcccggtggccttctttctacgcgacggcagcgcactggtcaccgccgtgctgctggcactggcgctgccgccttactcgccgtggtggctcacgctgatcgccaccggtagcgccatcgtgtttggcaagcagctttatggcggcctgggtcagaacccgttcaaccctgcgatgatcggctacgtggtggtactggtgtccttcccggtggagatgaccacctggcccgtgccgcacagcgtcggtgttggcgccgggttgcagcatattctcggcatcgcctcgctgcccgacggttgggcacaagccacggcactcgatgtgctgaaggtcaacaagagccttacggtcgacgagctgtgggccaacccggcgttcggtcacttcggcggcatcggctcggaggtggtgaacctggcattcctggccggaggcctgttcctgctgcacaagcgccttttcagctggcacgcgccggtcggcatgctcgccgcgctggcgctcatgagcctgctgttctggaacggctccggatcggatagtcacggctcaccgctgttccatctactcagcggcgcgaccatgcttggcgccttcttcatcgtcacggacccggtgagcggcgccaccagcaaccagggccggctgatcttcggcgccggcgtcggcgtgctggtgtatgtcatccgcgcctggggcggttatccggacgccgtggcgttcgccgtgctgctgatgaacctggccgctccgaccatcgactactacacccgcccgcgcacctacggccaccgcaaggccgggcgcggcttcaagctgggcgaatgacatgatccttcctgaactcagccgctcgatgctcaagaacagcctggtgctgggcctgttcgccgtggtcacggtcggcgcggtaacccttctgcagcagttcaccgccgagcgcatccaggcatccgagcgtgccgcacagctaagcgccttgaacgaaattctgccccgcggcagttacgacaaccaactgctcgacagcagcatcgaagtgcacgacccgctgctcggcacccgcaagccgctggcggcctatatcgcccgtaaggatggcaagcccagcgcggtgatccttcaggccatcgcgcccgacggctacagcggcgcgatacggctgctcatcggcgtacgagcggatggtcggatagccggcgttcgcgtagtcggccaccgcgagacacccggcctgggtgacaagatcgaactggccaaaagccggtggatacgcagcttcgacgaccgttcgctgagcgatccaggcgagtccggctgggccgtgaagaaagaccgaggcgcattcgaccagttcgccggtgccaccatcacgccgcgtgcggtagtcggcgcggtgcatcgagccctgcaatacttcgaggcgcacaaggccgagctgctccatgccgacggcatcccggcggcgcctggcgagacgctcgacgagcacgtcgaaccggcgccagtgaccacgcactcacgcgcgggcgacgcagccgcccgcgacgagctgcgaatcgatgagccgcagcccgcacagaaaggtcagacaccatgagcaatcccagctaccgcgaactgagcgtcaatggcctgtggaagaacaacccggcgctggtccagctattggggctctgcccgttgctcggagtgagcaactccaccgtcaacgcgctgggactcggacttgccaccgcactggtactgatctgctcgaacatcgccgtgtcgctggtacgcagcgtggtcaacaccgccgtgcgcctgccggccttcgtgatgatcatcgcggcgctgaccacttgcatcgaactgctgatgcaggcctacacctatgagctttaccagatcctcggcatcttcattccgctgatcaccaccaattgcgtgatcctcggccgcgccgatggcttcgcggccaagcacaatccgctgatcgcggcctacgacggcctgctcatggggctggggttcgcgttggtgctggtcgtcctcggcgggctacgcgagctgttcggtacaggggccgtgttcgccaatatgcacctgttgttcgggccggctgccgcagactggcaaatcaccctgttcagcgactacaaaggcttcctgctggcgatcctgccgcccggcgccttcatcgtgctcggcctgctgattgcgctgaagaaccgcatcgatctacaactggccgagcgcgccaaggccaggcagccggtcgagccggtgcaaagccgtcgggtacgcgtcaccggggtgatcgaatgatgcgaggaggacccgcccgatgaacgccgcgaaacgtcgggagatctttcgccgctttcacgaagacaatcctgagcccaagaccgaactggcatacagcacgcccttcgagctgctgatcgcggtgattctctcagcccaggccaccgacgtcggcgtcaacaaggccacggccaagctgtatccggtcgccaacactccggaagcgatttacgcgcttggctacgacggcctgtgcagctatatcaagaccatcggcctgtatccgagcaaggcgaagaacgtgctcgagacctgccgcatcctgatcgagaaacacggcagccaggttcccgacagccgcgaagccctcgaagcgctgccaggggtaggacgcaagaccgccaacgtggtactgaacacggcgtttcgccagttcaccatggccgtcgatacccatatctttcgtgtcgccaatcgcacgaacatcgccccaggcaaaaatgtgctggaagtcgagcgcaagctgatcaagttcgtcccgaaagactatctgctcgacgcccaccattggctgatcctgcatgggcgctacgtctgcaaggcacgcaagccacaatgcggcagttgccgaatcgaggacctctgcgagtacaagcacaagacctcggacgattgatccgccccggcaaaaagctgcccgctgattgaaaaaatcttttttacggccatgttttttgtcgctataaggagcgccaacagcgcgccttagccgtggagtgagacaagtgtccgagaaagaagatatccagattgaagacgacttcgtcgcagacgacgaagacgatactgcagaggccccggtcgaagtggccaagaccaacctgaccaagcgccggattatcgacaatctgctcgaagaacgccgcctgcagaagcagctcaacgagttcgacttcgacctctgaaacgaaaaagccccgaacgtcggggcttttttatgcgctgtcgatcaatcgcggcgagacggtgaaagcagttccaccttgtagccgtctggatcctcgacgaaggcgagaatactggtgccgtgcatcatcggacccggctcccgggtgatcttgccgccgcggctgcggatgtcctcacacgccttgtagacgtcctcgacttccagcgcgatgtgaccgtagccattgcccaggtcgtatttatcgacgccccagttgtgggtcagttccagcacactgttgtgcgcctcatcgccatagccgacgaacgccagggtgaacttgccgtccgggtagtccttccggcgcagcagggtcatgcccagcacttcggtatagaaggcgatggatcgctccatatcgccgacgcgcagcatggtatgcagcagtctcatggtgttttctcctcatcgacaaggcatttagcggtgcagaaaacacaaccccggctcgtggccggggtcatggtcaggcatcgggcaggcgacgttagaactgcgtccgacccttgttcgcggcgatgcgcatgcgcagcgcgttgagcttgatgaagccaccggcgtcggcttgatcgtaagcgccggcatcgtcctcgaaggtagcgatgttggcatcgaacagcgaatcgtccgatttgcggcccgtgacgatgacattgcctttatagagtttcagacgcaccacaccgttcacattgatctgcgaggcgtcgatcatctgctgcagcatgctgcgttccgggctccaccagtagccgttgtagatcaggctggcgtacttgggcatcagctcgtctttcaggtgcgccacttcgcggtcgagggtgatcgactcgatggcacggtggcccttgagcatgatggtgccgccgggggtttcgtagcagccgcgcgacttcatgccgacgtagcggttctcgacgatatccagacgaccgatgccgttctcgccgccgaccttgttcaggtaggtcagcacttcggccggagtcatctctttgccatcgatggcgacgatgtcgcccttgcggtaggtcagctcgatgtaggtcggcgaatccggcgcggtttccggggacttggtccagcgccacatgtcctcttcgtgctcggtccaggtgtcttccagcacgccgccttcataggagatgtgcagcaggttggcatccatggagtacggcgacttcttcttgccgtgacgctcgatcgggatttcgtgcttggccgcgtagtccatcagcttctcgcgcgagagcaggtcccattcgcgccacggagcgatgacctttacgcccggcttgagcgcataggcgccgagctcgaaacgaacctggtcgttgcccttgccggtcgcgccgtgggaaatggcatcggcaccagtctcgttggcgatctcgatcagacgcttggcgatcagcggacgggcaatggaggtaccgagcaggtactcaccttcataaacggtgttggcgcggaacatcgggaagacgaagtcgcgtacgaactcttcgcgcaggtcgtcgatgtagatttcctcgacgcccatggccttggccttggcacgcgctggctcgacttcctcgccctgcccgaggtcggcggtgaacgtcaccacttcgcagttataggtgtcttgcagccacttgaggatcaccgaggtgtccaggccaccggaatacgccaggactaccttctttacgtcggccattgccatccactcccgggattgtaaggaaagcgaggattctactggtcgcggcggtggttttacaggggcgcgagcgccgtccggggtcaggacgccggcgcgctgccctcggtagcggccgtggtggtcgcgggaccgtgctccaggcgcagggtgacccggcgattcttggcccgattggcttcgctgttgttgggagccaggggatagcgctcgccatgaaagcgcaccgtgatctgctccttcggcacgccattggcgatcagatactcctcgaccgcgagtgcgcggcgccgggacaggtcacggttggtgagacggtttccgctgttgtcggaatggccgtcgagctcgatgcgattgacgctgggatcggccttgaggaactgcaggatgatatcgagcttggcctggcccagcgcgtcgagcgctacgtcacccgccggaaagccgatctgggaacgacggatctggtcgaaattcaccggcagcagtttcgccgtgcaggtgcgaaaatcctcgtaggctttgctgaagcgcgccggcagcagcctgacctccagagcctcaccgccttgccgggtgcggtgacgcaccaccggactgcgtccctcgagcaaaccgctgagcaaccgtccggcctgcaactgcgaactgctgaacgggatgtcgcccgcgccgataaccgaaaccacacccaggttgatatcgctgcggtccggctgccagggcgcggccgcggccagcagggtcgccgatccgttgcccagccagcgatccggagactgcaaacggaagatcggctgttcgcccgccctgcgcacgaactcgcccaccccaaatccggccaccggctggatcagacgacattcgaactgatcgccttcgacccgccactgcgcccgctccagacgagtctggaaggtaagggcgtctaccgatgggcaagccagcagacagataatcgcaaggcagcgcaggcgcacgagcggctccataaaatatagggtctttcagggtatcggtggtctcgcgaaattcttgagccgcgcaggctgcggtcaggcgggctccggcgcccatttctgcgcagctagcgggtcctcgtccggcgagcccgtaggaagcaacggctctcactgataggacagaacgaattgcgccgagccgtgggcattgccgggcgtcacgacagattgggtctggatgtagcgagcgccgaacggtagagcgatggaagtggtgccggcggagccattccacatcaccttgggctgcagcaagaccatgggcgatgaggttcgggcgtcgatcaattggatgcccactccggttgcggcagggctcggtgacccggcagtggagagaacgcctgcggcagctgccgagggatagtcggcatcggccacggcgttgaactggatggtcacctggcttacgttgctgcaggcaccgaggcgtatggagaagggaacggtcggacccacgctgcccaccccggtgaagctggttaccggacgattgccgagcggtacggttatttgcgccgaatcggtttgtaccgtacaggtaggcgccaccacatcgaggcacaaaccgctgaccagcaccacgtcgatcacgtcgaggctgccgaagcgcaccgagcccatgcgggttccggcagcgatgcagtagcgaccggcctgcagacttcccgtcttccagaagtcgaccctctgtttacgcccggcatcgaaataatactgcccagccggggcgttcaacgagccatagggccggtagtaattgggcgggtcataggcctgggtgtcgctcaggctgtagcccagtccagggatctgggcgaactcatagatgggcccctgctcccccgacaataccggcgtgggcgaacccagcatgttgttgtacccggcttgttcggtgccgctgcacgaggttttccatgaaggcgctccatccgccccgccgacgtcccatacgcgctgcccgacggccgcgtaggtcacgttcatcgtgtagttggcgggcgtctgcacctgataggtcgttgggccagacaggccgtcgctccagttgcattcggcccaggcgatcgattgcagcccccatcctagaagcacggcaagcaggatcttgttcatcaccgggactcctccgtatcggctgctggggaaggtgccctgccctcacacacatgtcgcccaggcaagtggatcagcccctcttgctccgccccaagacggtaaggaatgtggcaacggctgttagcgtcggcgccccagcgtaccgacaacacgccgtcagggctggagacacgcgcgtagagctggcccgcctgaccgacgactccgaccctgacgcccttttcgtcgaacacgtcggcgccgaagggggccgctttgtcatcccagctggcgtccagcaggatcgagtagcctttaagggcaacgaagaacgccgataccgccgcgccggcatcgggaaccagccactgcgcggtttccgtgagctccacatcgtcatccaacccattcgtatccagccccacccggtttgcctggtagggtgtcagatacggaacgatggcatagccgtcctcgctgacctgcaacccgcgccaccctgccaccttggctcctgtcgcattcggtgccttgatgatggcgaaggtatcacccaacgcgggaacccattccacgccaccggcgtgcgcgaccatggcccccttggcgccgagggtcatctgccgctgatgctggttgtcctggctgaggccgacatcgtaatcggcaacggccgcccgatagccgagattgaccccaagggcgccgaggccatcggcatccggccggtcccgatggctggccatcacgctgtagatgtattgcgagtcatcgccggcgattccactgagcacgctgttgagctgcctctcgccgcccctgccttggctcatctgcatggacaggtgtccagctcccagcgaagccttccgaccgaggggcatgttcaaggtcagtccgaggaccgactctttgttggctagaccgccatccatacgctgcacggaaagctggtaacccaccgacttccagcggtcgctgtaaccgagttggtaagtggtctggcggtcttctgcgtcccagaaccactggcggctccccagcagatacaggctgccgtcatacagcggcaggcttaaactcagatccgcccgctggcgcagacgcaaagggccagccaggtccagcgagccgtgctcgaatggcgatagcgcctcgcgtacgccgtagtagtccgggctggaatgacgggtcagggtggccgagacgaacgtctcgcccactcttcgcgaccaacctagacggtagcggtcaccctccgaacgcccttcaactccagcgaagcggctgcgggtccagtcgaaggagatcgcccccagcggagcattccaggccgagccgagcagaagcgcctgatagtcctcgctctggagcagcccgccatatccggtcaccagactgctcaagccgtgctgcaaggtaagcagcgtgaaactcggtgactcactggcgagttcctcatccaccttgccggcggtgagcgaatagaacgtctggccttcgcggatcagccccggtaccgatgaataaggaaccctaaacgtctgggtgctcccgtccgattcatggatggtcacctgcaggtccccggcatagcccgtcgaatagagatcgtcgatgagaaagttgcccggcgcgacgttctcctcgtatagcagcgtgccgttctgtcggatctccaccctggcatgggtcctggcgacacctcgaaccatgggcgcgaatccgcgctggctctcggccagcatccgcgggtcgctgctcagcgaaccgcccacgtaaccgaaggcatcgaagaactcacccccggtccagcgttgccccagcgacagcgaggaatgccactgcggcagggcacgataggcataactggcgatgctctgccattgacgctgctgcgggttgctctggaaattggcttggtggcgcagccgccaggcgccgacattggcacccatctgggtacccaggtaatggctccgatagtcaccgctgtcgctctcgttccagtagctattggcggcgtagtccacccaggccaccgcctcgcctgcatcccatcgcgacggatcgatccagtctctgggtctgcttatctgcaggctctgaggaacggtcaggtacagcgcaaggttcgacacgtcgtactgccaatgtagttgcgcgctgattttctcgatccggatgcaagcgtcaggatcgtccaactcgtgaggcggcagggcaacgtgctcagggtcgatgcgggccagttccaacagctccttgctcatgcaaggggcggcactgccgggcccggtgacatcctgcatgcgcaccgtttcccgctgcatgagtgaatcgttgacatagacatcgctgggatagtcaccggcgaagagcgggttgcccgttgcatagcgcttcaaatcgcgcgtcgccagccccggcagcagcaaggcttgattgaactggacctccttggcgaccacctgcgcaccgaagagcagtaacgccaggccaagccagcaacgcgctcctgtttgcatcgcgcacatccaaggcatcactcgctgaggtcggccttaagcgcttcgcgaccaccgtagtcgttcagatggctgtatgaaatttcgccctcggcaccgggaggaatcgccatatgctcgctggcataaggggccaacatcgttaccggcaacgcttgcgtgccaatccgagcctcgatcagcgtgatgtagtaagggcttgggttgcgcacgacgagccaggagccatcgcggcgccagaccaacttcccggcggcttccgactggctgtcaggctgaagcccaggcgggcgatagaacagcttgatgcgcgaacgcacggcgaactgcagataattctcggccaccgaccctgaatccggccgtggtggtacttcaagcacgttgagccagaacaggctctcccgatcgtgcggcaggtcggccccagtgaacatgatccgcagcgcctgggtcctttgcggttccatccgaaccaagggcggaatgatgacgaacggggcgggctgcagttgcgggtcggactggccatcgccttcgtcgacccagctttggaccagcaccggagaatcgcctttgttgatcagctcgacgctgacctggcgctggtcagcgggatagatgatgcgcgtaccaccgatgatgacgctcgcctgcgccgcagatatcgcccagcacaacaacacgcaaaggataaaccgcgacatgacctggattctccggcgagcgcgatgacgtgtggacacccgaagaatgcccactcgttcgtcagggataaacgaccgagaagagcgtgctggtgctcacggtcccaggcccggcggctccggtcgcgtgatactcggcgaaataactcaagctggcactgccgctgacgatcgaaacggtctgtgagttctgcgcggcagcgctgggctgattgagtccgatcgggaccatggagctgttcaacaggccgacctgaacactcgtagcggcaccggtattgttgagccgcccagtcgccatgtcggtatcggcgccgggctcgaaatagagggcgacattccccgtatcgggagaacagctggacagctccaccgtgaacggcgtgcggccggcggtttttccggcttgatccagtgtattggccatcacggtgggcaaggttacggtgtgcaggcctgcggtaccggaggtgactacgcaggtattcgcagtaatcatgccggttatctggacttccccatcggccgcgtgcacggccatcggcaggttaagtaaggcacaagctgcaaaaacggtcggtaacgttatagttttgaacatcgttctgggtctcactgctttttattattcatcccacacgctgcagcccttgggcattcgcagttctcgcatcatcaaccagtaatcagcgacgcacatcctccccacggacggccagggagggcgtagcgccagggcgcagagaacgcagaggatgaaatttcgcctacaaaggggcgttatgcctgcacttgctggcagtcggatatcgcgaaagcaacaaaacggaccgatacccaggcagcaccgccgaacgccgcttgctcgaagcaacgcatctacgtgtcagcgctgaatgaatcggcatgtcccgcgagaaccttcatcgagactgacaagcggttggcaagcgccatggaagcggggcggcgttaatggcggcatatagccacgcaaccaagcgtatcctcctaccgcccgtcgcctatcaatctgccgtcccgcccgcggcttcgagcgatgccctctcatacgagaacgcgcagacgaatgaaatcaccgggacgacatctctgtgatgccaagaggccaaacaccgatgcacctgtgcgtgccgccatggtccttttccggtagcattcccgcacgttttacccgcctggaaacccgtaatgtccgaccgactgaccctactgcgccccgacgactggcatattcacctgcgtgacggcgccgcattgccacacaccgtggcggacgcagcgcgccagttcgcccgtgcgatcatcatgcccaacctggttccgccggtacgcaacgccacggaagcggacgcttatcgtcagcgtattctcgctgcccggccggccagaaacgcgttcgaaccgctgatggtgctctatctcaccgacggcacgcagccagaggacgtgcgcgcagccaaggccagcggctatgtccatgcggccaagctgtatcccgccggtgcaaccaccaattccgcgtccggcgtgacccgcatcgacaatattttcccggtgctcgaagcgatggccgaagtcggcctgccgctgctggtgcacggcgaggtaacccgtgccgaaatcgacatcttcgatcgcgagaagtatttcatcgacgaacagctgagccgggtaaccgaacgttttccgaccctgaaagtggttttcgaacacatcaccactcgcgatgcggtgcagtttgtcgaggcggctggcagtaacgtgggcgcaacgatcacggcgcatcacctgctctacaaccgcaaccacatgctggtcggcggtattcgtccgcacttcttctgcctgccgatcctcaagcgcaacgttcatcaggaagccttgctcgacgctgccaccagcggcagccccaagttcttcctcggcaccgactccgcgccgcatgcgcagcacgccaaggagaacgcctgcggctgtgccggctgctatacggccttcgccgcgatcgagctctatgccgaggccttcgagcagcgccaggctctggataagctggaggctttcgccagccacttcggcgccgacttctatggcctgccgcgcaacaccgagcagatcacattggtccgggaatcctggagcgtgccgacccacttgccattcggcgagcacaacgtggtccccctgcgcgccggcgagaccctgcaatggcggctggagacacgcacatgagtgacgagcaattcgacgacgaactcgaaggcaacctcccgggcaaaccacgctcgcccatggcaagacgtttccgcggtttcctgccggtggtcgtggacgtcgagtgtggcggcttcaattgcgcgaccgatgcgctgctggaaatcgctgccgtcaccattggaatggacgagcaggggctgctctacccgcaggaaacgctttttttccgggtcgagccgttcgtcggtgccaacatcgaagcggcggcgctggaattcaccggcatcaagctggatcacccgctgcgcatggccgtgcccgaatcgcaggcattgaacgaaatcatccgcagcgtacgtaaggccgtgaaatcggcaggctgcaagcgcgccatcctggtcgggcacaacagcagcttcgatctgggcttcctcaacgccgctatcgcgcgctgcgatatcaagcgtaacccgttccacccgttctccagcttcgatacagcgaccctggccggcctcgcctatggccagaccgtcctggccaaagcctgccaggcggcaggcatcgacttcgacggacgcgaagcccattcggcccgctacgacaccgagaaaaccgccgaattgttctgcggcatcgtcaatcgctggaaagaaatgggcggttgggaagagttcgatgagtaagccgcgaggctgattccatcgtgcacaaacgaaaaggccagtcacgtgactggcctttttcgtcgtgcttcgcttaccttcgcttacagcggcttgccgcgattaccatggccgctgacgaaggcctgcatggccttcagatcgttagccagcacggtgcaacgctcaggccgctggaacagatcggccagatgcgcagggagctccagtgccttaccaacgcccgccttctgcacggcatcggggaatttcaccgggtgcgcggtggccagcgtcaccatcggcgttgccaggctacgacggcactcgcgcgcagcatggacaccgatcgccgtgtgcgggtcgagcaattcgccggtggcggcgaagacttcggcgatggtcttgcaggtctgctcgtcatccacggccagcgagtcgaacagctttctcgcctcggtccagcgctcctcttccaccgacagcttgccgctggctttgaaggcgctcatcagatcggccactgcggcgccgttacggccgtgcaggtcaaacagcagacgctcgaagttggacgacaccatgatatccatcgacggcgacagcgacggatgcaacgtatctttgtcatagcggttgccgctcatgaagcggtgcaggatatcgttgcgattggtcgccaccaccagctggctgattggcagccccatgttgcgagccagatagcctgcgaagatatcgccgaagttgccggtcggcaccgagaaagccaccgagcgcgccgggccgcccaactgcagcgccgcatggaagtagtagacgatctgggccatgatccgcgcccagttgatcgagttcaccgccaccagacgggtccccttgaggaaaccctggtcggcgaagctatccttgaccatctcctggcagtcgtcgaagttgccttcaatggcgatgttatgaatgttttcgccgaggatggtggtcatctgccggcgctgcacctccgatacgcggttgtgcgggtgcaggatgaagatgtcgacgttctcgcagcgacggcagccttcgatcgccgccgagccggtatcgccagaggtcgcaccgatgatcaccacacgctcgccgcgcttggccagcacgtagtcgagcagccggccaagcagttgcagagcgaaatccttgaacgccagggtcgggccgtggaacaactccagcacccactcgttgccgttcagctggcgcagcggcgccacagcactgtgcgcgaacacaccgtaggtctcttccagaatctgcttgaaatcggcatccggaatgctgccggcaacgaaaggtcgcatgaccttgaacgccagctcgtgatacggcaaacccgcccaggaggcaatttcctcgacggtgaagcggggcaggttctccggcacgtagaggccgccatcgctggccaggccggcgagcagcacgtcttcgaaattcagggttggcgcctggccacgggtgctgatatagcgcatgtttcaaaaccttcggttttggcttcaggcgtcaggctccgaggcttcaggcaactttgcctgcggcctgcagcccctagcctgcagcccgattaattgagctgttctacgcggatccgcaccacgctacccacgacgtcggagagcgactccagcgcggcaattgcatcgtcgattcgttgctcgatcaccctatgggtgacgagaatgaccggcaccaggccatcctggacctccgcctccttctgcatgatcgactcgatgttgataccacgctcggacaggatggtcgcgacctgggccaacacgcctggatgatccttggcctggatgcgcaggtagtacgcactttcacaggcgccgatcggcaggatcggatgcgcagaaagcgaatcgggctggaacgccaggtgggggactcggttgttcgggtcggtcgtcagcgcgcgcgccacgtcgaccagatccgctacgaccgccgaagccgtcggctccatgccggcaccggcgccgtaatacagagtcgaaccgaccgcatcgccgttgaccatgacggcattcatcacaccgttgacgttggcgatcaggcgatcggccggaatcagcgtgggatggacgcgcagttcgatgccggcatcggtgctgcgtgcgacacccaggtgcttgatgcgatagcccaacgcctcggcatagttgacgtcggcggtggtcaggcgggaaatgccttcggtgtaggccttgtcgaactgcagcggtacgccgaacgcgatggacgccagaatggtcagcttgtgcgcggcgtcgataccctcgacgtcgaaggtcggatcggcctcggcatagccgagcgcctgcgcctcctggagcacgtcctcgaaagtacggcccttttcgcgcatctcggtgaggatgaagttgcccgtaccgttgatgatgccggccagccagttgatctggttgcccgccaaaccttcacggatcgccttgataaccggaatgccgccagccaccgacgcttcgaacgcgacgatgacgcccttttcgcgggccttggcgaagatttcattaccatgcacggcgatcagcgccttgttggcggtgactacgtgtttgccgttttcgatggcggtgaggaccaattcacgggccaatgtgtagccaccgatcaactcgacgacgatgtcgatctcgggattgttcgcgacctcgaaaatatcggcggtaatcggggtgttaccggtgttgcaccttgggtttgcatgacgagccgcaatctgcgcgacttcgatcccacgcccggcgcggcgggcgatttccgcagcgttgcgctcgagcacattgaaggtaccgctaccgacggttcccagcccacagatgcccactttcaccggtttcaagctgcactccccattgccagcgaacgaccctgcacagcggccgaacaaaagagtcgcacattacgaagcgcgcaggatttagtcaaatcgaccgcacgggaaagcgcgctagtcagacttctcctgcaaccccaggcgctgatgccattgggcgagcgattcgtcgggatagccatcgaagcagcggtcttccggctccacctgcggttgcacccatgcggccttcgacgcaagcatgatgtgaacggattcgggagggctcggcaattcgctgtcgatagccgacgcgtgcggatggaccaggtctggccagttgggatcccacaaccagagggcactaccgcaaagcttgcagaaatgccgctggccatcgctgacacgggtttcgccggtttgcgtatcgaccatcctggcccggtagacagtcaggtattctcgcccttcgacgcgcagcgtccgatgatcgccacccaagttgatcgcatagccgccgcccccagccgtcttgaggcagatcgagcaatagcagcgcatgaacgggtatggctcgagcgactcgagcgaaaaacggacggccttgcagtgacaggaaccttcgagcttcatgttcgcacctcctcggtatgccttcaggctttgaacacgagcgaaggaacagttcagcgagtgacactcgcggcggcacctccatgagcgaaggcgccgcggtgcggcttacttgctggctttcagagcaagctcggcaagctggggtgcgggctgataaccgggaatgacctgaccatcggccaggatgatcgctggcgtaccctgcacaccgatctgctggcccattgcatactgggcagcaaccgggttatcgcattgaacgaccggcacttcttcgcgcgccttggccttgttcatcgcggcctgacgatcctttgagcaccagacactggcaagcgtattggcaccgtggctgcccatgccctgacgggggaacgccatgtagcgaacctcgatgcccaagcgattcagctcaggcacttcgctgtgcagtttctggcagtagccgcaatcggtatcggtgaaaaccgtaatgtgggtcttgggcttttctggcgcgaagaccaccatgtcgctggtcggcacggcatcgatcagcttggcgaccgaacgactctgcgcctgctccgtcaggttaacggcctggccgtccttgaactggaacatatagccctggatcacgaactgcccgtcggcgcttgcgtagagctggcgcccgcccttgagctggacttgatagacgccattcatggggctttccgcgattgcctcgataggcatatcgggctgaatggactgcagcgaatcacgaatggccttgtcggcgtcagcagccagagcaacggtgctgacggcgccgagggtcgcggcagcaaataaacgaatcacgcgcatggagtctccgggcgacttcgatcgggaaggcgcagattaacatagccgccatggcgcggcgcctggcgacgagattcgctcgtcgactttgtgggctgccgcgcaacccgcaacgctcgatcatccgcgagggtgatgctcggcatgcagcgcctgcaaccgtgcgcgagcgatatgggtgtagatctgtgtggtcgagaggtcgctgtgccccagcagcatttgcacggtacgaaggtccgcaccgtggttgagcaagtgtgtggcgaaggcatggcgcagcgtatgcggcgatatcggggcgcttatcccggcctgccgggcgtgcagcttgattcggtgccagaaggtctggcgcgtcatcacgtcgccacggcgactgggaaacaccacatcgctggccttgcccgcgagcaacgcatctcggccgtcgcgcagatagcgcttcaaccaatgcatggcctcctcgcccagcggcaccagtcgctccttgttgcccttgccgaaggtacgcagcacggcctgccgcggattgatctgctcgagggtcaggctaaccaattcggttacccgaagcccgcaggcatacagcacttccagcatggcacgatcgcgaagtccgagcgggtcgccaacgtcgggggcggccagcagcgcctccacgtctgcctcggacaaggccttgggcaacggccgcccgagctgtggcaggtcgacccgcaatgtcggatcgaccgaaatcaccccctcacgcagcaggaaacgatagaagccgcgcaagccagacagcagccgagccgtggaccgtgccttgtagccgctctgcagccgccaggcgagatgatcgaggattacctcacgccccgcgtcggccagccgtgcgccgcgctcgtccagccaaccattgaacagcgcaaggtcactgcggtacgcctcgcgggtgttgtccgaaaggcccttttcaagccagagggcatcgagaaagcgatcgataactggatcatcaagtgctggcatggcgattcatcgcaacaacaaacgcgcaagtgttccacaggcggcagctgctgatccagcgcctgccgcatggcatcgcgacgggtatgctctgccatccgctgcgcttccagataagccggacgaagccgtagaccttattcaggacggaacaatatccaaaaaaaagccccgcacgaggcggggcttttctgcaaggatcgcttctcaggaaagcttttccttgatgcgggctgccttgccggacagcgcgcggaggtagtacagcttggctttgcggacgtcaccacgacgcttgacgctgaggctgtcgaccatcgggctgtagtactggaaagtacgctcgacaccaacaccgttggaaatcttgcgaacggtgaaggcgctgttcaggccgcggttgcgcttgccgatcacgacaccttcgaaggcctgaagacgctcacgctcgccttccttcaccttcacctggacaactacggtgtcaccaggggcgaacggaggcagttctttggtcatctgctcggcttcgagcgcctggataatcttgttggtcatgctgtgctcctaaggcaggccgtcatggcgtgccatcgatacgttaactatcgtcccgctgacggatgtattccttcagcagcttttgttcttctccagaaagcgagcggctatccagaagatcagcgcggcgctcccaggtccttccgagggactgctgcaagcgccagcgccggatgtgttcatgattgccactaagcagcacctcaggaacacgcttatccgcatacacctccggtcgcgtgtagtgcggacagtcgagcaggccgtcggtaaacgagtcctcctcggcggaatcagcatgacccagcgctccggggagcaagcgggtcaccgcatcgatcagcaccatggccggcagctcaccgccggacagcacgtagtcgccgatcgaccattcctcgtcgacatacgcttcgatgaagcgctcgtcgataccttcatagcggccggcaatgaggattagcccctcttcctgcgccataccacggacatcggcctgtttcagctgacgcccctggggcgacaggtaaatcaccttcgccttgtcacccgcggcctgcctggcgtcggccaaggcaagctcgagcggcttgatcttcatcaccataccgggaccaccgccgaagggccggtcgtccaccgtctggtgtcgatcatccgtgtagctgcgaggattccagcatcgcagctggagcagcccctgcttcacagcgcgactggtgatcccgtagttactgatggcagcgaacatgtccgggaacagactgatgacctcgacacgaaagctcgacatgtcgctcagaagtccgcatcccattcgacgcgcatctcgcccgcatccagatcgaccttcaacacacaggggtcggtgtaaggcagcaaacgttcacgatcgtccagactgccgtcaaacggcttcaccacaaggacatcgttggctccggtctcaagcaggtgatccacccgcccaagcacctgcccgagctgattgatgaccgtcaggccctggagctggaaccagtaatagtcttcgccggtcaatgcaggcagttcgctacgcggtatgcagatctcgaagtcggcgtatgtacgcgccacttcacgatctgtcagcccattgagcgtagccaccagaatcttgccctggaggcgccccttgatcagctcgacctgcttgatctcgtcgcctcgcctgagcgtccagcgtcgataatccagcagattttcgatcgggtcggtaaaggaatagacctttacgtcgccacgcacgccatgcaccgaaacgatcttgccgatgacgataaggtcttcggccggagctgacgtcgcgttcatatacttaggcagcagccttggcagcttccttcagcagctgagcaacacgctcagacggctgtgcgccctggctcagccagtaagcagcacgctcctggtttacagagagcttcacttccgcacccgaggcgaccggattgaagaagccgatacgctcaacgaagcgaccatcgcgcgggttgcggctgttggtcacggtcaggtggtagaaagggcgcttcttggagccgccacgggcgagacgaatagttaccatgtgaacatcgttcctgtagtcggtacagcaaatctgaatgcagggcccaaggcccgaaaggccgcatattctaaggattatccggacttttgcaaatggctttttcaaaaacaaaggcaggcccccgcggggcccgatcgaagggcctcgccaagggcctgaaaatcagaacttgggcatcccaccgccggggaacatcccgcccatgccgcgcatcatcttggccatgccgcctttgccgctgaccttcttcatcatcttctgcatctgtttatgctgcttgatcagccggccgatgtcctgaacctgggtaccggagcccatggcaatacgccgcttacgagagccgctgatgatgtcaggattacgccgctcgacgggcgtcatcgagttgatgatggcctccatctgcttgaactgcttctcggccgcgccctgcgcattgcccatttgcgacagattcacgccaccgatcgaaggcagcttgtccatcaggccgccgagcccacccatgttcttcatttgctgaagctgatcacggaagtcctccagatcgaagcccttgcctttcttcagcttcttggtgagcttctcggccttctcccgatccatggtctgctcggcctgctcgatcaggctgagcacatcacccatgccgaggatgcgggaggcgatccggtcgggatgaaacggctcgagtgcgtcgctcttctcgcccatcccgaggaacttgatcggcttgccggtgatgtgacggaccgacagcgcggccccgccacgcgcatcgccgtcgaccttggtcagcactacaccggtcagcggcaaggcttcaccgaaggccttggccgtattggccgcatcctgaccggtcatggcgtcgaccacgaagagcgtctcggccgggttgatcgcggcatgcacggcctggatctcggccatcatctcggcgtcgatggccagacgtccggccgtgtcgaccagcaccacgtcgatgtatttgagcttggcctcgcgaatcgccgcctgagcgatctcgaccggcttctggctgacgtcggacgggaagaacgtcacccctacttcggcagccagcgtttccagctgtttgatcgccgccgggcggtagacgtccgcggagaccaccagcaccgactttttcttgcgctccttgaggaagcgggcgagcttgccgacggtcgtggtcttgcccgcgccctgcagaccggccatcagcaccacggcaggaggcaccacactgagggcaagatcctcgttggccgcgcccatcagctcttcgagctcggcgcgtacgatcttcacgaatgcctgccccggcgtcaggctcttggacacctcggtgccaaccgccctgtccttgaccctggcaacgaagtccttgaccacgggcaacgcaacgtcggcctcgagtagcgccatccgcacttcgcgcagggtgtccttgatgttgtcctcggtcagcttggccttgccggtgacatggcgaagcgtctgggaaaggcgatcggtaaggttttcaaacatgtgccgtgtccacgctggatgtggttaaggggccgattatagaagctgcgacccctgcgccggtaccccgctgtcgaggcttttcatcgcgacgccccgaccggcccggaagacagacgcacaggcggcccgcacgccgagcgcacccagccgcctgcgccattcacgcacttttgtgcgcccagggtttgtgccacactcagcgcctttcgagcctgctaacagacctatgcaccctctgctaccgagcctagccgccgcttgcctttacgcaggcgtcaccggataccagggcctgcgcctggcgcaacgcaccgtgccggacaaacgcctgcttttcgcgctgggcgcgctggccctactggcgcacggggtgagcctgttcattcagctgctgtcgcccagcggcctgcatctggatttcttcacggcctcgagcctgatcgccgcggccgtcatcctgctgatcctgctcgccttgtaccgcatgccggttgaaaaccttctgctgctgctctttccgctcggctgtctgacggtacttttcgctcagttcgcgccctccggtacagcaccggccattgccgaagaaccgggcattctggcgcatatcctgttttccatactggcttacggaatgcttaccatcgccgttttccagtcgctgctgctgctattgcaggaccatcatctcaaacacaagcacccctccggcctgatcaagaacttcccgccgctgcaaaccatggaaagcctgctgttcggctttctgcttgccggctggctgctgctgtcggcttcactgatctccggctggatgttcctggacaacctgtttgcccagcatctggtgcacaagacactgctgtcggtgatcgcctgggtggtctttggtctgctgctgtgggggcgacatcagcttggctggcgcggttacaaggccatccgctggacgctggcaggcttctgtctactgatgctggcctatttcggcagcaagcttgtccgcgaattcatcctgcacatctaactgcgcgcgacgaaacatcaacggaccctaggaacaccaagtggaacatctacaccccggcttcctggtcggcatgctggttttcctgcttttgtgctcggcattcttttccagctccgaaaccgggatgctcagcctgaaccgctatcgcctgcgtcaccgcgccaaggaagggcaccggggcgcaaggcgagcgagcgcgctgctcgagcggccggaccggctgctgggcacgatcctggtcggcaacaacttcgtcaatatcctcgcctcgtcgatcgccacggttctggcgatcaaattctggggcgaagccggcatcgccgtcgccaccatcggcctgaccatcatgctgctgatctttggagagataacccccaagacgcttgctgcgctgcgccccgaagcgatcgcctacccggtcagccttccgctgctgttgctgcagcgagtgttgtatccgctagtggctctgcttaactggatcagcaacggcctgctcaagctgctcggcatcgacctttccaataaaggcaacgacagcctttccaccgaagagctgcgcagcgtggtgcatgagtcgggcagcgacatgccgatgaatcgccagagcatgctgctcggcatcctcgatctggaaagagtcacggtcgatgacatcatgattccgcgcaacgaggttgccggcatcgatctggaagacgacctggagactatcgtgacgcagctgcgcacgacgccgcatacgcgccttccagtgtttcgcaaggacatcaatcagatcgaaggcatcgtgcacatgcgccagatcgcccgcctgctcagccatgatcagctgacccgggacagcttgctggaagcctgcaacgagccctacttcatccccgaaaacacgccgctttccacccagctggtgaacttccagaaacagaaacgccgcatcggtatcgtcgtcgacgaatatggcgatgttctcggaatcgttaccctggaagacatcctcgaagagatcgttggtgagttcagcaatcaggacgccttgcgcagccccgacatacacccgcaggaagacggcacgctggtgatcgacggcgcggcctaccttcgcgaagtcaaccgggcgcttggctggcagctgccctgcaatggccccaagaccctgaacgggctgatcaccgaggcgctcgaacacattccggacagcggcatctgcctgcagatcaatcagtaccggctggaaatcctgcaagcggcggacaatcgcgtcaaaagcgtgcgcgcctgggtggtagaggacagtcagaagccagccgacgacgcgccttgaagcgcgccgcccacgacccggtcgctatagccttgtatcgattgccgcagccgcccgtagcgccttggcacgcgcggcctcgatcgagctatcgcgcgccagcgcaacacccatgcgccgctgaccgctgacgcccggtttgccgaacagccgcaatgccgtgtccggttcggccagcgcctcggccaggtgaccgaagctcacctgttcggattcaccctgcaccaacaccaccgccgaggcggacgggccaaactgccgaatcgccggaatcggcagcccgaggatagcccgcgcatgcagggcgaactcggagagatcctgggaaatcagggtcaccagaccggtatcgtgcggcctgggcgaaacctcacagaaccagaccttgtcgcccttgacgaacagttcgacaccgaagatgccgcgccctcccagcccttccgttatggccagggcgatgcgctcggcctccgccatcgcgccgggcgtcattggctggggttgccaggattcctgataatcgcctttttcctgtcgatgcccgaccggctcgcagaaggtcgttccagatgaatggcgaacggtcagtagcgtgatttcgtaatcgaaatcgatgaacccctcaatgatcacccgccccttcccggcgcgcccgccagcctgtgcgtactcccacgcgccaaggatatcggcctcgccacgcagcaccgactggcctttgccggacgagctcatgacaggtttgatcaggcagggaaaccccagcgcggcgacagccgagcggcactcttccaacgaatcggcgaagcggtaaggcgaggtcggcagtcccagctcttcggcagccaggcggcgaatgccctcgcgattcatggtcagttgcgcggcgcgcgcgttcggaatgacggtgtagccctcgccctccagctccaccagcgtcgcggtggcgatcgcctcgatttcgggcacgatgaaatgcggcttttccttttcgatgaccgcgcgcaacgcggcgccatcgagcatatcgatgacatggtgtcgatgggccacctgcatggccggcgcgttggcatagcggtcgaccgctatcacctccacccccagtcgctggagctcgatgagcagctctttgccgagctcaccagagccacagagcagcacacgtgtagcgctggccgaaagcggcgtacctattcggggcatgtcattcctcgtaacgcagacagtaaagaaattcccgtgccgatatctcgcacgtcagccttaaaagagcagcccgctcgaacgggcccgctcgtgacaacgctggagcacctgacgccgctcccggttgtccatgcggccccaacggcggatctcatcgatgctgcgctggcagcccgtacaacggtcgtgctcatccagggcgcagatgctgacgcaaggcgaggcgaccggtttgtcgtccaggctcaatcgtcctgctccgccaagtcacgcgcgtagcgctgggcgttgtgcacataatgggcggcgctggcctcgagcatctttttctgctgctcggtcagctcgcgaatgaccttgccgggcgagcccaccaccagcgagccatccgggatctccttgccttcggcaatcagcgtgttggcgccaatgatgcagtgcttgccgatcttcgcgccgttgagaatcaccgcattgatcccgaccaggctgtagtcgccgaccgtgcagccgtgcaacatcgcgttgtggccgaccgtcacgccggtacccagcgtcaacgggtgacccatgtcggtatgcatgacgctgccatcctgcacattgctgttttcgccgatatggatcagctcgttgtcgccgcgcagcaccgcaccaaaccagacgctggcgccggcctccaggcgaatcttgcccaccagcgtggcattaggcgctacccagctctgcggatgacattcaacacgggaatcgcccaggcgatatttcacggtcatgacctcttctggctcagatcgatataggaagcaggaggacggcgcatctcgattccggcgtcatagaccagattcaccagctcaacgatcatgatcgccgtcaagccccagatcttgtactcaccgtaccggtacgacggcacataccaggcgccgccctgataatcgatacgatgggtgacctcgcggacgtcctggcaaaaaaactccagcggcacggaaaacaccgaggcgatttctgcatcgttggcgcggtactcgacgtagtccgggacgatgccaacgaaaggcgtgacatgaataccgtgcagcgaaaccaggctactgagcggaccgacgatctcgaccattgccggcaccagacctacctcttcctcggcctcgcgcagagcggtatgcaccaggtcacggtcttccgggtcgcgccggccgccgggaaaggccacttcaccgccatgggtggacaggccactggcgcgaagagtcagcaccagctcaggcgaatcattgcgggtgatcggcatcaacaccgccgcctccggcattcggccttccggctccaggagatgcggggagtagtcacgcacccgttggagaatcttgtccagcatgaagcgtctcgttcaatctttgtcgagcatcatggcatgaatcacacaggcgcccaagacagacaaaccaaaacctggcgccgccggtacgccccgaatgcggcagaacgatacagcaactgtcgccggcaaacttttcgcggcacactggtgccaaccaacagacagttcagcgttcgaatggcgatggccggtatcattcacatgccgaaggaagcgagatgaaatactgcagccagtgtggcggctcgatcattgagcgtgtgccggaaggcgacaaccggagccgattcgtctgctccgcctgcgacatggtgcactaccagaatccacgtatcgttgctggctgcctgccggtctggcaagaccatatcctgctttgtcgccgggccatcgaaccgagacgcggctactggaccctgccagccggcttcatggagaacggcgaaaccgtccagcaggcggcggagcgagagacgctggaagaggcctgcgcccgggtcacgggcctgcagctttacaccctgttcgacctgccgcatatcaaccaggtttacatgttcttccgcgccgagctggtcgacgaaggcttctgcgctggcgaggaaagtcttgaagtcagactgttccgacaagccgacatcccttggtccgagctggcttttccgaccgtgggccgtaccctagaatactttttcgccgaccgggtgcagcagaccttcccggtgcgcaacgaagccatcgaagcaatgcgggtggcgcgcagacaggtctgatgccgtaaggatccaggaaaagctccatgcgctggttgttagcgatctgttgtttcacgtttgccaccctttcccatgctaccgccgcacccatgcttgatgactcgttcatcgacaaggtgctggtggtcaaatccgaacgccagcttcatctcatcagccgtggcgtgaccatgaaaagctatcgggtctcgctgggcaagcaaccgggccccaaggaacgcgagggtgacaagcgcacgccagaggggttctactggatcgactggcgcaagacgtccgacaagtacaacctggcgatgcacatctcctacccgaacgccaaagacctggcccgtgcccgtcgcgaaggcactcgcccaggcagcatgatcatgctgcacggcactccggtcgacgaggaatatcccgagtggttcttccacaccctcgactggaccgagggctgcatcgccctgaagaacgacgacatgcgtgaaatctggaacctggtcaagaacggtacgctgatcgagattcgcccctgacccacagcgccgaacttggcagcaggcgaggcagcgcgttaacgtgccaccatttcctcgccattcgaccgcccatgacgacgacatcctcggacgagcagttacagctggataaccagctgtgcttcgccctgtactccgcctccctgcaaatgaccaaggcctacaagccgttgctcaagagcatcggcctgacgtacccgcaatacctggcgatgctcgtgctatgggagcgcgacgggttgaccgtcggcgagatcagcgcccggctgctgaccgagcccggttcgctgacaccgctgctcaaacgcctggaggccgagggcctgatcaatcgcacccgaagaagcgacgacgagcgggtggtagagctgcatctcacggcagccggaagcgccttgaaagaacgtgcccgcaactttcccgcctgtatgctcgagtgcaccgggcagtcgcccgaagcgctgctggcactgcgcgaccagctcgcatcccttcgcgaagcactgctgaaacgcggctgagcgcacgcaagacactcattcgcggcaactcagccggacggaatcaggatagctttctgtatttatcttgtgcgataaatattggcgcgataatttatagcacacacatctcaagaggaacgatcatgcagaccatcaccgctctctataccgccaccgccactgctaccggaggccgtgacggccgcgccgtgtcatctgacggaatgctcgacgtcaagctgtccaccccacgcgagctgggtggccaagggggcgatggcgccaaccccgagcaactgttcgccgcgggctactccgcttgcttcatcggtgcgctcaagttcgtcgcaggccagcagaagcagcagcttcccgccgatacatcgatcaccggccaggtcggcatcggccagattcccggcgggtttggcctcgaagtccagctgaacgtcagcctgcctggcctcgatcaagcagtcgcagagcaactgaccgaggccgcgcaccaggtatgcccctattccaacgccacacgcggaaacatcgatgtgcgcttgaaggtcagcgtctgatcgtcgggatgaacaaaaaacccgagccgcctgtggcgactcgggctcttcattgcagcatccggtcagaactgcaggtcggacaaccgccagacctcgaatgcgggcgtctcgtatggatgggtacgtttgagggccttgacgctgtcatgaatcagctcgtcagccaccaccaactcgaccttccactcagagaccgagtgcacctgaccaagctgcccgagaaatggcctactgccttcgagcggtcgatactgcccgtgaccgagcacctgccagcagcagctgtcgtatgcgccgatccgccctgcgccggcggcgaaaaccgcctgcttgacggcgtccaagtggctatccgggacgtagaaacacagcttgtacatcaacctctccgcacaaaaaacgctcggcggagcacttccccgtcgacacgatcgcctcgccgaatccggtcggtaaggccgagcgcaactatcagacgttgccatccgagcttggttcacccgccatggtcgaccagatcacagatatgaaaaagcccggagcacctaaagcgcctccgggctcttgcgcacagcgcgacctcagtccacccagacccgcgcgttgcggaacatgcgcatccagccaccatcttcctgccaatcgtccggacgccaggagttggtcacggcgcggaacacccgctcagggtgcggcatcatgatggtcacgcggccgtcacgcgtggtcagcccggtaataccccgcggcgaaccgcccggattggccggataacgctcggtgaccttgccgtgattgtcgacgtaacgcagcgcgaccgtgccggagagatcggcctcgagcagtgcttcttcgctctcgaactcggcatggccttcgccatgggcgatggcgatcggcagacgcgaaccggccatgccctgcaggaagatcgagggcgaatcctggatttgcaccatggccacccgcgcctcgaactgctcggagcggttgcgcacgaagtgcggccacgactcgctgccgggcaccaactcgtgcagattggaaagcatctggcaaccgttgcagacgcccagggcaaagctgtccttgcgctcgaagaaggcactgaagtcctcacgggcacggctgttgaacaggatcgacttggcccaaccttcaccggcacccagcacgtcgccgtaggagaagccgccgcaggcgaccatacccttgaaacgctcgagactgatacgccccgcgaggatatcgctcatgtgaacgtcgaccgcagcgaacccggcacgatcgaacgcagcggccatttcggtctggccattgacgccctgttcgcgcaggatcgccacctcaggcctgacgccacgcttgataaagggcgcggcgatattctcgttgacgtcgaagcccagcgtgacgctcaggccagggttgtcttcctcgagcagcgcgtcgaactcctggtcggcgcagtcggcattgtcgcgcaggcgctgaatccggtagctggtctcggcccactgacgttgcagtaggcggcgatcgcctgcgaacacgtcggcgccctggaaccggatagccacgtgcccgttgttgaccggctggccgatgaccgacacgcagtcggccagacccgcggcgctgaattgggcgagcaccacttcggtatcgccctggcgcacctggagcaacgcacccagttcctcgttgaacagcgctgcgggaatctgcgccgcgtcctccaccagaccatcgaggttgaggttgaggccgcaatgcccggcgaacgccatctccagcgcggtggtcagcaacccgccatcggagcgatcgtgataggccaggagcaggccgtccgcgttgaggccctggatcaccgcgaagaatgcctgtagatcttcggcatcatcgacgtccggcgcctggcgcgccatctgcccgtacacctgcgccaggatcgaagcgcccatacggttctgcccgcggcccagatcgatcaagaccagatcggtttcgcccttgtccagccgcaactgcggcgtcagcgtctggcgaatatcgacgaccggcgcaaaaccggaaacgaccagcgacagtggcgaggtcacgctcttctctgcgccctcctcgctccagcgggtcttcatcgacatcgagtccttgcccaccgggatggtaatgcccagcgccgggcatagctccatgccgaccgccttgacggtgtcgtacagccgggcgtcctcacccggatgcccggccgcggccatccagttggcggagagtttgatgtctgaaatcttctcgatgcgtgcggcagccaggttggtcagggtttcgccaatcgccatacgccccgaagcgggcgcatcgagcagcgccagcggggtgcgttcgcccatcgccatggcttcgccggtgtagacgtcgtagctggtggcggtcacggcacagtcggccaccggcacctgccagggcccgaccatctgatcgcgcgccaccatgccggtgatgctgcggtcgccgatggtgatcaggaagctcttgctggccacggccgggtggtgcaatacgcgatcgatcgcttcgctcaggtcgacctgttcggcggcgaaatcgtcgccgagctcggcctcgcgcacagcgctgcggtgcatgcgtggcgccttgccgagcagcacattgagcggcatgtcgaccgggttgttgccgaagtggctgtcggagaccgtcagatgcggttcggccgtcgcctcaccgactactgcgaaggggcaacgctcacgccggcagatcgcctcgaaacgctcgagatcagccgcatcgaccgatagcacgtagcgctcctgggattcgttgcaccagatttccagcggtgccatgcccggctcgtcgttcggaaccttgcgcagctcgaagcgcccgccgcgcccgccatcgttgaccaattcagggaacgcgttggacaggccgcctgcgccgacgtcatgaatgaacttgatcgggttcttgtcacccagctgccagcagcggtcgatgacttcctggcagcggcgctccatttccgggttgtcacgttgtaccgaggcgaagtccaggtcggccgagctgctgccggtcgccatcgacgaggctgcgccgccgcccaggccaatgagcatcgccgggccgccgagcacgatcaacttgccgccgactgaaatatcggccttctgcacgtgatcttcacggatgttgcccatgccgccggccagcatgatcggcttgtgatagccgcgcacttcgtcgccatgcggggtgctgatcgattgctcgaaggtacggaagtaaccactcagcgcgggccggccgaactcgttgttgaacgccgcgccgccgagcgggccttcgatcatgatgtcgagcggcgtgacgatgcgctcgggcttgccgtacggcacttcccagggctgttcgaagccagggatgttcaggttcgacacggtgaaaccggtcagcccggccttgggcttggcacctcggcccgtggcgccttcgtcgcggatttcgccgcccgagccggtggccgcacccgggaatggcgcgatggccgtcgggtggttgtgggtttcgaccttcatcaggatgtgcaccggctcgcggttggccgcgtattcaccggtgtccggattcgggtagaagcgcccggccacgttaccgacgatgaccgcggcgttgtccttgtaggcggacagcacgccttcgccgtgcagctgataggtgttcttgatcatgccgaacagggacttgtcctggctctcgccgtcgatgtcccagctggcattgaagatcttgtgacggcagtgctcggagttggcctgggcgaacatcatcagttcgatgtcgtgaggattgcgccccagatcggtaaagctggccaccagataatcgatttcatcttcggcgagcgccagccccaactccacgttggcccgctccagtgccgcgcgacctccgccaaggacgtcgaccgccgtcagaggcttgggctgggcgtggctgaacaggttcgcggcgtcttcgaaacgctcgagcaccagctgagtcatgcggtcgtgcagcgctgcggcgatttgccgagcctggtcatcggacagctctccggccacgtaataggcgatgccgcgctcgaggcgttggatcttgtcgagaccgcagttgcgggcgatgtcgctggccttgctcgaccatggagaaatcgtgccgaaacgagggatcaccagaaacagccgaccggcaggctcctgcaccggtacgctcggcccgtacttcagcagccgggagagcacacgctcttcatccgcgccaagcgtgccggatacctcggcgaaatgagcaaactcggcatacaacccgctcacggcggggaccttctcggtcagttgcgccaggagcttgccgtgacggaaggcggaaagagcgggagcgccgcgcaggatcaacatcgtcggaacagcctcggggaggggagcagtcgggccgcgtattctagcccatgacggccgtcgaggctaagcctgctgcaagcgggcgctcgcagctgtcgatcagccagcagcgtgagggcagaacatcgccggctggccgtccgcaggaccgcagggagccaggcgacgttccgcttccgttccgcaacaatcccactgccaggccgaacgctcgctgatttcggccgagcaccgcgttgctaatgcagtatctggctgaggaacagcttggtccgatcgttgaccgggttggtgaagaaggtgtccggatcggcctcttcaacgatttcgcccttgtccatgaagatcacccggtcggcaacggtacgggcgaaacccatttcatgggtcacgcagagcatggtcatgccgctttcggccagcccgaccatggtatcgagcacctccttgaccatttccggatccagcgccgaggtgggctcgtcgaacaacatgattttcggtttcatgcacagcgccctggcgatcgcgacccgctgctgctgtccgcccgacagctgacctggaaacttgttggcctgctccgggatccgcacacgttcgagatagtgcatggcgacttcttcggcctgacgccgcggcatcttgcgcacccacataggcgccagcgtgcagttctgcaacacggtcaggtgtgggaacagattgaagtgctgaaacaccatgccgacctcgctgcggatcgcctcgatctgcttgaggtcgttggtcaactcgacgccattgatcacgatgcgcccctgctggtgctcctccaaccggttgaggcaacgaatggtggtggatttacccgagccggacggcccacacagcacgatgcgttcgccctgggtgacgttgagattgatgtccttgagtacatggaactggccgaaccacttgtgtacgccctgcatctggatgaccggctcgtcggcctgcgcaggccggtcggaacgtagagaattctcgctcatggtgtttttccttaattccggtgaccggtgtcgagcttgcgctccaggtgcattgagtagcgcgacataccgaagcagaaaatccagtagaccagcgctgcgaatacgtaaccttcggtcgacatccccagccaggcgggatcggaggtcgcccgcttgatgctgttgaggaagtcgaacaggccgatgatgatcaccagactggtgtccttgaacagggcgataaaggtattgacgatgcccggaatgaccattttcagcgcctgcggcaggatgaccaggatcatgctgcgccagtagcccaggcccatcgccgcggcggcctcgtattggcccttggggatcgcctgcaaaccgccgcgcaccacctcggcgacgtaagccgcctcgaagaagaccaccatcaccatcgcgcgcatcagcttgtcgaggttcatcccctcggggagaaacaacggcagcattaccgacgacatgaacagcaccgtgatcagcggcacgccacgccagaactcgatgaaggtcacgcagagcacacggatcgccggcatgtccgaacgtcgaccgagcgccagcaggatgccgagcggcagcgccccggcgatgcccaccgcggcgatcacgatcgtcagcatcagcccgccccagcggctggtcggcacgttttcgaggccgaggaagccgccgtgcagcagccagtaggcaaccagcggatagacgatgagataggcgatgccataacgcgccttgctcggcatctgccgcaggaacaaaggcgctgcgccgacgatggcaagccaggcggtcgcatccacccgccagcgcagttccggcgggtagaagccgtacatgaactggctgaagcgcgtctgcacgaacacccagcaagcgccctcgcgcgtgcagtcggcgcgggtttcgccgctccagtcggccttgatgatcgcccactcgagtatgggcggaacgatcatccagatcagatacagcccgaccagcgtcagcagcgtgttccaccagttggagaacaggttggcacgcatccagccaaccacgccgatattggcggatggcgccggcaggtccggcttgaaagtatgagtcgtcatgcgctggccctcaccgttcgatcagcgcaatgcgcttgttgtaccagttcatcagcagcgaaatgctgatgctgatggcgaggtagacgctcatggtgatggccatggtttctatcgcctgcccggtctgattcagcaccgttccagcgaacagcgaaaccatgtcgggatagccgatcgcagcggccaacgacgagttcttcgccaggttgaggtactggctggtcagcggcgggatgatcacccgcagcgcctgaggaatgatgaccaggcgcaaaacgcggcccgggcgaaggcccagcgatgcggccgcttcggtctggccatgactgaccgactggatgccggcacgaacggtctcgccgataaaggctgcggtgtagatcgagagcgccagcacgatcgacaccaactcggggatgatgacccagccgccgcgaatgttgaaacgctggagttccggcacttcccagaggaatggcgcgccgaacagcaacccacacaaggtcgggatggcaacgaacaaggcaacgctggcccagaacgcagggaatgtctgaccggtcgcgtcgtggcgtgcacgtgcccagcggttaagcaagacgatggccaccagcgccacgaacaaggcgatccagaacggccagaagccgtccccggcgcttggcgaaggcatctgcacaccgcggttgttgacgaaaatgatgtcccacagactcaagctgttgcgaggccctggcaacgggctgagcacggcgaagtagacgaagaatatctgcagcagcggcgggatattgcggaacgtttcgatgtacacggtggcgatcttgcggatcagccagttgggtgacagtcgcgcaacgccgaggacgaaaccgatgagcgtcgccaggatgatgccgatgacgctgaccaacagcgtgttgagcaagccgacccagaacacacgcccgtaggagtcgctttcgctgtagtcgatcaggtgctgggagatgccgaaaccggccgcattatcgagaaagccgaagccggatgtaatgccccgatgagcgaggttggtctgggtattgtcgaagagaaaccagccgacagccactaccgtcacgactgccagaatctggaacaaccaggctcgcgcctgcggatccgtgagcaacgagccgcgcgctgcccccgttttggcgatggttcgcatcaagaaacctcataaggcactgccgatgcgagcgcaccggcaatgctcgtccctgaaacaaggccagtttccactggcctggctcggtcaacgcaccggtggcgcgtactgcagacctccattggtccagagcgcattgagaccgcgttcgatcttcagctcactacctgaaccgatgttgcgctcgaacacttcgccatagttgccaacctgcttgacgatctgcaccgcccaatccttcggcagtttcagatccttgccatactcgccttcggcgccgagcaaacgggccacgtccgggttcttggtggtcttggcggtttcctcgacgtttgccccggtgatgccaagctcctcggcattgatcattgccagcaaggaccaacgcacgatatcgaaccactcctcgtcaccttggcgcacggctgggcccagcggctccttggaaatgacttccggtaacaccacgtagtcgtccggcttggccaacttgatccgctgcgcatagagctgcgattgatccgaggtgagcacatcgcagcgaccggactccagcgacttggcgctttcatcggacgtgtcgtaggtgatcggggtgtacttgaggttgttggcgcggaaataatccgacaggttgagttcggtggtggtgcccgcctgtatacagacggtggccccgtcgagctccttggcgctggagacgcccaacgacttgttcaccagaaagccctggccgtcgtagtaggtcacgccggtaaaattcagccccatcgccgaatcgcgggagctggtccaggtggtgttgcgcgacagcacatcgacctcgcccgattgcaacgcggtgaagcgctccttggcggtcaggggggtgaacttgaccttgttggcgtccccgaacaccgcagccgcgacggcgcggcagacatccacatcgattcccttgtactcgcccttggcgttggtgaaggagaagcctggcaggccgtcgctcacgccgcactgcacgaagcccttcttcttcaccgcatccagagtcgcccctgcctgcgccaggccactgacactcagaagtgtcgcagcgcccagcacggccagtgtggatttaacccttatcatcgaaacctccagtttgcttttattctgcggggtcggggtcgtctacctgcgtcgcgcatgccaaccggcatgcatcgagcggaacggcagaagcacctgacctgagtctagtcgccgatcgattaacggcaacttctcccgatgcactcgccagcacgagcgcgagcgacctcggtatccgtgccaccatctgacgaagcaagcgccataccagaaccattcgtaagcagcccgaacggcattgcgaccttcaacggcagcgcgggtacaggtaacctcgctgcatcttgctgcatccacccctccagcccgccccaacatgaggcgagccccagacggagcccacatgagcgccccactgatcatcgaacccgcaacatctgccgactcgtgcgtcatctggctacacggcctcggtgccgatcgctatgacttcctcccggtcgccgaagccctgcaggaacgcctgctacggactcgtttcgtccttccccaggcgccaacccaggcggtgaccatcaacggtggctgggcgatgccaagctggtacgacattctcgccatgaggccggccagggcgatcaaccaggcgcagctcgaagaatctgcacaaacggtgatcgccctgatcgaggcgcagcgagacggcggcatcgatccccgacgcatcatcctcgcgggcttttctcaaggcggtgcggttgtctatcacaccgctttccttcgctgggccggcccgttgggcggcgttctggcgctgtccacctacgcaccgaccttcagcactgacctcaaactctcggcccagcagcaaagcgttccggtgctatgcctgcatgggaccgctgacaatgtcgtgctgccgtcgatgggacgtgccgcctacgagagcctggtgcagaaccacgtcacggccgaatggaaggactaccccatggcccacgaggtgagccccaaggaaatcagcgatatcggcgattggctgctggcccgtctcgcctgaggtgcaagcaggctgagcaccgccttcgtcaagaaatgtgacgctgcgcgcctggccgatcggtcaattaaggctacccttcagctgggtagagctaactcgatgcgcccgctttcgcagcgcattcgcggccagaccgagccggcccgaccaaaatcgacggggcatagcgagtcatgacgaagaagtattccggcaggatgtcgccgtcatgaggcgtgtcgaaatgcagcacttgcgacaagcacgcctgctcgatcatgtcgacgagccctgcctgcgcctgttgcaggagctgttcgagccataccggatcgacaccggcgatatcctgctttcgccactgcaagccaatcactacctctacctggtgctcgacggcgaactcgccgtccacctcgactcgctcgacgggcaaccggtacggaccatcggcgccggcgactgcgcaggagaaatcagcttcatggacggccttccgccctcggcctatgtcgtggcgctggaaccttcgctgctgttgcgcttgcaccgcgggtcgatgccggtgatcactcgctcgccccggctcatgcagaatctcgccgaattgctctgccaccgggttcgtctgagcgatcggctgatcatcaacagcgagcagaacgccaacatcgacaccctcaccggctccttcaaccggcggtggctggagcagatctacaatcgcgaacgcacccgctgcgccttcaatggccagccactcgcgctgctcatgctcgatgtcgaccagttcaaggactacaacgacaggcacggtcacctggcgggtgaccatgcgctttgcctggttgtggacactttggccaagctgcttcgtcccgccgacagcctggtgcgctacggcggcgaggagttcgtgatcctgcttcctgaaatgaccctgagcgatgcgcgtaacgtcggcgagcgcctacgccagagccttgaagcgatcgccacattccgttcatcgatagggacgctacccggcgtgacgatctccatcggggtagcgccgatgcggcccgaggatgatctggagacgctgatccacgccgccgatcaagcgctctaccaagccaaggcgcagggccgaaaccgggtatgcggctgatactgaacggctttggccaaacgcgcccgagcaagcgcaacacccgccccgagcaagtcttcgccgtatctgcttcttgcattacactggcgggcgaaccttatcgacagagacgaaaccgtgctcaaagcactcaagaagatttttggtaaaggcccggcagagcaaacccccgcccagcctgtcagccacaccgtgacgcccatagattcaccccgcggcccggccaccgatgcgccagccgatgcgcccgctacggcgacgcccaagccacgccgagagcgcccgcgcaaaccggcggccccgcccgccccagcctggaaactggaagatttccaggtcgagcccgctgaaggcaagacacgctttcatgacttcaaactcgcccccgagctgatgcacgcgatccatgacctgggtttcccttactgcacgccgattcaggcgcaggtgctcggcttcacgctcaagggccgtgacgcgatcgggcgcgcccagaccggtaccggtaaaaccgccgcgttcctgatttcaaccatcacccaactgctgcagacgcccccgcccagcgatcgctacatgggcgagccgcgggcgctgatcattgcccccactcgagaactggtggtgcagatcgccaacgacgcactgaacctgaccaagtacaccggcctgaacgtgatgagcttcgtcggcggcatggacttcgacaagcagctcaaggcgctggaaagccgttattgcgacattctggtcgctaccccggggcggttgctggatttcaatcagcgcggcgaagtgcacctggacatggtggaggtgctggttctcgacgaagccgaccgcatgctcgacatgggcttcattccgcaggttcgccagatcattcgccagacgccgccgaagagcgaacgccagacactgctgttctccgccacgttcaccgaagacgtgatgaacctggccaagcaatggacaaccgatccggcgatcgtcgagatcgaagcggagcacgtggccagcgacaccgtcgagcaacacgtctatgccgttgccggcagtgataaatacaagctgctctacaacctcatcacgcagaacgactggacccgggtgatggtgttcgccaaccgcaaggacgaggttcgtcgcatcgaggaacgcctcacccgcgacggcatcagcgccgtgcagatgtctggcgacgtgccgcagcacaagcgtatccgtgctctggaaggtttccgcgagggcaagattcgcgtcatggtggccaccgacgtcgcgggccgcgggatacacgtcgacggcatcagccatgtgatcaatttcaccctgccggaagtgcccgatgactatgtgcaccgcatcggccgcaccggtcgggcgggcgccacagggacgtcgatcagcttcgccggcgaggatgacgccttcgccctgccagcgatcgaaacgctgctgggccgcaagatcagctgtgaaatgccaccagccgaactcctggcaccggtcccgcccaagcgctgaatcgaagccgcaacggatagcaaaaaggcgaagcctggcttcgcctttttagtgcctgacatttcagtgcctgacattaccttttcacccgaaccctggtcagtcctgctgccaccgctgtgccgcggcctggtcgctgcaacggccctccacccaacgcgggcctgacggggtatcttccttcttccagaacggcgcccgggttttcaggtaatccataacgaaccggcagccatcgaacgccgcttcacgatgggcgctggcggcaccgacgaagacgatcggctcccccggttcgagtcggccgactcgatgcagaatttccagcttgagcagaggccagcgctcgcccgccgcctcgacgattttctgcagtgccttttccgtcatgccgggcgcgtgctcgagaaacatcccggcgacatcctgaccatcgttgaaatcgcgaacgtagccgacaaagccggttaccgcgccgacgccgaggttggccgcgtgcaatgcattgagctcggcacctgggtcgaacgcggcctgctgtacccgcacacccatgttcagcctccggtcacggtggggaagaatgcgacttcatcgccgtcggccagcggctcgtccaggctacatagctcctggttgcgagcacacatcaggttctgctcgcccaataccgcccattgaccaccgcgcgctagcagtcgccgtctgaggtcctcgacctgcagaagtgaagagtcccaatccagctgttcggtatcgaggccgagcgtttcacgataacgcgcgaaataatgcacctgaatcatgtcggcacctgccagtgaccgcttttgccacccagcttttccagcagccgtacaccttccacgaccatgcccttgtcgacggccttgcacatgtcgtagatggtcagcgccgcaatgctcgcagccgtcagcgcttccatttccacaccggtctgaccggccagcttgcagcgcgcctctattcgcacacagtcatcgccttccggttgcagctcgaccttgatactggtcagcagcagcggatggcacagcgggatcagttcgtgagttctcttcgccgcctggatgccggcgatgcgggcgacggcaaaaacgtcacctttgggatgtccgccctgctggatcatctgcagggtttcaggacgcatacgcactttcgcctcggccaccgcttcgcgcgccgtaacggcttttgcggtgacgtcgaccatgttggcgcgtccgttggaatcgaggtgagtaagcataaacaggcgactccgaaaaacgatgcggcacattgtatacacaacatgccgccccgcgcctggcccgccgtcctcgttcgacgggcgtcagcgggttgcctacatatgggcctcggcatactccgccagtatcgagcgggggacgccttgcagcgtaatgtgcatgccgtgcggaaaatccttgaaacgctccgtgagataggtcagtcccgaactggtggccgatagataaggggtgtcgatctgcgccaggttgcccaggcagacgactttcgaaccactgccggcccgagtgatgatggtcttcatctggtgtggcgtcaggttctggcattcatcgatcagaatcaggctctgctggaaactgcggccgcggatgtaattgagcgatttgaactgcagcggtaccttttgcaggatgtagtcgacgctgccgtgagtactctcgtcatccatgtgcagcgcttcgaggttatcggtgatcgcgccgagccagggttccatcttttccgcctcggtccctgggaggaatccgatgtcctcatcgaggccctgcacgctgcgggtcgcgatgatccgacgatagcgcttgctcaccaccgtctgctcgatggcggccgccagcgcgaggatggtcttgccggagccggcggctcccgaaagattgaccagatggatgtcggggtcgagcaaggcgaatagcgccagcgcctgatggatatcgcgtggacgcaagccccaggcttcctgatgcaacaacggctcctggtgcatgtccagcaagagcagctcgtcagccttgatgcccttgatccagccgacgaagccctgctcgtcgagtatgaattcgttgatgtgcacggcaggcaggttgtcgatcagctgcacccggtgccaggtccgcccatgcccctgatgggtatcgaccttactgacacgatcccagaacgagccgctcaggctgtgatagccgcgagacagctgaccgacgtcgtcgaccagcttgtcggtgtggtagtcctccgacgcgacaccgcaggcgcgtgccttgagccgcatgttgatgtcgttggtcaccaggaccaccggaacgccactgctgcgccgttgcagctccaccacctgattgatgatcttgttgtcgttgagatcctctggaagcgcggtcgcgtcggcgcccttgctcatcaggatcgacagactgccgcacggtccgcttttctcgcgctggatcggtacgccgagctcgacttcctcgggggtcgcgttgccgagcaccttgtcgatcagacgaatcgcctgacggcattcggccgccacggtgtgcttgccggtcttgagctgatccagctcctccagaaccgtcatcggaatggcgacctggtgctcctggaaattcaataacgcgttggggtcgtggatcaggacgttggtgtccagaacgtagagggtgggctgagtagcgcggggtctgccgtagtcatccatacgcgatcaccttttcggatccgggacgacggggggccaaatgccctccgccgtagagaaaaccaccgagcgcacggtagacggacttgggtggcaggggcctggggccacccagaggccgccacctgtgagcgcaggtttcggcggtcttgatgtcgtaataccgcaaaacagatgacaggaaaaagtctttttccagccagggaggtttttttatccgagcgacgaattaccttggcgcgcgccctacccgctagctaggctcagtaatcaaccttggcgttttcgccgcagcgattgatttccgccgttacgtggaccagctccgagaaacctgccagttcggccttgtagcggtcagccgaatacgcctgatgcgtgacgatggtgacgatacagctgtactgcgcacgccctacccgccacagatgcagatcggtgacctcggtatcgggcaccctctccagttgcgcctgcacgcgctgcaccaggggatcgtccatctcgcggtccaggagcgcttttcccgtctcgcgcaacaagcccttggcccagatcaggatcaccaccgcgccgatgatgcccatcagcgggtccagccagttccagccgaaatacttgccgccaagcagggcgataatggccgccaccgaggtcaacccgtcggtcagcacgtgaatgaaggcggcatgccggttgaggtcacgccccgacgctgccgcatgatcgtgatcgtgatcgtgatcgtgatcgtgatcgtgatcgtgatcgtgatcgtgatcgtgatcgtgatgagcatggtgatggtcgtgctgatcgcgcaacaaccaggccgagagcaaattcaccaccagcccgatgaccgccacccacagcgcttcgtcgaaaccgatctgggcgggagaccagagccgtgacagcgactcgatgaccatcatcagcgccaccacgaccagcaacaccgcgctggcgaaccccgccagaacctcgatcttccaggtgccaaacgcgaagcgccgatcatgcgcatagcgccgcgcgagaagataggcgatcgccgccatgccaatggctaccatgtgcgacgccatatgccagccatcggcaagcagcgccatggaattgaacaggtaaccggcggcgatttcggcgaccatggtaatgccggtcagcagtacgacggcccaggtctggcgctcggtgccccgttcaagcggtcgataattgtgggagtgttcccagcgtgaatgattgcaatcggtcatagcggctccttttagtcaggcaagtgtgcgccttgaccctgcggtaaggtcaatcacctggtaaatcaaagtcataggtagaggcccccgagtcataacgcctagaatcagcgcatctagaaggagaccgatgcatgctgatggtgatttcgccagccaagaccctggattacgacaccccgccgatcactgatcgcttcactcaacccgagcatctcgaccacgcgcagcagctgatcgaacagctacgcggttattcaccgcagcagatcagcgagctgatgcacctctccgacaagctggccgccctaaatgtcgcccgctacggcagctggacgccgacgttcagccccgacaatgccaaacaggcgcttttggccttcaaaggcgatgtgtacaccggcctcgatgccgacgatttttccgagcaggatctggatttcgcgcagacccatctgcgcatgctgtccggcctttacggcatccttcgtccgctcgatctgatgcagccttaccgactggagatgggaaccaaactggcgaaccctcgcggcaaggacctgtacgcgttctggggcacgcgtatcagcacctggctgaacgaagcgctggcggcgcagggcgatgacatcctgctcaacctggcttcgaaagagtacttcggtgcggtcaagcgcaaggagctgaatgcccgggtgatcgatgtcgacttcaaggacaggaagaacgaccagtacaagatcatcagcttctacgccaagaaagcacgcggcctgatggcccgttacgtgatcaaggagcgtatcgagcacccgcaccagctgcaggatttcgcctacgacggttaccgctatagcgccaaggactcttcggccgatcacctggtatttctacgcgacacgcctcgctgacgcactcttaagtccacatcacctggcctcatcgatgaaggcgatcgctcgcctcgtcgtatctgctcctctcgcccggccgtcctcagccgcttcgtgccgataacaggcacgtgcgcggcaagcacaccgggcaatcaaaaaagtctccgatcagcggcatcccctcggggaactatctgaaggcacctgcaatcataagcgcgtaccggcacttccagatggaaagggacgtcgcacatgaacgtgctttgggtttcaacacagcgtttacaaagggtcagccagggcatgcgtacagcatcgcccggcagcagcgaccaagcgcaaggatacatgccgagctggacgcaccaaccgccggcagacagggcgcagcctgagctcgctcgaacccgtttctgtcagatcaacagagggctcatacgcactcctttcagaacgacgaccggtgccgccactttctatgcggtaaccatcgaccatcagcctacatcccctaattcaggctcggagcacgcagttcgccccgaaggcagttttctttcgagaaaacgaatcacgacggcgcgcggcacctgaaggcccgaccaagaaacgcaaggcgagcacagaccactggccgcccatatggacaagaagaacccccttctcaacgattcaggagaaacactatgattccggtcatcctctcaggcggcagcggttcccggctctggcccctttctcgcaaggcatttcccaagcagtttctggcactgaccgctgaacagaccttgtttcagcaaaccatcgagcgcctcgctttcgaaggcatgcagccgcccctgctggtttgcaaccaggagcaccgcttcatcgtcaaagagcagttggcggcacgcaagctggccatccagggcctcatgctcgagcccttcggacgcaataccgcaccggcaatcgccatcgcggcgatgaaactgctcgacgacggccgagacgaattgctgctggtcctgccggctgaccacgtgatcgaggatcataaagccttccagcgttccctggcgttggccaccaacgcggcggaaaacggtgagatggtgctgttcggcatccccgccaccagtcccgaaaccggctatggctacatcaagtgcgaccacagcgagcgcaacgggctgcccgaaggcgtcaaccgggtaaccaacttcgtcgagaagccggatgaagcccgtgctcagcaatacgtggaatcgggggactactactggaacagcggcatgttcctgttccgcgccagcgtcttcctggaagagctgaagaaacacgatccggacatctacgacacctgctgggttgccctggagcgcagcgccaagaatggtgaagaggtgctgatcgacccggccaccttcgcctgctgcccggacaactcgatcgactacgcggtgatggaaaagaccgagctggcctgcgtcgtgccgatgtctgccggctggagcgatgtcggctcctggtcctcgctctgggacgtactggaaaaggacgagaacggcaatgtgtcgcgcggtgacgtcatcgtcgaagacagccgcaactgcctggttcacggcaacggtaagctggtgaccgtggttggcctggacaatatcgtcgtggtcgagaccaaggacgcgaccatgattgcgcacaaggacaaggttcaggacgtcaaaaagctggtcaacaagctcgacgccatgaagcgctcggaaacacagaatcactgcgccgtgtatcgcccctggggctggtacgactcggtcgacatgggcggacgtttccaggtcaagcgcatctgcgtcaaccccggtgcgcaactttcgctgcagatgcatcaccatcgcgctgagcactggattgtcgtttcgggcaccgcgcaggttacctgcaacgataaaaccttcctgcttaccgaaaatcagtcgacttatattccggtgacttctatccaccgtctggccaacccaggcaagattccgctggaaatcatcgaagtgcaatcgggcagttatctgggtgaggatgatatcgaacgcctcgatgacgtctacggccgtgcacctgactcggtagtaagccagtcggctcgctaagttgagctaaagaaaaccgcgccggatttcggcgcggttttttgtttccggtaagaaacacctaaaccagcaatttgagctttatccaaagcccattccggccatggatcgacagtcctgttaattaccgcgagaagacgggagcttcacgcttggagagcttcacgtaaacggaactaacttccgcacataattggattccacgggtagcttgcaaaggtgcctgccaaacctttaaataagcgaagcctgcacttctcaaccgccgtatcctgcgcgcggttgctaatggcttggacttaaaaaggaaacgatcgagagtgacaaaagaagaactacgcgccgaactggaacggcaggccaaccggttcaagaccgtttatggaggcgaagtaaccacctacgcggcgcaaccagaccccgaacgcaagccgtggcgcaaaaaacagacgattcacgatcaggtattcaagaaagagcttgaaaagatcgaaaaggaaatggcgaagcaggcaaccgacgaacattgaagcggtgccgatcatttctactgcgctagctcgatgcagcgagcggcctttacgcagagattgctaacttaacgcttgcgtcccagtagcgagcccagcacccctctcgccaactgtctgcccaactgagaagccgcctggcgcatcgcacttttgacggcgcgcccggccagatcaccgaacgcatcgcccagatcgctcttggaggccggcgccttctccggcgcgtcagcctgtttcgcctggtttgcgcgctcgagcaggatctcataagcggattcacggtcgatggccgtgtcgtaacgcatacgcagggaagaactcgcgatcaagccgtgtcgctcgctttcttcaagcggcccgatcctcgactgtggcggggcgatcgcaactcgctgcaccatggccggcgttcccttgtcttcgagcccgccgaccagcgcctcgccgatgccaaggtccaccagcgtgtctagcgtggaaaatgacggattggaccgaaagccttccgccacggcgcgcaacgccttctgctccttgacggtatacgcacgcaggccgtgctggatgcgcaaccccagctgcgccaatatctcatccggtaaatcggagggtgactgggtcacgaaaaacacacccacccctttcgagcgaatcagacgaaccacctgcgccagccgatcctgcagagctttgggcgtgtcgttgaacagcaggtgcgcctcgtcgaaaaacaacgccagcagtggacgatccgcatcgccgcgctcgggcagctgctcgaagagctcggccagcagccacaacaggaaggtcgcatagagcttcggcgcctgatgcacgagggtgctggcatcgagcagatgaatccggcctcgcccatcgctcgctggctgcaggatatcttccagcgccagcgccggctctccaaacagggcgtcggccccctgctgctccagggttgccaaacgtcgcaacaaggcctgcgacgaggccgaggtcatcaacgcagcatcgtcgcccagcacgtcggggttctgcttgagataacccagcagcgccttgagatctttcaggtccaacagcagcagcccttcacgatcggcgaccttgtaggccgcgtaaagcgctgcctgctggctatcggtcagttcgagcagactgcccagcaacagcggccccatctcggtaagggtagtgcgcaacggatgaccactgacaccatagacatcccataacgtgaccggatatgcctgcggctgatgctcgagccagggcatgctggcgatgcgttcggctatctttccctgaggcgatccggccgccccaagcccacacaggtccccttttatatccgcagcgaagactgcgatcccggcgtcactgaactgctcagccagacgctgcaaggtcactgttttgccagttcccgtcgcgcccgcaaccagaccatggcgattgaccaaccgaagcgggtgggtactgggttcgccggtagcctcaacacccagcacgaagcgatgatcgctttccataaggtcgcctccacagatggttcagatgaccggacaccggccatcgcgttcaatcgccgtcaggtatcgccacggcgggtttctcgctggcaggcgcgcaacgcgcccacagcgcctcggcgccggggaagtcggtaccgagctccggtgtgagttgctcggggtcataacgctgggcacagccagcgcctattaccggcggcgcgcttgcgccagccttggccagtggatcggtcatcgttcctcccgcatcgagagcccagcaccgagagcccggatcagttgaataccagcgtcttgttgctgtgcaccagtacgcggtcctgcaagtgatagcgcaggccacgcgaaagcaccatcttttccacgtccttgcccagtcgaaccatgtcctcgatgctgtcgcggtggctgacccgcaccacgtcctgctcgatgatcggcccggcgtccagctcctcggtaacgtagtggcaggtcgcaccgatcagcttgacccctcgcaacgacgcttggtggtaaggcttggcaccggcgaacgaaggcaggaagctgtggtggatgttgatcacgcgctgtgcgaactcctcgcacaaccccgccggcagaatctgcatgtatcgggcgagaacaatcacatcggtctgatgttcacgcaccagacgcgtcacttcggcgaatgcctgctccttgcctcccggcgcgaccggcacatggaagtacggtatgccgtgccactcgaccatgctgcgcaggtcgtcatggttcgaaatcacgcagggaatatcgcaatccagttcgccgctgtgccagcggtgcagaagatcggccaggcagtgcgactcccggctggccatcagcacgacgcgtttacgctctgccgaatcggtaatccgccactccatggaaaactcacgcgcgattggcgcaaacgcctgacggaaacctgccagatcgaaaggcagcgagtcggcgcggatttcatgacgcatgaagaaccagccgctctggtgatccgagtgatgattggcttcggtgatccagccgttgtaggtggccaggaaattgctgaccttggcaacaatgccaacgccatcggggcaggcaataaccagcctgaatgtgcgcattaagcagaactccagcttataaaaaaggtggcgcattctagcgcagcgcagaaaaccgcagccacattaatgaaccaggatcgacacgagcctgcgccctgtgccgatccgggagcaaagtgacgatccattgcgaaataataagatacgacctgccagcggataggctccgatggcagcttatatacggatcacggttggccagggctcgcctcacggcattcatataactcgtttgctgcagtgccctttgccacgggcttgtttcccacggaagtgaactaactgagcgacgttcctgcggtaaggaaaccacggcaacctaccaatctttattgaaagtcatatttacttgtgcattgcgcgtgtctatgattgctaacacttgcgttcaaacctataccaaggaagtgacatgtcgctgatcaatgaataccgcgccactgaagaggctatcaaggaactccaggaacgcctgaagtctctttcggcagacgacaagctgaaaaaggagcttgagttcgaaggcaaactgcgtgagctgatgggcgaatatcagaagtcgcttcgcgatatcatcgccctgctcgatccggatgccagaaacagcaaggctcctcgcacggcgaaggcaccggctgcaaccaagcgcgcccgtcgagtcaagcagtacaagaacccgcacaatggcgaagtgattgaaaccaaaggtggcaatcataaaaccctgaaagagtggaaagctcagtggggttccgaggaagttgaaggctgggccaccctgctcggttaaatcgtagcgctacgctgaaaccatctaacgtgacatgttcgagctgtcacgttagatggtttttttgtgtccgtcgtttggcgggcaatcagcgaatatagcgctcgcgcaagccttgggcatgaagggcccactgttgcagcagcgccttttgttcgggactggctgaggccagcagctcagcgaggtcgccctcgaactgctcgagcgtattgggcgcaccggactcagggtcggtcagacgccgccgacagaactgctcccattgcagtttctcctcggccgaaagaccttccgggaagttgcgcgcacggtagcggaagtgcaattccggcaagcgagcatcatcgaacggcggcgttacgttcgctcccggcgcagccaagaggtttctaacctgctcgcacaagcgacgatcgcggtctcccagaaatccttcgtagagttgctgctccggatcggccacctcattgaacggctgctgctcctggtagatatcagcgagtttctcgccccacgccgcttcccggctgagcagatcgcgagccctcgactcacagcactgcaggtccaggcccaggcgctcgatatcgacttgccgcaacaccttcatcggcagcaggaccgggcaacgattgacgtgcaccagcttcaacggcgccggcaacttttcgccaagttcctctcgccgcgtgtacaggcgctcgcgcagtgtttcggcggtttcctcccacagcggcgagcattcggcgttgaggtcgcaaacgatcagcgcgttacgattgcgcggatgccaggccaacggcaacacgacggatagataatgccgagcagctgagaagcgcccggaaatgtgcaccatcggcttcagcaactcgatctgctcgaccaccgcatttttgcgccgcagcttgtacagatagtcgtacagccgcggctgacgctcccttatcaaccgcgccagcgcgatggtcgcgcgcacatcggacaacgcatcgtgggcctgcaggtgctcgagtccgttggccacgctgagacgctccagcttcagcgtcacccgcccgtcctcctccggccagaccaacccttcgggtcgtaaggcataagcggtgcggaccagatcgatgagatcccagcgactgttgccgccctgccattcacgcgcgtagggatcgaagaagtttcggtacaggctgtagcgcagcacttcgtcatcgaagcgcaaggtgttgtagccggcgccacaggtgcccggctgcgccagttcccgatgcagccgggtaatgaactccgcctcgcacaggcccttttccagcagggttgccggggtgatgccggtcaccaggcaagcggccgggttaggcaggatgtcgtcgctcggccggcaatagatattcagcggctcgccgatctcctccagggcctcgttggttcggattccggcgacctgcagcggccgatcgcagcgcggcgagatgccggtggtttcaaagtcataccagaagatgctggatgtcacgggagcctccctctcgattgggcggcagtctagcgtgcctgagcggtgataggcctccccgtcttaccgacctgtgcggcaggcacgcaacctgatcgcgtgatgccggacgggttccgaggcgaaaggccaagcaggttctagccgcagggggcgttcggtgctttcatagtggccatacgcggccactgcaagtcgccgatcagtcgatcggtcatcggcacgggccagcatcatctgcaatccgagcgccgagcacagccattgtctcctgcagcacccctggataatacgcacaggatcgagacgcccgagggcatcgatcttctgctgcgccccgcagggctggttcctcgagccctggcgtatgccctggatctgctgattcgcctggcgctactgctgttcctggcgctagggctcggctcgctgggcaagttcggcatgggagcgggcgcgctgctgctgttcgtcgtgcagtggggctacatggtcctgttcgaggtgctcaatgacggcaggacaccgggcaagtactggctggggctgaaggtgattcacgacgacggcacgccgataggctggccagcatcactgttgcgcaacctgttgcgattcgtcgatatgctgccattgggatactgcctgggggcgatctgctgcctgggaaatccctccttcaaacgtcttggcgacctcgccgctggcaccctggtggtgcatcgcgagcgtccaacggctcccgtgacgctgcctccggcggaccccatcaccccgccctttgcgttgggattggccgatcagcgcgcactgatcggattcgctgagcgccaatcgagcctgtccgcagagcggcggcaggaactggccgccattctggccgagccactgcacgtcacgccggaacaggccgaagcatgcctcaacagcatcgcccgcgcgctggtaggcccggcatgaagcagagccagttcgaacgccaataccgccccgaatggctggcattcggcgagcggctcaatgccctcgagcgaggcaaggcaacgcctcaggactcgctcggctttccggccgcgtatcgccgcatgtgccatcagctcgcactggctcagagccgcggctacagcccccacgcgaccgatcacctgcagctcgtggtacagcgcggacatcaacagctgtaccgtcatcgcagcccgctgacgagccgcctgctcggtttcgttctcggtggcttcggccggttggtccgccaggaatggcgttatgtggcggttgccagcctcttgttctacgcgagtctgctgggcatggcggcgctggtggtgctgtttccgcagctggtgtacagcctgatcagccccgagcaggtcgcacaaatggaggcgatgtacgacccggacaccagtcgcctcggtcatttcggcgagcgaggctcggccgatgactgggtcatgttcggctactacgtgatgcacaacatcgggatcgccttccagatgttcgcgggcggtttgttgttcggcctgggcagtcttttctatctgctgttcaacggcctgaccattggcgcgatcgcgggtcacctgacgggcgtcggatatcagcagccgttctggtcgttcgtcattggtcacggtgccttcgagttgacggccctcaccctcgctggcgccgccggcctgaagctgggagacgccttgatcgctccgggccgccttggccgtggcgaagcattgcgcctggccgcggccggcggcgtgcggctgatcgctggtgcggcgttcatgttactgatcgccgccttcgtcgaagcctattggtcgtcgatgacttacccatccgcgccggtcaaatatgctgttggcgcactgctgtgggtattggtcggcctgtatttcctgcttagcggtaggagcccacgtgcaactgaatgacgcaaccctggaaatcaggccgcgcagcgcctgggaagcgatcgacctcggcgctctgctggcgcgccgccacgcccgcttgctgatgctcagctgggcgctgctgacgctgccggtgttcgtgctgctcagtctgctgttctggtctcacccgtcgctcgcactgttgctgttctggtggctcaagccgctgtacgagcgcttgccgctgttcattctctctcgctcgctgttcggcgacataccgacgctgcagaaagcttcagggcgctgccaggcctgctgcggcgccaatggttcgcgagcctgacctggcgacgcttcagcctgacgcgcagtttcgacctcccggtcatgcagctcgaggaactgtccggcccgaccagaaagcagcgcctgcgtgtcctgcaacaacgcgacgccagagcggcgcgctggctgaccatcgtaggtgtgcatctggagagtggcttgtggctcggcgcactggcgctgatctacctaatgattccggcgcagctgatcgccgactggagctggatggatctgctgcggctggaccaggatcggctctggttcgagcacctgtccaacctgctgtatgcgctggtactggtgttctgggaacctatctatgtcgccagcggcttcagcctttatctcaaccgacgcaccacgctcgaagcctgggacatagaactgagctttcgccgcctgcaggagcgtctgagagccgtgcaaccggccctgttggtcggcatcgccttgttgctggcgatgccggcgcagccgacccaggccgccccggcgatgacaccgagcgacgagcactccgcaaccgtcgataccggtgctggaacggagagcctggacaaccagccgctgacccgccaggccgcccgcgagcgcatcggcggattgctgaatgagccgccgtttcgtcatcaggagaccattacccgctggcgcctgggcgacgaacagacggaagcggcacctggctggctggcacgcctgctcgaccgatggctgcgcctgcaccacgacttcgatcacatcgtcgcaggcatcgaggtagcgctttgggccggtctgttcggtttgatcgcgctggtcctgtggcgttatcgccagtggctgaggttgcacgtcgggcggccacaacgggcactccagccggcgcaagacccaccggcggtgttgttcggcctcgacgtgcaacctgaaaacctgccgctggatgtcgccggcgaggtagaacggctttgggacgagcagccacgcgaggcgctcggcttgctttaccgggcctttttgagtcgcttgctgcacgagcgcaaggtgccgctgaaagccgcccacaccgaaggcgaaatcctcgaactgctgcgccaggcgcaacagccggagctgaccggctacgccgagaccttgacgggtcattggctgaatctcgcctacgggcatcggctgcctgccagcgatacgcgtcgcgaactgtgcgatggctggcgtgacctgtttgccgtgcgaggtcgtgcatgagccgttcgcgtgcagggttggtggcgattgccggtgtgctgctggtcgtctcgctgggctaccttgcgagccagctgtcgttctatcaggagacagtcgaacaggggccggcgccgcaggcacgcaacaacccctacctggctgccgagcgcttccttgttgagcagggcaaatctgtcagcctgcccgcaaggctcgacggcgtactcgataacgcaccgaacgaccagatcctcttgttactggccgatcgcgccgaaatgacgccggaccagtccaccgatctgctcgagtgggtcggagccggagggcacctggtattcgtcgctgaaaggctctgggacgagcaggccgggcaaagtggcgatctgctgctggacgcgctcgatctgcagcagtacgaaaccgaggatgaccccggcaaggctgccgatgccgccggacaggcagggagcgtcgataaccgcgcaacgctcactcgcctgtatctggaaggcgacaccgaaccggcctatctggcgttcgacacgcgctaccacctgtacgacgccggcaagaaggcccatgcatgggccaacagcgacggcgcaacccacatgctgcagttgcagcacggcaaagggttggttaccgcactcaccgatagctggatctggcagaacgatgcgattggccagcatgaccatgcctggctgctctggtacctcacgcaggaccgcaacgtgacgctgctccatcacgccgaacacgacagcctgctgcaacagcttctgcggcatttcccgcaagcgctgactgccctgctgctggccctgctgtttaccgtctggcatcgggccgctcgccatgggccgatcatcgtgccggcagaccgtgggcgacggcagctgcaggagcacctgcgcgccagcgccgatttcctctaccgccatgccggacagcgtcagttggtcgacacgctccagcaagatatccagcgccaggcacggcgacaccatccggggttcgacgccctgggccacgccgaacagtgccgggcgctggcagcgctcagccggctgcagatcgatgcggtcgacaaggcgttgcgcccagctgccgtcggtcccgccaatgccaccgaattcacccatctgatcgccagcctacaacgcctcaggaatgccctatgagcgaaccaacaagcgaaccgaatagcacctcgcccgccgtgggtaaccagcggcagcgcgccagccagctggcacaagcgctgcgtcaggaattgcacaaggccgtgatcggccagcgcgaggtcgtggacggggtgctcactgccctgatcgccggagggcacgtgctcgtcgaaggcgtcccgggactcggcaagaccctgctggttcgcgccctggcgcgctgttttggtggcgagttcgcgcgcatccagttcactcccgacctaatgcccagcgatatcaccggtcacgccgtgtacgaccttgccagcgagcagttcaagctacgcaaggggccggtcttcaccaatctgctgttagccgacgagatcaaccgcgcaccggccaagacccaggcggcgctgctggaagtcatgcaggagcgccaggtcacgctcgaaggcaggccactggcggcaccacagccctttctggtcatggccacgcaaaaccccatcgagcaggaaggcacctatccgctgcccgaggccgaactggaccggttcatgctgatgctgcgcatggactacccacaggctgacgaagagctggagctggttcgtcaggttacccgctcggcgcgcaccgacatcctcgatgtcagcgggttgcgggtcttgttgcaggccaaggacattctggctttgcagaagattgccagcgaagtcccactcgacgagcaggtgctcgactatgccgtgcgtctcgctcgcgcgacgcgtgactggccgggcgtgacattgggtgccggcccgcgcgcgtcgatcgcgctggtacgcggcgctcgggctcgcgccttgctgcgaggaggcgagttcgtcgttccggacgatgtaaaggactgtgcgctcgcggtattgcggcatcgcatcaggctctcgccggaactggccatcgaggggatgtcggtcgatctcttgctgcgtcagctgctcgaccaagtcgcggcgccacggctgtgatcggtcgatgactccgtcacggcgactgatccttgcgctggtggcgctgctgggcctggccttgccactcggcacgctgtcggcgttgggccattccctgcctgaggcagttcatacagcctggtggggcttgctactgtgcctgggggcgcttggcacgatcgacgccattgcggtagcccgattgccctcccccaggctgcagcgcgagctgaacggctacctggcgttagggcgctggcaggacgtacaactgcacatcgttgcccaaccgaacacgcagctgcgactggatatcttcgatcatgtgccatccgccatgtcgcttcggcagctaccgcagcgcctggctctaggcgctgggcaaagcgccacgctgcgctatcgggtatgcccgcagcagcgcggccactatcggttcgagcactgcgagataggcctccatggcccgctgggattgtggcgccagcgccgcctgctcgccctggcgtcgcagactcgcgtctatcccgacttcacgcggctgcacggtgcgtcactcatggcggtcgacagctggctgggacgcctgggcgttcggcaacagccgcgccgcggccttgggctggaattccatcagctacgtgagttcagggagggcgacaccttacggcagatcgactggaaggccaccgcgcgcaaacacctgccgatcgctcgcgaataccaggatgaccgcgaccagcagatcctgctgatgctcgactgcggacggcggatgcgcagtatagacggcgcgcgctcgcacttcgatcacgccctcgatgccagcctgttgctggcctacgtcgccctgcgccaaggggacgcgctgggtttttgcagcttcgccagcgatcaacggcgcttcctggcgccggccaaaggcccggcgcagctgaacgtgctgctcaatggcgtctacgatctggtcaatacgcggcaacccgccgacttcactcaggctgcggtccaggtgctggcgcagcagaaacgccgggcgctagtgatactactgaccaacctgcgcgacgaagatgacgaagatctgctcggcgcggtccgcctgctcgcgagtcgacaccgggtgctggtggtgagcctgcgcgaaccggtgctcgacgcgttgcgccagcgtcccgtgacccgtctccaggaggcgctggattactgcgggacactggactatctgaccgcccgagaacgtttgcatgatcgcctgctggcgcgcggcgtaccggtgctcgacgcgcttccacaagcgctgggtccggcgttgatcagccgctacctggcctggaagaaaagcggaacgctgtagcgcatcgccgacgcttggccggcacggcgctgcggtaacagaacccgtcaggtgccgtgacagcggttctgatcgacggcgtgaccatgcggtacatcgttgatcggcaaacgggcgggagggatgttcgacatcggccgaaagctgaagtaatgatgcagcgcatcgatcatcaggcgaatttcactgggtggcgtgatcagcacgaaaccggaatcgaaactgcccggagtgacgtcctcacgcgaccaacgacaaacggcgctgaagtcgatgaaacgcagctgcccatgctttccgggaattttcaggcgcatttcgaaacgcgcatcgatcatcatcggataggggctgatcaacatcagtcccgtttcagacaggttgccgatgaagcccaggggcttgtcggtaaagcgattgaagacattgaggtaatacggcagctggtgccgctggatactgcgctggttgagcatgttcatgtgttccgggcctgccgccattctgatcaacgcgaccgatgccggccgctcagctgcagttttgactgatacgactggccaactgccgccgcgccgcccctatttcctcatcactgtagtagacgcgctcaccctttgcatcggcactaaagtagcggccaccatgagacagtcgcgccagtcgctcacgcaactggtggcattgctgttcacgctgtgcctgccgggcaccggcagcctcgtcggccgcctgccgctcctgccgacgtgcgtcgaagaagcgctcggtgcgcgcttggcgctcgcgagtcgcgttatcacgttcgacgacctgcggccgaacctcgacctgctcggcgccgggccgtggccgcgcatcgaagtgcacgttgccctcgggatcgacccagcggtagatcccggccatcgccgaaggcgaggccaatatgattgcaaccaatatcgctgcgatgcgcacggggtccttcccatcggcccgccggggccgggttcgcttcagggtttgacggcgtgggtaaccactcgctcctccggctgatagtgccctaactgacgcaacgtctccagcctggcgccgctgcgaaaggcatattcgctggccggatagcgggtctggatgaagcggtaggtttgtgccgcatcgacgaacaacccctggcgttccaggcactgcccgcgcaacagcgagatttccggctggacattatcgcgggggcggctggcgcgttcggcctgcgacagggcaagcatcacccgttcgcagtcaccttcctgatagtgctggtaagcactgtccagatgacgatcgagtgcgtttcggctgctgcagcctacgctcagagtggccaacaaaagtatgacaagggtgcgcatgggtggatcctccgtagccgatttatcgactacagcgagaaaaactgcagtccgttcggcgcgccagagccgctcgcagcggctaatacgatggcgccaaagagtagtgcaagccaacaatgactacagccgcacagcgtagtagcctcccggccattctgaaaaaggagcatttgaatgatctcgcgccgtaccaaaatcgtcgccaccctgggccctgccagcagttcgcccgaggtgttggaaaaaatgattctcgccggcctcgacgtcgcgcgcctgaacttttcccacggcacgcccgacgagcaccgcgcacgggcgcaactggtacgggataccgcggccaagcacggtcgcttcgtggcgctgctgggcgacctgcagggcccgaagatccgcatcgccaaattcaccaacaagcgcatcgagctggctgaaggggacagctttcgcttctccgtcactcatcctcgcgatgcaggcacccaggaagtggtcggcatcgactatccggatctggtcaaggattgcagcgtaggtgacgagctgctgctcgacgacggacgcgtagtcatgcgggtcgacagcaccaccgccgacgagctgcactgcaccgtgctcatcggcgggccgctgtcggacaacaaagggatcaatcgccgcggtggcgggctcaccgcgccggccctgacggccaaggacaaggccgatatcaaactggccgccgacatggatctcgattacctggccgtatccttcccgcgcgatgccgccgacatggaactggcccgtcgcctgcgcgacgaagccggctcgagtgcctggctgatcgccaagatcgagcgcgccgaagcggtggccgatgacgaagcgctggacgggctgatccgggcgagcgacggcgtgatggttgcgcgcggtgacctgggcgtcgagatcggtgatgccgaactggtgggtatccagaagaagatcattctgcacgcgcggcgcaacaacaaggtggtgatcaccgccacgcagatgatggagtcgatgattcagaaccccatgccgacccgcgccgaggtgtccgatgtagccaacgccgtgttggactacaccgatgcggtgatgctctcggccgagagcgccgccggtgaatacccggtcgaagcgatcaaggcgatggcgcgggtctgttgcggcgccgagaagcacccaaccagcatcaagtccggccatcgcctcggtcagcgcttcgagcgcagcgatgaaagcaccgccttggcggcgatgtacactgctaaccacttccctggtgtgaaagccatcatcagcctgaccgaaagcggctataccccgctgatcatgtcgcgcatccgctcttcggtaccgatcttcgcctattcgccccaccgcgaaacccaggcacgggtcgccatgttccgtggcgtgcagaccattcccttcgacccggctgcactgccggcggacaaggtcagtcaggccgcggtggacgagttgctcaagcgcaacgtggtgagcgtcggtgactgggtgatcctgaccaagggcgatacttatcacggtaccggtggcaccaacaccatgaagatcctgcgcgtcggcgactcgctgacctgaagcgctgagccgaacggcatggctcgcccgagccatgccgttcgccgacccttcccgcgccagggcgctaccggccttatagctgctgtggggcgttctccacctggcgcagcagaaacacgtcgctgaacacctgacctctgggcaggcccgtcatgaacaggcgcttggcgcactcatcgacgaacgcagcggcgccacaaatcaacgcaagctcctgacgcgatgcgacccgcagcgattgcagacgctctgtcgcctgttgtcgatcgacccgctctacactcaggttcggatgccgctcggccaactgctccagcgctaccctcaggtaggactctcctcgacagaaatgcagcagccgaatcggccccgcatggccctgtcgcagcgcttcgcgcaataggccccagagcggcgcaagccccgtaccggccgccagcatcaacagcggcctcgcttgccagtcgggctcgtagtgcaaggcgctgtcctgcagttgcccgagccgcagctgatcaccgacggccagctcacgcgctatctcactgaaggcaccgggccgactacaatcgatgtgaaattccagccagggatcctcgccaggaaggcttgccagcgaatagggccgcgcgacccgctcgccgccccataacaacaccgactggccagcgcggtaacgcaaggggcgttcggggtgcagcctcaggcgaaggacttgcccatcgagccagtcgagcgcctgcacccgcgcagccaggccgtctcgccgcggatcgtacacggccacgctgagatcctcggtgaccgagcattgacaggcgagccgccaaccctgcgctcgtagcgccgcatcgagagcctcggggcgcagatcggaaggtacacctctcacgcaccgcaccaggcacgcctggcaactacccgcccgacagctgtacggcacgcacagcccggcgtcgttgagggcatcgagcaggttactgccctcgccaaccgtccaggaccgatccccatgggtgagctcaggcatcggccatcgtccagctcgcctcgcagcggttacgaccgtttttcttagcgcgatagagtgcctcgtccgcacgttgcaaggactcgtccaggtcatcgccagcctcgagcagggtcagccccaccgacagactcaactgccccgcctggagctgcacgtccaacggctgggcattggcgaaggcttcgcgcaagcgctcgcaacaggcagtgaactgctcggcgtcggtgctgggcaacaacagcacgaactcttcgccaccgtagcgggcaagcacatcgtcgtcgcgcagacatgaacgcgccacggaagcgaaggtttgcagaacccgatcgccagtggcatgcccgtgctggtcgttgatgcgcttgaaaaaatcaaggtcgatcagggccaggcccgaccgatgccccgcccgcaagcggctcagctcggcctcggcgcggcggatgaaatgccggcggttgtacagcccggtcagctcgtcggtggacgccaggtcttcgagttgccgcatcatgccgcgcagggtttcctggtgggcctgcaaggcgaagcgacgctggcgcatgcgctggcgcaaggtatagacgtaaccgacgaacagacacatccagatcagcgtgacgagcagcacgccggcttccagcagagcggcctgagggtcgctcaggttccccagatgggcatcgcagagcgacatcccgacgaagctcagaaacgccaacacggcgtagcgcatgaacacccgaggcggcaggaacaccgcgaacatcagcaccagcacatagagcaccagcagcgagccgcgattaccgccgagattgaacagaaagtaggtcaaccagaccagcgcgaccagcacctgtggttcggtcagactggggtcgcgaaagcgcaggttgtagccccggtagaagacccagaaaaaggcgagctgactggccagaatcatcgccgaagcgataatcgcggtatctatcgacgccttgtaaaagccaccggcgacggtgatccaggtcagcaccaatgccaacccgtaggtaccggccgccatcccgaagcgtttggtgaccagttgctgcagcgcctgttgatcgctttgttcacgagtcacgcgcatggaatccgttcccataatagcgatttgacatactttacgccggccacctgtaaaagcctataagccacgcgccgcttgtccagacgagtggccgatggtcccgaaagtggcagttctgtcatcctgctgccgtccacctcgcctacacatggcggcgcggccatcgacggcgccgcattgaattccgataccgccgagccagtttcccttcgcatcccttccacctttggtccgtctgtgccccctgcggcacagcgggttatactgccgcgcctttttacctgagcgcgtcggccatgttccacgcgccccgtctccgccccgccaagaggacgcgctgcatgaccgtgatcaagcaagacgatctgatacaaagcgttgccgatgctttgcagttcatttcctactaccaccccgtcgacttcatccaggcgatgcacgaggcctacctgcgcgaagaatcgccagcggcccgcgattccatggcgcagatcctgatcaactcgcgcatgtgtgcgaccggccatcggccgatctgccaggacaccggcatcgttaccgtattcgttcgcgtgggcatggacgtacgctgggacggcgccaccatgagtctggacgacatgatcaacgagggtgttcgccgcgcctacaacctgccggagaacgtgctgcgtgcttcgatcctggccgacccggcaggttcccgcaagaacaccaaggacaacactccggcggtcatccactactccatcgtgccgggcgacaaggtcgaggtggacgtcgcggccaagggcggcggctcggaaaacaagtcgaagatggccatgctcaacccgtccgactcgatcgtcgactgggtgctcaagaccgtgccgaccatgggcgctggctggtgcccgccgggcatgctcggcatcggtatcggcggtactgcggaaaaagccgcggtgatggccaaggaagtgttgatggagtccatcgacatccacgagctgaaggcacgcggcccgcagaaccgcatcgaagagctgcgtctggagctgttcgagaaggtcaatcagctgggcatcggcgcccagggcctgggcggcctgaccaccgtgctcgacgtgaagatcatggactacccgacccacgccgcctcgttgccggtgtgcatgatccccaactgcgccgccacccgccatgcacacttcgtgctggacggctccggccctgccgaactcaccccgccgccgctggacgcctacccggaaatcgtctgggaagccggcccgagcgcgcgtcgcgtcaacctcgacaccatcacgccggaagacgtgcagagctggaagccgggcgaaaccgtcctgctcaacggcaagatgctcaccggccgcgacgccgcgcacaagcgcatggtcgacatgctgaacaagggcgaagaactgccggtggacctcaagggccgcttcatctactacgtcggccctgtcgatccggtcggtgacgaagtggttggcccggccggcccgaccaccgcaacgcggatggacaagttcacccgccagatcctcgagcaaaccggccttttgggcatgatcggcaagtccgagcgcggcccgatcgccatcgacgcgatcaaggacaacaaggccgtctacctcatggcggttggcggtgcggcttatctggttgctcaggcaatcaagaagtccaaggtgctggccttcgccgagctgggcatggaagccatctacgagttcgaggtgaaggacatgccggtcaccgtcgccgtcgacaccaacggcgagtcggtgcacatcaccggcccggccatctggcagcagaagatcgcggaaaacctggccgtcgaagtgcagtaaccgtaggccacaaaaaaagcccggcttcatgccgggcttttttgttctcggtgcgttactagcggttgaaacgctctaccaacgcgcgcaatccacgggcagcgccttccagctcgcgaccgcgctgcatcgtcaggtcggctttgttgacgttgctgtctgtggtccctgcgatgctggtgacctgccgcgcaatgtcctctgccacgtgagcctgttcgtctgccgcggcggccatctgctggctcatgccggtgatacggttcaccgcgtctcgaatgccttgcagggcctgctgcgtctcgatgacctgggccagcccttgcgccgcctccttgtcgcctacctgagcgatggcgaccgcttcttcagccttgctggtcagcgactggatgatggactggatctgctgcgtcgaatcccgcgtcttgctggccagcgcacgcacctcgtccgccacgacagcgaagcccctgccctgctcgcccgcccgcgccgcttcgatcgccgcattgagcgccagcaggttggtctgttcagcgatgctctgaatcatgccggcggcagacatgatctgctgcgtctcgccggccagctcgtttaccgcactgccgatgttggtcacggtattggccagcagttccatcgccttacgcgagctggccgccacccgatccccgtcggtcgccagggcgttcgccgtggtcgcttcttcggccgtctgctgcacgtggctggcaacttctgtaatcgatgcggtcatttcggtcactgcggtggccgtcatgtccgtttcaccgcgctgttggcgcaggtcgttctcggtctggctggccagcagggaggtctccgccgaagcgctttcgacctgcgcggccaggtcggaaagacgcgtaagggcggtgcgcagacgggcatcctcgctgatcagcgccatcgccagccgggcggcattgccgtgttgatcggtataggtgagcgccacaaccggatcggtaaaggcgtgcggtacgcttcgcagtatctgcgccagctgccgttcagcggccgcgtggaagccaagccccagtgccaggaacaggccgacgaccgcgatgatcgcccaggcgggcggcaaccagagcacactggtggcgcccagcagcgcagcgcccagcggtagcgacaaggcacgcacacagcccatggctcggcggccaaaggacagcgcagggcgtccttcgcgcagtcgcgcgtacagcgccgtggctcgtgccacctgctctgcggttggcttgacccggacagactcgaaaccggttagctggccgtcgtcgagaatcggcgtgacataggcgctgacccagtagaagtcaccgttcttgcagcggttcttgatcactcccatccagctctttccggccttcagctggccccacatggcctggaagactgccggcggcatgtctggatgacgtaccaggttatgcggactgccgatcagctcgtcacgcgagtaaccactgatggcgacgaattcatcgttgcagtagaggatcttgccgtgcgtatcagtggcagagatcagccgctgatgtcctggaaagctccgttcggtattgctgaccggtccgttgtttctcatcttgttctccctgagatgctctgccttgcgcctgacccgtcagctcaacggaatcattccgtaacaatagtcggcacggctcagcgaacttgaacaagacagcaaatatttttactgggcatggactaacggtcggtccattgcggacgaggccacgtccccagggttatcgctcgatagcgccgcggcgcaattgcacgaacagcgcctcgacctttgccctggcccagggcgtcttgcgcaggaaggtcaggctggacttgatgctgggatcgcttttgaaacagcggatatcgacccgctcggccaacccctgccagccgaaatgcgcgtgcagttcgaccaggatggtttcgagcgtcacgccgtgaaggggatcttttgcctgggtcatcggagttctcacggacatgtctgaattgaataaaaaagcccgccagcggcgggcctttcgagcgacacatcttacaggctgatgcgtgtcccgagcagctccaggaatgccgccagccaggccggatgcgccggccatgccggagcggtaaccaggttgccctgggtatgggccttatcgaccgggatgtcgacgtattcgccgccggccagccgcacttccggcgcgcaagccgggtaagcgctgcaggcacgtccctgaaggatctcggccgccgccagcagctgagcgccatggcacaccgcggcaatcggcttttgcgcctcgccgaacgccttgaccaggcttatcacccgctcgttgagccgcaaatactccggcgaacgaccgccgggcacgaccagcgcgtcatagtcctcggctcgcaccgcatcgaagtcgaagttcagcgcaaagttatggcccggcttttcgctataggtctgatcgccttcgaagtcgtggatcgccgtgcgcaccgtatcgcccgctttcttgtcggggcagacggcatgcacggtgtgcccgaccatttgcagcgcctggaacggcaccatggtttcgtaatcttcgacatagtcgccgaccagcatcaggatcttcttcgcagccattaacagtctcccagtcaggtgaaggtttgcagcgtccagcctacgcctcagccgctgcggttgaatatattgatcacgagccgatcgagcagcccccacatgcgctgatagatgcgctggcttagcgggcgggcgtgccactgctcgaggtcgatctccagactgcgggaaaaatcacgctggaagctggccaccaccgaggcactgaactggctgtcaatcgcctccagattggcttccaggttccagcgcagattccagtgatcgaaattgcacgagccgacgctcacccagtcatcgaccagcaccattttcatgtgcaggaagtgtggctgatattcgtgaatccgcacgcccgccctgagcagccgcgggtaatagcgctgaccggcatagcgcaccgaggggtgatcggtattacggctggtcagtaacagctgcacgtccacgccacgtcgggccgcacgcatcagctcgcggcgtacacgaccggtcggcaggaagtaaggcgtggccagccagatccgttgctgtgcatgccgcaggtttcgcagcaggctatgaagaatgtcacggtgctgtcgcgccgccgaatacgcaacccgccccatccccatgccggaggacgggttgacgggcaccttcggctgccgctgcggtaacggcagttgccagatccgccgtttcagacacaacgcccattgcacgtcgaacaaccgccgccagtcgtccagcagcgggccggtgatttcgaccattgcttcgtgccaatgctcgtccgggttgtcgggattccagaactcatcggtcgcgccagttccgcccacgaagcaatgccggtcgtcgatcaggatcagcttgcgatgatcgcggtgcaggttgcgaaatttcaggcgcagtttcagagggttgtattggcgaaagtcgatgcccgcgtcgctcaggcgctggcgcgccttctggcccagtttgaggcagccgaagccatcgaacaggcagcgcacccgcacaccgcgttcggcggcggccaccagggtatcgatcagccgatccgcacactgtccgtcctcgacgagataaagctccacgtccacccggcgctcggccgtatcgatgctctccaggatgcgcggaaagaacgtcggcccgtcggtcagcaactggaagcggttgccccctcgccatgggaatacgtcccccgccagcatcatgatcgaaggctccgcacaaataccgtgcgccaagcaggagtggcgagacagctgagagacattgaaatccttgtctggtaaatgttcaggacgttgccgagcgggcacatcgcgcaacctcgaccatcgtcccgtgcccttgcggcacgcctgttataggttcgcgccgccagcaggagttcccaaggtgtcggcctttacctacttacggctgattgtcctcgggtgtcagcccatacaccgccgccgcctgcgcgagccgcctggcctgggcgccacgcgccaattgcagcacgccgcgatcacgccgccatagatccagccaatgccgtggaccgaccgccagcgcggtatcgatctcatcggccaacagtgaaaactgtaggttcagcgccgccaacaagatatgcgttgcagactctccaggcgaaagacgcgagacttcagccgcgccggccaatagacccgacagctgcaattgcaaccgttgcggccagccgcattccaacccgacgccataaagccagctgaccagcgccgtcatcacatacaggtcttccagcgtgcggaacggtttgacgtaatcgtcccagccatcgccagccagccggcgacatgctgcgctttccagccgcaaacggccatgcggaacatccaccaacaggggcaacggcggccgcgtctcgatgattaccccgcgatcgccgggagccaccacacacagactcaggcgcggacgctcgccgagcgactcgtcgcgcgcaggcaccaacaaccagctcgccatagaaccggcggtgacgaaatccttgtggccggtcagcagtgatccttccaggcgggtcagcatatcggccgggcgcagcttgcggtcttccgtcgtacatagcgcaccgagcccttcgggcgccgcaggccagagtcgtcgcagcgcggcctggtaaccggcaagaaaggccagcccgggagtaactgccagccggccgccgagcaccgccagctcgaagacaccgccctcgcaacgagcccgcagttcggcaaaccagtcatccagtgcgagccgtggtggcaggcggtgcagcgggccgagcagcgcgtgccaggacatcgagttcactccaggggtcagcgaagagatagccaatggcaatcaccgtcatccaagcatcatcgatccgtaacagtcgtgacatcgcttctgcctagcctgagccggcatcactgatcgacggaacgccaaccataacaatcaagcgctccgattgcattgccacgccaaggctgaccaggagacaggtatgaccaccatcgcttttcctcgcaccacgcggcgcttacaagcagagcgcctgcacgagcaagccgcgctgcgcgaagcccaggccttgcgctatcgggtgttcagcagcgagttcggcgcacgtatgcaaggcgccgaagccgggctggacagcgacgacttcgacgcgcactgcagccacatcggcgtccgtgatctggacagcggcgagctggtcgccaccacccgtctgctcgataacctgacggcacgcaggctcgggcgcttctacagcgaagatgagttcagcctgcagggcctggcagagttggacgcaccgattctggagatcggccgcacctgcgtcgatccagcctaccgcaacggagcgaccatcgccgtgctctggggcgagctggccgaagccctgaaccagggcggttaccgttacctgatgggttgcgccagcatcccaatgcgcgacggtggcatccaggcccaggcgatcatgcagcgcctgcgtgagcggtatctgagtaccgagctgctgcacgccaacccgaagacgccattgcccgcgctggaactgccggacaacgtcatcgcggaaaccccgccactgctcaaagcctatctgcgactgggcgccaagatctgcggcgagccctgctgggatcccgaattccaggtcgccgacgtctttatcctgctcaagcgcgacgagctatgcccgcgctacgcacggcacttcaaggcggccatctgaatgggccggctgcggttgtacatgcggctggcgcggttgtgtggggtgattgggatcggcctgtcgttcgccagtgcgctgaagctccaggcgctggtcggaatcaggccatcccaggcaacacgccaccggctgtgccgctggtttctcgcccggctggccgcagcgctgccatacgaggttcggctgagtggtacccgccctgatcagccgatgctatggctcgccaaccacctgtcctggaccgacatcgcactgctgggcatgctgcagccgatggcgttcctcgctaaatccgaggtacgccagtggccgttgttcggctggctcgccgccgaggccggcacgcaattcatccggcgcggaagcggcgacagcagcactctgaatcagttattgagtgccgagctgcagcagggccgcaacgtgctgatttttcccgagggcacgaccacggacggcaccaccttgcgtacgttccactcgcgattgctggcctgcgccatcgaaacggatacgccgatccagccggtggcgatccgctatctgcgcgatggcggggctgatcctatcgcgccgttcatcggtgacgatgatctgctctcgcatctgttccgcttgctggcggccgacgtcgcagtcgtggagattcaactgctgcagcccatcgacagccgcggcatggaacgcaatcgactcgctcgctcttgccacaccgccatcgccgaagcgctgtatggcgctgctgcgccggtccccgtagccgcctgatacaagccgagcgcaaggaagcgctgctagactggccacatgaactatctcgcacatctgcatctgggcggctcgcagcccggcgagctgctcggcagcctgtacggcgacttcgtcaagggtcccttgcaaggccgctggcccgccgacatcgaagccggaatacgcctgcatcgacagatcgatgcctataccgacagccatcccctggtgctgcaagccaagcagcgctttcccagcgagcggcggcgctatgctggaatactggtcgacctgtttttcgaccactgtctggccgcgcactggcatgactatgccgatgaacccctgcagctgttcaccgcacgggtctatcaagtgttgcatgaagaggccgaactccccggcaagctggcgttcatcgctccacgcatggcggctcaggactggctcggcagctaccgcgacttcgccgtaatggagcaagtggtggccgggatgagtcgccggctttcgcgcccggaagggttggctggcggtgtcgccgaactggagcagctatacctgccactccagcaggattttcgcgacttctacccgcaattgcaggccttcgcgcggctcaacggcgccgcgccgagcgctgccgaccagctgaagtaaacgggcgctcgcctcgaatcactcagcccgcagcgctgcggcgaagcgctccagccagggctccgcgtcgctttcgggtgtgaccgtttcgctggcatcgagacgcagcatgtcctgcacctcgcgcacgcccaactcggcgtacaactctcgaaccagctcaccggcaccgcagaaggtatcgccatagctggcgtcgcccagcgcgatcacgccgcctggcaagccctgccaggccggaaactggtcgcggatggcggaatatagcggaacgaagttgtccggcagctcacccatcccggtggtggccgttaccaccagcaatgcttgcggcgcgaaatcgatgacctgcgccagctgcgcacgcgggtcatgccaagtctcgaaacctgctgccttcaggaccgttgcggcgtggcgggcgacatcttcggccgtgccgtagaccgtaccggagaggatggcgactttcatgatgagctccgctgcgaatggaagcgcaacattatgccgcattcggccctctagccgacgcagggagttctacactctcaacgagtgcgcctggtgtgacagggaatttatcgaccagagcgttgtcgcaaggcggtccttcagaggatctcgcgggtgcctggcaggcgcacggagccaacaaggcatgggcaggccaagtcctgctgccctggagagggaagtcgggatgccgaacaagaccgttcttaccagcgccgagctggcctacatcaatgatctcgtcacgggcccttccgcggaaacggaccaggcgcagggcggctttcgtctggatggtggcgacaaggccaacacccttctattgcgcctggcagccaaggccaagctgaccttcgacgccgaattcgacgactactgcatgtcgttcccgctacagctcgacaaggacgaattccagaccgtccatctgcaactcgcaccgccgaccatctacgaacgcggcccggtgctgcgcgcgtggcggctgcatctcgacgagccgctgccgttgctctccgacgatggccacgagaccgcactgagcgtccatgagctgtcaccgaacggccttctggtcgatgtcggagcgaagcgcaaggcgcccaagcacctgcatcttcacttggcgctccccggtgaagatgcactggagatcgacgcacaccggatccgcgatgccaagggcgggctgactgcgtacgaggtcgagtatccacagaatcgcgacgccgagcgcatccgctcatatctgtacgagcagcaccagcgcctgcatccagagctgcaaccggagctgccgaccgagctgttcaacgacactcccgagcactcctagcgtctgccacatcatttatccgctgtcccgatccgccgcgcccgtctcggcgtgatgccgccatgccactggtgtaagctggggcgcgcccaaccgcgcagccaggctgcgattctcttcaggcgactcagtgatgaccatgacccagccagcagccccgattctgatcaccggcgccagccaacgcatcggcctgcattgcgccgagcgcctgctcgatgaagggcagccggtgatcgtcagttaccgcaccccgcgccccagcctcgaccggctgcgcgaacggggtgccgtgacgctgcaggcggatttttccggcgccgaggggatccacgccttcatcgccgcgctcaagcaacagacgcaggccttgcgcgcgatcgtccataatgcgtccgattggcatgtcgaagcgccaggcaaggaggccgaggtgttccagcgcatgttcgaagtgcacatgctcgccccctacctgatcaatatccagtgcgccgaactgctacgccatggcggcccggcggacatcatccacatcggtgacgatgtcacccgcgtcggcagcaaaaagcacatcgcgtatgcagccagcaaagctggcctggagaacctgacgctctcgttcgccgccagcctggcgccggccatcaaggtcaacggcatagcgccagccctgatacagttcaacgaaggcgatgacgaggcgtaccgacgcaaggccttggctaaatccgcgctgggtatcgagcccggagccgaagtgatctaccagagcctgcgctatctgctcgataatccctatgtcaccggcaccacgctagcggtcaatggtggccgccacctgatctgatacgcgaaggaacatcatgcctcgactggaacccgccatggcgcgcatccgcgtcaaagacctacgactgcgcaccttcatcggcatcaaggaggaagaaatcctcaacaaacaggatgtgctgatcaatctgacgatgctctaccccgccgccgacgccgtgcgtgacaacgacatcgaacacgccctgaactaccgcaccatcaccaaggccatcattcggcacgtcgaagacaatcgcttcgccctgctcgagcgcctcacccaggaaatcctcgatctggtcatgacacacccacaggtgcgctacgccgaggtcgaagtcgacaagccccacgccctgcgtttcgccgagtcggtatcgatcaccctggccgcgcaccgggactgaaccatcgatcaatcactgccgtaggccagcgtggtcatcagcgcgcgctcaccgcggcgggcatccaaccgggtgtgctggatcaccacaggcacgctggaaacgaacacgctggcgtaatcggtctcccgagggacggcctcgggcgcctgcagatcgtcgaaacgcaaatgcaaggtgcgccgtgcgggcaccctcacctcgtacggaccggcgggctcgcggtcggcgaaatacagcgtcagctcgatcaccgcttccactggcccggagttgagaatgcaggccgtttcgtggctgcgcagcgccggatcgtcaggcacggggcccggctccggcaggtaaccctcggcaattacccaatgttttttcccaatcacactcgttctcctctacccgtggacagccggctggctatccttttcagcggaggcgccagagcgggctaaagttcccccggtgctctctggcccagggcatcggtcaaggttatgatcccgcccacgtctgcattgccgagacctgcaaaatgaacgatcaagaacgcaccgaactcgaagccgccgccttccgccgtctggtccagcacctgcgcagccgcccggatgcgcaaaacatcgacctgatgaatctggccggcttctgcagaaactgtctgtcgaagtggtacaaagccgctgccgatgacctggacatcgaggtcagcatcgacgaggcgcgtgaagaggtttacggcatgccctacgccgaatggaaaaagcgctatcaaaaggaagcgacgcccgaacagcaggccgcattcgacaagagccagaaaccatgaccgatatcagggacttccgcgcccggctgcgcaaccgcaaccaccctttcagcgagacgctggcgttcatcgccagtgcctatgactatcagccgagtcgctttttcaacggcaacgtggaaaacgccgccggcgaaaacgaaggctcctgcaagaccatcggactcgcggtactggaaggtttcagcaccgaggaagcgttgctggcattcggcgagcattaccaatcggtgctggaaaaccccagcggaaccgaccaccgcaacattcgcgccctgatggaaaccggactgcctggcgtacgcttcgaccaacagccgctgcggcgcaaaccgatcagcttcgacaccaaatgagcggggccgaccacgcgcctgagacggcgcgatggcagacgacccgcaaggctatggtcgttcgaaaccagatttcgcccgcgtgcaacggtgcctgccgttgcacaatctcgattaccggaacagacgctatcgtgcctcgcagccgggttctcccgctccgccaacaccgataggtctggccggcccgtccggagttctacaaatgcccatcgccgccctttccggcccgcagtacctgcgtgaaggcctgaagctgatcctgagccccggactacggctgttcgtcatcctgccgttgaccgtcaatctgctgctgttcgccgggatcatctatttctccatgcgccagttcggcggttgggtcgacacgctcatgccgcgcctgcccgagtggctgatgttcctcgaatacatcctctggccgctgttcgtggtcctggtgctgttgatggtgttcttcaccttcaccatgctcgccaacatcatcgcggcacccttcaatgggtttctcgccgagaaggtggaaaccgtcgcgcgtggcgaggacagctcaccacccttcagttgggccgaactgctggcgatgctgccacgcaccatcggacgtgaagcgcgcaagctggcctatttcgcaccgcgagcgattgcgctgctgattctctcgttcatcccggcggtgaacctcttcgccgctcctttgtggctgttgttcggcatctggatgatggcagtgcagtacatcgactatccggcggacaacaacaagatgagctgggcggagatgatggtgtggctgcgccagcggcgctggaagagcctgagcttcggtgcggtgacttatgccgccctgcttgtaccggtgctgaacctgttgatcatgccggcggcggtggccggcgcaacgctgttctgggttcgcgaagggggaaagaagcacctggtacccgctgcccgtcagtgaaccgcctaggcgatgattgtctagatccgaacaccttcggattcaggagattcgcacatggcacttcgcgcactggctatcaactgcacactcaaaacttcgccaaccccctcgtcatgcgatttgctgctgagccagaccatgcatgaactggagaaactcggggtgacctgcgagcagatacgcgcggtggatttcaacatcaagcccggggtgacctctgatgaaggggcgggcgatgagtggccggcgatccggaaaaaagtcctcgacgccgacattctgctgctcggcactccgatatggctgggccatccggccagcgtctgccagcgagtgctcgaacgcctcgatgcctttcttggcgaagtggatgaccagcagcgcatggtgtcctacggacgggtcgcctgcgttgccgtggtcggcaacgaggatggcgctcaccacgtagtggccgaactgtttcaggggctcaatgacgtgggcttcagcattcctgcgaatggctgtacctactgggttggacaggcgatgggctcgatcgactacaaggatgtcgaggaccccggcgagaagatcgccaagaccaacgcgatgctggcgcgcaacgcggtgcatctggcgaccctgctcaagcagtccggctatcccggcgcttcgacatagccccgctgcgccaaggcggcggctatcgatctcgcaatcggcggctcggccgaggccagccgccgacttcgccacggggacgaatcaagccagggttttcagcgcctcgcgactgaacggcaggatgtcctgcatgcgtccctcgcgaaccttcagcgcccagtccggatcgcatatcagcgcacgccccacggcaaccagatcgaattcctgcttgttcaggcgctcgagcagaccttcgatattcgccggctgcgccaccttgtcggtcttgaccatgaactgcaggaattcaccgtccaggccaacgctgcccacggtaatcgtcggtttgccggtcagttgccgggtccagccggccaggttgaggtccgagccctcgaattccggctcccagaaccgccgcgtcgagcagtggaaaatgtccacacccgccgccgagagcggtgcgagaaaggcctcgaggtcctgtggcgtggtgaccaggcgagcggcgtagtcctgctgcttccactgcgaaaagcggaagatgatcgggaagtcggcacccaccgcagcacgcacggcttcgatcagctcgatggcgaagcgcgagcgattggccaggctgccaccgtattcatcagtgcgctggttgctgccttcccagaagaattgatcgatcaggtaaccgtgcgcgccgtggatctcgacgccatccatgccgatcgccttggcatcggccgccgccttagcgaacgcggcgatcactgcctggatgtcctgtttggtcatgccatgcacgacaacctggccgtccttgaccttttccatggggccgtagccgagcacttcgggctccggctcggtgcctttgcggcgcacattgccgacatgccagagctgcggcacgatcttgccacccgcggcgtgtacggcgtccaccacggctttccagccggccagggcgtcctcgccatagaagcgcggtacctgcgggtagccattggcggcggcgtggccaaccgtggtgccctcggtgatgatcagcccaacgcccgacgcggcacggcggcggtagtattcgacgacctccgcggtcggcacgccattgggcgagaacgagcgggtcatcggcgccatgacgacacgtgtcggcagttgcaggctgccgagctggaaaggctgaaacagggcattcacggctgcggtcattgttgtctcctggttgagggtatagaagcgaccggtcgtctcgccgttcgccataaaaaatcagcggaccgtcagtagacgttccaactgggtcagaaagatttccagcggccccacgctgcggccgaccttcatgcgcaacagcgccccttcccaggcgttgccgatgaactcggccagcgcctggcaatcggtgtcgatggggatttcagcctgagcccgggcctgctcgaggcagccggccagcagcgcgacggaccgctgcaggatcgactccacctggcggccgatcggctgcgacagttcggccatttcgaagctgagactgccgatgaagcagtggtattccgggtgttcctgacgggcgaagtgcgcgagcagctctgcgtagtaaccgaggatccgctcgcgagggctcagcgcagagcggcggagcgcagcctggtagcgctccagccgaggcgtgtacagatgttcgagcgcctgcagggcgaaatcttccttgctggcgaagtagtgatagaaggagcccttggggatgccggcggcctggacgatctccagcaccccggtaccgtgatagccacgccgggtcatcacctgcgcgcccttggccaggatcatttcacgcttgtcgattcgagctcggttgttcatgggccgagcatatgaccggtcgtctcgcccgaatagcatcatccatgacgcttattgcggcgccacgttgccaacgatggcgcgcggaccagcaggacaatgacagccaggcacagccaggagctgtgccggtgaccgatcagcctagcgcctgctcgatcgtctggatcagtgccgggtcgtccggcgcggtgcggggtgaaaagcgcgccagcacgcggccatccttgccaaccaggaacttctcgaagttccagctgatgtcgcccgggaaatcggcgccttcaccggccagcagacgatacagcgggtggcgctgcggaccgttgacctccagcttgctgctcagcgggaagctgatgccgtactgctcgctgcaaaactgcagaatctgcgcgtcgctgcccggttcctgcgcagcgaactgattgcacggaatccccagcacgccgaaaccacgatccttgaaacgctggtgcaaggcctgcaagccagcgtattgcggggtcaagccgcattcggaggctacattgaccaccagcgtcagctggcttttcagcgccgcaagcggcaactcctgaccgccgaggtcagtgaggaccaaatcgtggaacgcgctcatctctcttctccagagggtaaaaaagcgctccagcatcaccgaagcgctttcatcgcccgatcgtcgcgatcgagcctttcgccatctgccttgcagcgaaaaatcagtggtggtgaccaccttccccatgaacgtgaccatgggcgacttcttcgtcgctggcatcgcgtacatcgacgaccttgacctcgaagttcaggcgctggccagccagcggatggttaccgtcgactaccacgtcatcgccttccacatcgcgaatggtgacgatctgcatgccgccatccggaccggatgcgtggaactgcataccgacttcgagctcgtcgacgccttcgaacatcgaccgattgagggttgcgaccagctccgggctgtactcgccataggcatcctggggttcgatggcgaccttcagctcgtcgccgccctgcttgccttccaaagccctttccaggccggagatgatgttgcctgcaccatgcaggtagaccagcggcgcgccgccggccgagctgtcgatcacctcaccggcgtcgttggtgagcgtgtagtcgattgacacagccttgttcgcggcaatctgcatgagacgtaacctttgcttgggaatgtgatgccaaagtttaaccgcgccccgcgccgaatgcgaaccgagcccggataaacggggtcagcaacgtatctggacaccatcgtagctcctgcatcgggcggagccgcatacaacctttggagaacatcgattcgccatgccctgtgccagaatccgcggcgcacgctaagcgatgccattcaacaattattaagcatcccgaggagcaccgatgtcggctcgaaacatcctggtgattaactgcggcagttcgtcgatcaagttcgcactggtcaacgaagcgcaagccacgttcccgctgcaaggtctggctgaacgtctcggcagccccgaagcggtactgcactggcagcagggcgacaccaagcagagcctggatatcccgggtgccgatcatcgtgccgcgctggcgcagttgttgccgctggcgcaggacgccgccggtggcaagctcgacggcatcgggcatcgcgtggtccatggcggtgagcacttcaccggctccagcctgatcaacgaagaagtgctccaggcaatccgcgacagcgcgcagctggcgccgctgcacaacccggccaacctggtcggcatcgacgcggccatggccctgttccccggtctgccgcaggtcagcgtcttcgacacggcctttcaccagacgatgcccgagcacgcctttcgctatgcgttgcccgagttcctctacagagagcacagcgtccgccgttacggcttccacggcaccagccacaactacgtcagcaagcgtgccgccgagatgaccaacctgccggtcgacgacagctgctggctgaccgcccatctgggcaacggctgctcgacctgcgccatcgtcaacggccagagccgcgacacgagcatgggcctgaccccgctggaaggcctggtgatgggcacgcgcagcggcgatgtcgaccccaatctgcacagctacctgaaccgcacgctcggctggagcctggagcagatcgaccgcatgctcaaccacgacagcggcctgaagggcctgtccgggctctccaacgacctgcgcaccctgcatgaagcccgggtagcgggccatgccggcgcgaccttggcgctggaggtgttctgctaccgcctggccaagtccctggcgagcatggcttgtgccctgcccaagctcgacgggctgatcttcaccggtggcatcggagagaactcgatcgccgtgcgcagccgcacgctcgagcatctcaagctgttcaacttcaagctggacgaagaagccaacgctcgctgcacgcgcggcgtcggcggagaaatccaggcggcgggcagcacgcgcgttctggtcgtgccgaccaacgaagaacgccagatcgccctggacaccctcgcactgcttgacgcctgacaactcgccgcagcgcttcgcactgcacaatccgacgaccctatggcgcgtcggattggtcgactcggccccgcatcgcccatcgctcgacaggagatcaccatgcacacgctctttctcgcccccagcggtttcggtggcggcctcaattccgtcagccttggcctgatccgggcgctggaacgcgccgggttgaaggttggcttcttcaagcccatcgctcagcccttcccgctcgatcatgggcgcgagcgctcctgcgtgctggtggaaaacacgctgaacatcgccgcacctgaaccgttgccgctggagcaggtggaacgccagttggccgacggcgagctcgatctgctgctcgaggatgtggtcagccgttatcaggaagtcgccaccggcaaggacgtggtcatcgtcgaaggcatggtgcctacccgcgagttcaaccatacctcgcgcatcaatacccacctggcgaaaagcctggatgcggaggtcatcctgatcgccgcgcagggcaccgataccctcaagcgcatggccgagcggatcgagattcaggcgcagctgttcggtggcgccaaggatccgaaagtactcggcgtgatcctcaacaagatcaagagcgacgatggcgtgccggctttcgtcgagcgcctgaaagagcaactgccgctactcggcagccaggacttccagttgctcggcgccatcccctacgccgagcggctgaacgccctgcgcacccgggatatcgcccagctgctcgatgccaaggtgctgcatgccggcgaagccgagcgccgccgggtcggcaagatcgtcctgtgcgcccgcgccgtccccaataccgtgcagttgctggaacccggtgttctggtcgtcacgcccggtgatcgtgacgacattatcctcgccgcgagcctggcctcgctcaatggcgtcgagctggccggactgctgctgtgcagcgacttcgctccggaccctcgcattctcgagctgtgcaaggccgcgctcgatggcggcctgccggtcatgacggtacagaccggctcctacgacaccgccaccaatctgttcgccctgaacaaggaaacgccggccgacgatatcgagcgcgccagccaggttaccgatttcatcgcccagcacttgcagcccgagctgctgcatacgcgcctcagcgtgccacgcagcgagctgcgcctgtcgcctccggcgttccgctatcagctggtccgccgtgcgcagcaggccaacaagcgcatcgtgctgccggaaggcaacgagccacgcaccatccgcgcggccgcgatctgccaggagcgcggcatcgcgcgctgcgtattgctggccaaacccgaagaagtgcaggccgtcgcccgcgagcaaggcatcgtgttgccggccagcctggaaattctcgacccggagctgatcctcaaccattacgtcgaacccatgtgcgagatgcgcaaggcaaagggactgacccccgatgatgcccgcgaacagctcaaggacaccgtcgtgctgggcaccatgatgctggcgctcgacgaggtcgacggtttggtttccggcgcggtgcacaccaccgccaacaccattcgcccggcactgcagctgatcaagaccgcgccgggctacagcctggtgtcctcggtgttcttcatgctgctgccggatcaggtgctggtctacggcgactgcgcagtcaatcccaacccgaacgccgccgagctggccgagatcgccctgcagagcgccgagtccgccgtcgccctgggcgtcaacccgcgcgtggcgatgatcagctattccaccggtacatctggcagcggcgcggaggtggagaaggtcgccgaggcgacccgcatcgcccaagcgcgcgcacccgagctgccgatcgacggtccgctgcagtacgacgccgcctccgtgctgagcgtcggccgtcagaaggcgccgaacagcaaggtggccggacaagccacggtgttcatcttccccgacctgaacaccggcaacaccacttacaaggcggttcagcgcagcgccaacgtgatcagcgtcggcccgatgctgcaaggcctgcgcaagccggtcaacgacctgtcccgcggcgcgctggtcgacgacatcgtgttcaccatcgcgctcactgcgctacaggccgacagcggcaagcaagccgagtaacccaccggcgtcacgacatgcctggcctgcctcgggccaggcatgtcgtcattccgtattcctcgcttgcagttcggtgcgcaatcggtacgcttgccgcctttcgacggatatacgagccaatcgatgctgagtgtccttcctgctccgctccggggcgtccttgccggcttggcgctggcgctgaataccttgttctggtgctggccgctttttgcgctctcgctgttgaaactggcgttgccgttcccacgcatccaacgcgtactgcgcttcgggatgcactgggtcgccgagtcatggatggcgggcaacggtcgctggatggacagcgtgcgccgcacccgttgggacgtgcagggcctggacaaggtcgacatgcggcactcctacctggtcaccagcaaccatcagagctgggccgatatcctgatgctgcaataccagctgaaccgccgcatgccgattctcaagttctttctcaagcaggaactgatctgggtgccggtgatcggcctgtgctggtgggcactggaattccccttcatgaagcgcttcagcaaggaatacctgaccaagtatccggaaaagcgtggcgaggatctggcgaccacccgcaaggcctgcgagcgctatcggaccaacccggtatcggtgttcaatttcctcgaaggcacccgcttcaccgaggacaagcacaacgagcaggcctcaccctaccgctacctgctcaagccccgggccggcggtatcgccttcgtgatcgacgcgatgggcgaacagctgacgtcgctgatcaatatcacgattcattacccggacggcaacccgagcttctgggacctgctgtgcggacgcatcggccaggtggtgatgcgtattgactcgcagcctatccccgccgagttcctgcatcgcagctacgatcaggatgagggctatcggctggcattccaggaatgggtcaaccagctctggagtgaaaaggacgccctgctcgaaaccctccaccgccagtacccgccggcccgctgacctcggcaggtttggctattcggaccaattgtcctggtcggcccagtccaccgtccgggggaacgccagggcgtcgtcgaccgacaggcccggggccaccaggaagccctgcatcacctggcaatcgtgagcgatcagccagtctcgctgggccagggtttcgaccccctcggcaatcacctccaggcccagattgcgccccagatcgatgatggtgctgaccacggccgcatcgcggggcgaatcgagcatattggcgatgaacagccggtcgatcttcagtgtgtccagatcgaaatgccgcaggtaggccagcgaggaatagccggtgccgaaatcgtccaccgccaccctgacacccagctcgcgcaattgtcgaagcttgtcgcagctctgctcgagatcttgcatcagcgccccttcggtaacctccagctcaagctggcgcgggtcgagctgtgactcctcgagcagacggcgcagttcgtctatcagacctgcccgaccgaactgcaccggactgatgttgaagctcaggatcatcttttcgccgaaccgctcgcgccaatcacgacactgggcgagcccttcgcgcagggcccactcgccgacgcggtcgatcagccgggtttcctccagcaatggaatgaaaacgttcggctcgaccttgccacggccactgtagtcccagcgcagcagcgcctcgaagccgcgcagctcacctgtttcgaggatcacctgcggctggtacgccagggcgaaaccattgcgctcgatggtgctgcgcaggttctcctccatcatcaggcgcgcatgcgcgcggccgttcatctcgttggagaagaagcggtattgctggcggccattgcgcttggcttcatacatggccatgtccgccgagcgcaacagttcctcgacgctctggccgcaatcggggaaatgggcgatgccgatactggcgcccaaggtgacatcggtgccgtcgatggtatggcgcaccgaaatcagctcgatcagcttctccgccaccttggcggcgtcttcgggatgatccagcgagtcgagcagcgcggtgaactcgtcaccccccatgcgggcgatgatgtcgtacggacgcatgcaggcttccagcacccttgccacacggcaaagaatctcgtcgccggcatcgtgtccgagcgagtcgttgatgcgcttgaatccgtccagatcgatgtagaggatcgccatccgcttgccgttccggtcgacccgcgccaacgccgattccagcgcctggtgaaaacctcgtcggttcaacaggcctgtcagcgagtcggtgaccgcctgcgtctccagctgtacgtgtagattgcgcactaccgacatgtccagcgcgatgaccaccatcgagcgctgctggcgtggcagcggcgacgacgacaaggccaccggcagggtgctgccatcggcggtatggagctgcgcctcgtgcagacggtaggtgttaccgctgcgccattgcttgtagaactccgtgtcgcgccaggcctcgggcatctgtggcgcggcgagatgctcgaccaacgccgtgccctgcagagcatcgatgctggtgtgcagcatctgcgcgatcgccggattggcgaaattgatatagccatcctcgcccaccaccagaatgccctcggcggcgttgttcaacaccgaggcattgaaggcgcgggcactgtcgagctgctgggtcagcagctgcaaatcgcgacgattatgttcatgagtgagcagtgtgttgatcttgtgcttgaggacctgcggatcgaagggcttgagaatgaaatccaccgccccggtcgcataaccccgcagcaccgactcacgggtatgcgcgatggccgagacgaagatgatcggcgtgtagcgcgtatgcgggctgccacgcatcagacgcgccacttcgaagccatccatgcccggcatctgaacgtcgagcagcaccagctccacgtccatgtcgagcagcgcctgcagcgccgcttcgccggaattcacggtatgcacctgccagtcaccatcgccgagcagggcttccatggcgaccagattcgcctcgcgatcatcgactacaagcagtgtccgggtacggggctgcgatttggcttgtaaccgggccatcagcgctttcctctgcccggcgaacagccatttccgacaacgacgacgccgaccgctgcgccaatccggcatgaacgatgagtcacacgcttctccttatgggctcttgtgagggtcatcgacccgcgccagacaacgccgcagcagctcgaccaagctgcgaccctcgaccggtttgaacagcacatcgtccgcgccaagggcgatgcagcggtcccgggcggccggatcgtcaccggccaccaatgccacgatcggcacctgacaaccatagtcgtttctcagctctcggatcagcgcaggcgcgccctcgtccgcgagcgccatgtcgacgagtgccagatcgaacgcatcttcgtcgaatcgctcgagcgcttcgatgccgttggtcgccggaaccacctgcaacccctgctcgtcgagcagggcgctcaaggcgtagatcgcccgcacatcggactccaccagcagcactcgctgccccagcagcggttgccccgcctcctccatgcccagcgccgcggactcgaccgcgggcttcaatgcatcttccatatgctccagtccctctgtttttgacaacgcaaccgatggataacgcccaagccgctgcagattcttgtccgacagcggcttctggctgttgagtactacacgcacgccttcgagcggccgcaggcgatccagcgcctcgagcaggtccaggccgtcttcgccgggcagatcgaaatcgatgaccagcgccgtgaagctgtgctcggcatacgccagcctcgcttcatcgctgcgctggcattcggtgacccggtagccgaggcgatcgaaatgttcacgcagttgccggcgtcgttgcggatcggtgtccaccaacagcaacgtcatcgaacgctcttcctggcgcgccaggtcgacgaacaggcgttccagctccgcctgggccaccggtttgagcaggtagcgtgaaccatcgtccgtccagccctgcggctgcggcacgcaggaaatgatgaacaccggcgtgccctggtgccggggatcggcgcgcaacatccggtgaacctgccagccgctgatgtccggcagcagaatgtcgaggatgaccgccgcgaaccgatcctggcgaagcgcgtccagcccctcctggccggtgccacaaaccacgctgggaaagccatgggactgcgcgacctcggctaccaccgaggcgaaatcggcatcgtcctcgacgatcagcaggccaccgccctggccccgatgcggcgaagcccgcagcgtccggatctcggtcgtcgcggccagcttcaatggcagctcgacggtgaaactcgagccttggcccggcgcgctcctgagacgaatactgccgcccagcacctcggccagctgccgggcaatggccagtcccaacccggtaccgccatactgccgactgatggagccgtcgatctgctggaacgcctggaagatgcgttcgtgctggtcctcggcgatgccgatgccggtatcgttgacgcagattcgcagcatggcctcgtcaccgggctgctctgacggctcgcatgacacgtgtacgtccaccgacccttgctcggtgaacttcaacgcattggtgaccagattgcgcaggatctgctgcaagcgcgcacggtcgctgacgatcgagaccggcacgtccgggtctatgcgcgaagagagcgcaagcccgttctgttcggccatcggctcgagcccggcgagcagctcggccagtagctcggccaggtcgaccggctccggcttgatctgcatgttaccggcctcgatcttcgccagatcgagcacgtcattgatgagctggagcaaatcctggccggcacggtgaatgatgtcggcgtgccgaacctgcttctcggtcaggttgcttgccgcgttctgcctcatctggtcgctcaggatcaggatgctgttgagtggcgtgcgcaactcgtgcgacatgttggcgagaaactcggacttgtaacgattggccaccaccagctcgttggcctggtcgcgcagccgccgctccgccgccttgcgatgaccgatatcgatcaccaccgcctgcaccagcagctcctcgccgctgcgcagtggtgataggccgacttcgacaggcaacagctgaccgtcccggtggcgaccgtacagctcgcggttttcgccgaggcgaagcgactcggtcgcctgcccgaagcggtgccgcacctcgtgataggcccggcgcatcgactcgggaatcaacaactcgaccggctggcccagcaactcctggcggctatagccgaacagcaactcggtctgccggttgaccatgacgatgcgtccgtcgtagtcgaacagcaggaaggcgttcggcgacgcctcgacgacattacggaatcgctcttcgtcacgcttgcgctgctgcaggtcgaccaggttgagcaggtggtggatgccgtcatcgcgcctgaaactggtcaggctcagcgagacggggatgggcgtgccgtcctcgcgcaatgcctggctttcctgatgattggcctccatccgcgcgccgccgagcgggtcgctcagtgcacccgggacataccggctgaggcgctcaccggcaagcagaccagcactgctaccgagcagcgccgcggcactctggttggccagctcgattcgcccgcggtcgttgcacaacaaggtcgcgaccggcaactgctcgatcagttgacggaaccaggcctcacgctcctgcagttgttcgccgagggcctggctgctgcgcagcgcccgttcgcgcaggtagagatagccaccgatcagcaacgaaaacagcaccgctgcggtcatcgcggccgccaggttgtacgcaccgctggtcctgttcagcagcgcttcgtattcaggcgtgctggcgacttccagctgccaactgcggccgtacatgtagatattgcgggtgcgatggaagcgggcatcgctactgactggcacgcgtcccaccagcagcgcctcagccggcgcggcggcatcgtatagctgcagctggaacagcttgctgcgcgagcccagcacgccctcgatcaggtcggtcagccgaaacgcaccgtgcaaggtgccggcaaaggcggcctgacgttcctccagcgtggtgatcggcgcagcgacccggtacagcggaaggtaaagaaggatgcccacctgcgcgttctgctcggtttcctgcttgagccgtaccggcccgctgagcatgggcgtgccgatattgcgcgcggcggtgaccgcttccttgcgcgtttgctcgctcagcatatcgaagcccaccactcgacgattgcgccaatcgagcggatggatgaaatcggtgatcagatactcgtcgcgctccccgcccgggtacatgcgaaagccgccgcggccatcgccgcgaatctgctcgagtacagcgctcagattgtccgcccgcgcgtagcgcgccaacgcgaccgcctgaatgccggggtagaaatcctggagttgaagctgatcgacggcgcggttccattcgtccagcttgacggattcgccgcccacgaagagaccggccagcccgcgcaggaccatctcgtatgcgcgcatccgctcacgcagattgctttcgacgtcgttgaccgccagattgaagcgctgcgcctgctcggcgcgaatccggtcttcctggacctgccattgccagacgacccatcccccgagcccgaccatcaaggccaatgtcactaccaatggcagccaaggcttacgagaatggagagcagaacgatctaccattcaacctcctcagtgccaccacacggctggctgtcaccagcttcagagtcgtggcggcctcagaggttcaatgctagctgaagaaaagatggaacactgacgccacttatatggcgtagacggccccgttgcggggccgcccaacgaagagacttatagcggccgcaggttgatttccacccggcggttctgtgcccgccctgcggcggtgtcgttgctggcgatgggctggctggggccggcaccgaaggcggaaatccgcgcggtcgccacaccattgctttccaggtaggccgctacgctgcgcgcgcgccgagtggagagatcctgattgagttgcagcgagcccgtgctgtcggtatgaccgacgatatcgatgccgttcttgttgaactccttgaacacctgaaccagcgaattcagcgtcggatagaagctgctggagatatctgccgaattgctcgggaaggtgatattgcccggcatgaccagcgtcaggttgttgccgtcgcgctggacctgcacgccggtgccttgcaatgtctgacgtagcttggcttcctgcgtatcgacgtagtagccatagccgccacctgccgcgccgcccacggccgcgccgatcagcgcacctttgccacggtctttcttgctggaagtcgcagcaccgatcaccgccccgctgaccgcgccaatgccgccatagatgccggccttgcctgcctcgcgctcaccggtgtaagggttgttggtacagccaccgagcagcgccacggtggtggcaatggtggtcagcgtaatcagcttcttcatggttacttcctttatctgcgggacctcagcctgtcgaaaaataccgttccaggctgcaatgcggcgctaggttaacatccgtcccgcatcagaaccggaacgcgccgacgaacccgcatgtctcaggcgcggacgaaggggttctccctcatctcgtcgcccaggcgggtctgcgggccgtggcctgtgatcacgatcgcatcctcgtcgagacggtacaggcgctgcctgatcgaccgctcaatggtggcataatcgccgccccagagatcggtacggccaatgccccggcgaaacagcgtgtcgccggccagcagcagtttcgcttcaggaaaccagaagctcatcgagcccggcgtgtgccccggggtgtgtagcgcgacgccacacccacaggccagcgcctcgtcatcgaccagccaaaagtcgggcgccggcacgggcgtatagggcaccccgaagagcgcgcattgctgctccaggctatcccagagggattgatcgtccttgtgcaggtgcaaggtcgcgccggtacgctccttgatctgtcccgacgccagaaaatgatccagatgcgcgtgggtgtgaacgatgctgacgaccttcaatcccaatgcttcgatgcgcgcgagtatccgttgcggatcgccgccgggatccaccacgatggccctgccggtcaaggagtcgccgatgattgtgcagttgcattgcagcggaccgacaggaaaggtttcactgatcagcgtatggctggtgtctgacacattagctcctcggtcgagcgaattttttcggcaaaacagccactactaacctatacggcacgtgcgcacgtgtcatctggacggagagtcgagccattgacataacggagctgcagcgcattttcgatgccctgcccggattgtttctagtagtcgccaacgatgccgactacacgatggtcgctgtcagcgaggagcgcttgcaggcgacgctgtcgcgccgcgaggaagtcatcggccgcccgttgttcgaggtctatggcggcggcgaagcagcaccggccagttcgtccggagtcaatcagctacgcgcgtcgctggccgaagcggcacgtaccggtcttccccaggtgctcaagacggtgggctatccgctgcggcgtccggacgccgaaggcgacggctacgagaatcgctactgggacgtgatcaacgtcccggtactggatggccagggccgcgtgagccacatcatccaccgcgccgaggacgtcaccgaaagcctgctcgaccaggagtcggcggcgctgcgcctgcgcgagagcgatgagcggctcaacgccgcgctgctggcctccggcaccggtaccttctactgggacctgcgcaacaaccgcctggacatggacctgcccatgcagcgcctggtcggcctggagggcctcacctccggctggctggacgacctgctcggtaccattcatccggaagaccgggatgccattgcgcagcaatgcgaacgctgcgcccgctacggcgaagacttcgaaatgcagttcaggatcaggctaccggagggcaacgagcgctggctcttcgaaaagggccagaccttcgccgacgcccacggccggcctgcgtacatggtgggcgcctgcctcgacatcacccagcacaagcgcaccgaacgggcactgcaccgcctcaacgaaacccttgagcagcgggtcaacgcggaggtcgccgcacgcgccaagaccgaagcggcgttgcgtcagtcgcaaaagatggaagcggtcgggcagctgaccggcggcctggcgcacgatttcaacaacctgctggccggcgtgatcggctcgctggaactgctctcgcttcgcctggaccagggccgtaccgacgacctgcatcgctacatccgcagcgcgctgtcatcggccacccgcgcaaccgcgctgacccatcgcctgctggccttctcgcgccgccagacactcgaccccagccctaccgacctgaacgcgctgatcgagggcatgatggagttgctgcagcggaccatcggccctctggtgagctattcgacgcaactgtccggcgacctctggctcacgctctgcgacaccaaccagctggaaaacgcattgctcaacctgaccatcaatgcgcgcgacgcgatgcccgacggcggggagctgacactgatcagcgagaacgtgacgctgaacgagcctctcgcccaggaactcgggctgcagccgggcgagtacgtggcgctcggcgtccgcgataccggcgtcggcatcccaccggagcgaatcggctacgtcttcgaccccttctacaccaccaaacctttgggcgaggggacagggctgggactgtcgatggtctacggattcgccaagcagtcaggcggtggcgtgcgcatcgagagcacggtgggcgaagggaccagcgtctggatctacctgccccaccaccaaggccagtccgccagccagcatgcaccggtcaccacggacctgccccccgcatcggtgcacggcctgaccgtgctggtggtcgatgacgagcccaacgtccgcacgctggtgaccgaagtgctgcaagagatggggctcaatacgctggaagcggccgaaggccccagcggcatgcgcatcctcgacagcggcgcgcacgtggatctgctgatttccgatatcggccttcccggcggcatgaacgggcgccaactcgccgacgccgcacgggaaaagcgtccgtccttgccggtgctgttcattaccggatacgccgaaggctcggtgctgcaacgcagctccgcgcgatacgattacgaggtgctgaccaaaccattcaccatcaccgatctggaaggcaaggtccgcggcatgctcacgcctgatcaggaatgatccaggcccggcggccggctgatgccgccaccgggcggcagtgttaaaccgacgaaatggtgtcgcagccctcttccagccagcgcgcgatatccaaccggatgcgcttcttgtccagcttgccgacgctggtcttgggaatctcggtcaccaccgcaatctgctgcgggatcgcccatttgttgatctgcccctgttccaccgccggttcgagaaaccgttgcaacgacgccgcgtcgagcgtcttgccttcgcgcaggaccaccagcgcgaaaggccgctccccccagcgttcgtcaggcacacccaccacggccacatcacgcaccgcttcatggcggctgatcaacccttccagggccagggaggaaagccattcgccgccggtcttgatgacatccttgatgcgatcgcggatatcgatgttgcccatctcgtcgagcgtggcgacgtcgcccgtatgcagccagcctccggcccagagctcctcgctcttctccggattgccggcgtagccctgggtcagccagggggcacgcagtaccagctcgccctgggactcgccatctgccgggaggaagctgccatcgggcgcctggatcgccgcatcgaccagcaccaccggcacgccggccttgagccggtagttggtctgctcgtcgtcgctggcctgacgcagctcgtcgttgatatgcgcgccggagatcaacgggcaggtttccgacatgccgtaagcggcgaccagctgcatgccgcaggcacgggccgactcataaagacctcgcgtcagcgcgctgccgccgatggtgatcttccagccgttgaaatcggtgccctgcgctgccttggcattgagcagcatctgtacgatggtcggcacgcagtgcgaaaacgtcacctgctcccgacgccatagttcgatcagcaattcggggtcgtaacggcccggatacacctgcttgaggcccagcatggtcgccacgtatggcagtccccaggcatgcacgtggaacatcggcgtgatcggcatgtagacatcccccgccgccagcagctgggggttttcgcggcagccgaccgtcaccgcgccggccagggtatgcagcaccagctgccgatgggtgaagtagacacccttggggtctccggtcgtgcccgtggtgtaaaaggtggtggcgaccgagttttcgtcgaagtcggggaattcgtaatgcggatcggccgctgcgagcaggctttcatattcgccgatgcagttgggtagctcgcagttcttgtcatcggcatcggtgatcaacagggttttatcgaccgtggtgagctgcccggcgatggcctgatacagggaagcgaattcgctgttgaccaggacgaaacgatcctcggcatgattcatggtgtagagaatctgctcgggcgacagccgcacgttgatggtgtgaatcactgccccgatcatcggcaccgcgaacatgcattcgagatagcggtgactatcccaatccatcaccgccacggtgtcgcccgccttcaccccggcggccgtgagtacgttggccagccgggagatgcgctggttcaacgtccggtagtcgaagcgcagctgatcgcgatagacgatttcacgggttcgctcgtagcgctggcctgacagtagcaggctcttgatcaacagcgggtactggtaggcattcgcggcgggtttgatcactcgggtctgcaacatagggcttcctgttattgatgttatgagatccgcacctggtgccggggctcgccaacctggctgcgcatcgcccctggcaaccagccgttcggccgctggactgccgcgtctcacccacaccgcaagccaccgatcaggcgatttcgcttgctgccaggcggacgccaaggcctatcaatacgacaccggtgacgcggtcgaaccagtgccccatgcgcgcaaaacccgctcgtacgcgctcgcgactgaacagccaggccaccaggcagaaccaaacgccggtggcgaacgcaagatataccccatagccggcctgaaccgcgagcggggtatgggggtcgataacgactgtgaataacgagagaaagaacagcgtggccttcggattgaggccattggtgacgaatcccatggtgaaagaacggcgccacgacggcgcgtcctcgcgcccggctcgaggcagatcgccgaccgccgcgggtttcgctcgcaaggcctgaatgccgagatagaacagatagccggccgccagccacttgaacaggttgaacagcacgatcgactgcgagacgatcagcccgattccaagcaacgaataacccacgtggagcaggatagcgctgcctacacccatcgccgtccagctgccgctgcgctgaccacgggtcacgctttcccgaacgaccaccgcaaaatccggtccggggctggcaacggcaagcaggtgaaccagcgccacagtgagaaattccgtccagtacatctatcgactccgctatttcaggggggcggaacatccgcccaacgattcttacgagtaaagtccatgagcaaccgccgcgccgtattcctcgacctcttcccgctcgaccagggtgacctggacctgacgccgctgcagtcagccttcggtgacctggcctgccacgcgcagaccagcgcttcgcaagtcatcgaccggctgcggggcgccgaaatcgccatcgtcaacaaggtcgccctggacggtgcggtgttcgccgcctgcccggacctgaagctgattctggtggccgccaccggcgtcaacaacatcgatcttgaggcggcgaaacagcgcggcatcgtcgtctgcaattgccaggcctacggcaccgcaacggtcgcccagcatacgctgacgctactgctcgcgctcgccacgcgcctgcccgactatcagggggctgtagcccgcgggcgctggcaggagagcgggcaattctgcctgctggactttccgatcatcgagctggccggcaagaccctgggcgtactcggtcatggcgagcttggcggcgcggtagcgaaactggccgaggcacttggcatgcgcgtattgaccggcaacctgccggggcgccctgcccgcgacgatcgcctggacctcgacgcgctgctcccgcaggtcgatgctctgacgctgcattgtccgctgaccgagcacacgcgcaacctcatcggcgcgcgcgagctgcggatgatgaaaccctcggcgttcgtcatcaataccgcccgcggcggcctgatcgacgagcaggcattggccgatacgctgcgcagcggccatctgggcggcgctgccaccgacgtgctcaccagcgagccgccgagcaacgacaacccgttgctggcggcagacgtcccgcgtctgatcgtgacgccacacagcgcctggggcagccgtgaagcacgccagcgcatcgtcgttcagctgcgcgaaaacgccgaggctttctttgccggcgcgccgaagcggcaggtcggctgacgcgtcgccctccggctgctaagctcgccagcttttgtcccgggggcatcatggatccgcgaagcgaagtactgctgcgacaggccgaactcttcggcggtgacctgctgctggccggcttgccggccgatgacctgctcggccagctgcccgctgccagcggctggagttggcacgccggcgagcagcaggcgttgcaaggccgcttcgccgggcgctgtgcattcggggtcgaaccgcccgcggcgccgttcgattccgctgtgctgttcctgcccaagtcgcgagagctgaccgattacctgctcggtgccctggccgccagactgtcgggtcgccagctctacctggtaggggaaaaacgcgccggggtcgagcgcgccgcccggcagctggcaggctttggcgagcctcgcaagctcgacagcgcgcgccactgccagctgtggcaagtccgggtgacgaacagcccaccggcccccgagctacaaacccttgcgcagcatttcgaattgcaactggccgacggcccattgcgggtcgtcagcttgcccggagtgttcagtcacggccgcctcgatcgcggtaccgccctgctgctggaacagctcgacgcgttgccaagcggccgcctgctggatttcggttgtggtgcgggaatcatcggcgcatccctgaaacgccgctatcccgatagcgaagtggtactgctggacgtcgatgcattcgccgtcgaaagcagccgcatgacgctggcggccaacggtctggatgcacaggtcatcgcgggcgatggcatcgccgcggcacccgacggctgcgccgcgatcatcagcaatccgccgtttcaccagggcgtgcacacccactacgaagccagcgagaccttgctcgagcgcgccgccagccatctgcgcccaggtggcgagctgcgcctggtggccaacgccttcctccggtatccaccgctgatcgaggcccacctggggccctgcgagacgctcgtgcacgccgacggctttcgcatctaccgcgcgcaacgcaactgatcgattcccggccacgcttgcacaatgcgccacgcttgggcaaactcgccgccgtcctgggggagtagtctccggcgagcgcgctgctcgcccggcctgcatcaacatacttggtccacagaccatggtgcatgcgacccgcgcaaccggcctcgtcggctcgcgctcggtttgacaagacccatgacacgtacacctgacccggggcgggcaggcagtgcgtgtcatggtgattctgtcgacccgcccctgcaaggaagtcctttggaatcgttctacatccccaccctgatcgttgcgcttgccgaaatcggcgacaagactcagctgctcgccctgctgctggcggcccgctatcggcgtccattgccgatcatctggggcatcgtcgtcgccacactggccaatcacgcggcggcgggtgcggtgggcaactgggtgtcgtcgctggtctctcccagcgttcttagctggattctggccgcctcgttcgccgccgtggcgctgtggacgctggtccccgacaagctcgaagaagacgaagcatcgcgtggccgccgcttcggccccttcgtcgcgaccctgatcgccttcttcctcgcggagatgggtgacaagacgcaggtcgccaccgtcatgctcgcggcgcagtaccccgacttcatgctggtcatcatcggcacgacgctgggtatgctgatcgccaacgtaccggtcgtgctggccggcaacttcgccgccgaccgcatgccgctcacgctgatccggcgggtcgctgcgatcggcttcgccgccctcgccctgtatgccgtctaccaggcgttgcagctgagcggcacgcttccagtctgatacacagcgcaaattgccactttcccggtgctgttagagtgcgctttccaccgcattctggcggcactcgaggggagcaggcggcatgtcaccggatgaacgaaaacggcgggttcggcagcacatcgacctgagctggagcaagggtcgactggcgctggccgaacagctgcagagccgatatttcagttacaagagctcattcgtcgcgcagccggtcaacagtgcgggcttcggcctgatcgtgcgggaaattcgccaggcgatgcccgacctggaagtggtggtggacgattgcctcagcgacggcaaccgcgtggtgacctcgagcaccctgttcggcaccctggtgaagccggcgttcggtcatcccccgaccggcaagatcctcacggtcgccgcgatgtcgatctggacgctcaacccgggcggcgacatcgaggaaatcaatacgctgttcgatctggaaagcgcccgcaaacagctgggcatggatacccccattccggtcacgctgccgccgacctgagcggacgacagcagcgctcggcctcagcgattctgctgatacagcggcatcaccttcgggatggcggcctgcaatgcctgcgtacggctgctcgatgaagggtgggtgctgagaaactccggtggcgccgaaccgccagccgcagccatcttctcccagaggctgatcgccgcgttcgggttgtagccggcgcgggcggccagctccagtccgatcagatccgcctcgttctcattgttgcgactgttgggcagtgtcatcagatactcgacgcccatgttggccagctgcagactgccgtctccgacgccgaaggccgaaccgatctgcgtcgccatctgcacaccgtaggccttggacattgcctcacgaccatgctcacgcagcgcgtgggcgatttcatggcccatgaccgcggcgatctcgtcatcggacagcttcagcttctcgatcagccccgtatagaagatgatcttgccgcccggcccacagttggcgttcagttccgggctgtcgatcacgttgacttcccagttccactgcgccgcatccggacggaaagccggcacctcggcaatcagtcgctgggcaatagtgttgacgcgcttgctcacagcgctgctcttttccagcacacctttcttcgacgcctcgctgagcgtttgctggtaggactgggcgtacatctgattgacctgctcggtcgacagcatgctgaacatgtactgtttgcggtcgaccccgactgcgccgccactggtggtgttggtcgcctggcaaccgacgagcgctgaggccgtcagcagaaacactaatgaatgcggcttgaacatgtcgcgtctcccatgaattctgcgccgtatgctagagcgagcccgcgcgccgggcaaccggcggctacctgcgctcaggcgagcgcgcgatcatcacctagttcgccggcgtcaggcattccggcgcgtccagcttgggatcgttgacgagggttgccaaggggcgttcacgcagccccggttgcggtgcggtcagcagcgcctgcaacgcatcgacaggcgtatgcggatcgagccaggccgtcatgcccgcctgatcgagcagcaaggggcggcgctggttcgccgccgccagggtcacgacggccgcgctgagataggtatgcccctggaccgggtaggcctcccagagcgcggcgaagtagatcagcgagtccgcgccggtcatccagtatggccgcttgcgtgcggtgccccgccactcgtagaagccattggcaggcaggacgccacgacgcaagcggaaggcatcgcgaaacatcggctgttcggccagcgtttcggcacgcgcctgggccggtgtgcaggtgaaatcggtgagccaggcaggggtcagcccccagcggacgctgctgagctgcagctcgtcgtccacctgccgcagcagcaacaccgacgcgccgggcgccaggctccagtgcggttgttggtcagcggggaatccggataacgcggcgaatgccgggctccagcgaaacagggcatagcggccacacatggcagaactcgtagacggcggatcgaaggggacgcccatcgacgtcagcggcaggctcatccgcccatatcagcagatgagttcgcccggatagctttccggctcgtcgccgggcaaaggttcggcgccattgtactcggcgatcaactcacgtgcgcgcccggcctgttcgtcggcgaccatcagcccgagtagaccggcagccggcaattcgcccacggcaccgatcagatggcgtccggtgaggtacgcctcgatgccctcagcggccagcatgccgcgcaacatctccgcctcgagcagatcgcgaggctcgtaaatgcgctgcatctactcatcctccctcagcacggcgagctgccagtcgacaccgtcggtttgcagatcgaaaacgatcggccgacaacagaccgggcagtcctcgatgtagcgctgatcgccgccactcagatcgagcatcgcctccaccccctcgccgcaataggggcattgatagtcctgtgattccagcatcagcgtctcccacgtgacttgccgctataatcgcccatctgagtcctttgactttccggcgaacgcttcccgtcggaacggcgtcgttcgacgcttgggcgagcctcgcgcgtatgaccgcgccgaactcgacggcctcatcttcgaccccacctagcggggctattaagttgtttcccttacagagagcatgatggacgaattcgaagccatccgaccctattccgacacagaagtccctgccgtcatggcgcgtttgttcgccgaccgggaattcctcgatatcttggcgcattttcgctttccgcgactggccggcccgatgggctggatgcttaaacctcttatagcgcaacgtctgcgacgtgagttcgccagtatccattcggtcgacacgctgcaagcgcggatcgagatgtacctggaccgcaccatcgaacgcgccaccgacggcatcacctattccgggctggacaagttgcagcacggttgcgcctatctgttcctggccaatcaccgcgatatcgtgatggatccggctttcgtcaactatgcgctgtatcaggccagaatgcgcacgccgcgcatcgccatcggcgacaacctgctgcagcgacctttcgtcagcgacctgatgcggctgaacaaaagcttcatcgtgcgccgctcggtgaccggcagacgagagaagctggcggcctaccagctgctgtccgcctacatcaaccactccattcgcaacgacggtgaatcgatctggatagcccaagccgagggccgcgccaaggacggcgacgatcgcaccgactcggcgatcctaaaaatgctgcacatgagccgcaaggacgagccttttgccgaagcactggcagcgctgcggccgaccccggtgtcgatcagctacgaatacgatccgtgcgatcaggccaaggcgcgcgagctctatatccgcgccacgaccggcacctataccaaggcaccgggtgaggacgacaccagcatcgcgctgggcatcaccggttacaaaggccgtgtgcatgtcagcttcggcacgccgatcagcgagattccggacgaccccaaacaactggccaccgagatcgaccagcagatcctcggcgactaccggctgtttccggtcaattacctggcgtatcggatctgggacggacgcgatccggcgctgccggtacccgagcttgcgcagctgttcagccaggaggagatcggccgagccgaagccgaatggggcaagcgcctggccgcctgcccgagcgtgcagcagccctacctgatccagcaatacgccacaccggtgcgcaaccagcaccgactgaaggctggcttgagcctctgagcgtcagcgcggccgtggtggctcagatcagctgggtaaaggaggacagcagccaggcaatcgccaggctgctgaagccgattccgtagaagcatcgatcgatgcgctgagtcgccatcgcgtaagcctgtccgaacctcgcttcgcggcgatcgaccggcgccagttgactcgccagctgctggcgccaacgggtagccaacagcaaccaggcgccgccgagcgcgatcagcagcgccatcgaattgagtaaagggccaaggccgacaagcccagcgatgttgatctgcaatgacacccgaacctccacaaggcagaaaaacccgggccttggcgcggccacgcgagtggctgcggagtctaccgaagcgagacgccccgttcagcacttcccgaccaaacggacacccaccgagatggcaatttgccgggtatttacgccatttatgcagataggccccgtctcgtttgttgacttatagtccaccgcagcttcaccctcatcgtctcgaacatccgaaatagagcgtgcgcctggcttgagccagcaggcgggactgccgtggagtcgagcaaaaggcgcttgtcatcgctgcgtctgcggcagtcacggcctgcatggcccgcttgccgctctcgtagaagccgccacctgcgagcaggcgtcagttaccgagtatcaacaggatcgaataatgaacaagaagacgttgaagacgggggcactcacactctctttgctggcaagcgcattgctggccaacggagccatggcagccgtatccgagtcggaagccgccaagctgggcgacagcctgacgccggttggcgccgagaaggcaggcaatgcggccggcaccatcccagcctggaccggcggtctgccaaccgatgctgccggtgtcagcgaggacggtttcgtcaatgatcccttcccggacgagaaaccgaaattcaccatcaccgcgcagaatttcgagcagtacaaggacaacctgagccccggccagatcgccatgctcaagcgctatccggatacctaccgtctgccggtcttcgaaacccaccgcagcgcggcggtacctcagcggatttacgacgcggcgaagaagaacgccacccagactaagctggctggcggcggcaatgggctggaaaacttcgataccgccatcgccttcccgatcccccagaacggtctggaagtcgtctggaaccacatcacgcgctaccggggcggctcggcccgccgcgtcgtggcgcaggccacgccacaagtgaacggcagctacagcctggtcaagttcgtcgacgaagtggtctataccgacaccctgcgtgactacgacccgcagaagcacggcaacgtgctgttctacttcaagcagcaggtcaccgagccgtcacgcctggccggcaacgtgctgctggttcacgagacgctcgaccaggtgaaagagccacgcatggcgtggatctacaacgccggccagcgtcgggttcgccgcgcgcctcaggtggcttacgacggtccgggcacggcagccgacgggctgcgcacctccgacaacctggacatgttcaacggcgcaccggaccgctatgactggaagctggtgggcaagaaggaaatgtacattccctacaacgcctatcgcctggattcgccgaagctgaaatatgacgacatcatccgcgccggccatatcaatcaggacctgacccgctacgaactgcatcgggtttgggaagtcgaggcgaccctcaagaccggcgaacggcacatctacgccaagcgtcatttcttcatcgacgaggatacctggcaggctgcggtcatcgatcactacgatggtcgcaacacgctgtggcgcgtggccgaggcgcactcggagtacttcttcaacgtgcaggtaccgctgtattcgatggaaaccctgtatgacctggtttccggccgctacctggtgatggggatgaagaacgaagagaagaatccgtacgtctacaactacgaagccaactccaatcagtacaccccggcggcgctacgcaactccggcgtgcgttgatcctcgaagcacgccctgcccgccgggagcgtgcttttccctcggcgcagcgaagcctctgatggcaaataaaaaacccgcagcgatgcgggttttttgtgcagctagcagttgcgcaggtcgtgtattactggcccagcacctgaccgatgttctggtcgcggaacactcggctcagcgcgtcactcaatacctcgctgaccagtttggtgttggtctgctcgttcggtgccatgccgaaccgctggtccagcgacgcgccgtagcgtcccgtgtaacgccgcccgccgttctgcacctcgatgcggaacgtcgcgccgatggtcgcttcggtgacatagagcccttccttcggcgactggtacttcagctcggccagggtcaaggtcaactgcggagcgttgtaggcattgggcgacggggtgaagccaagcaggcgaactgcggcttcggcctgcgcctgcagcttgggcaccaccttctccttcggcacgatcaccgcgctggtttccggatacaggccgcctcgggtgccgagcgtcgcggacggacggccatcgaccacccgcaccgataccggctgcccctggccgaccgggttgatcgtgccggtgatcttcggagtcggatcgagctgttgggggctgtgggcgcaaccggccagcgccagtgccgacaccgcggcgaagctgaacaacaggcgtctcagcatgctgtttttctccagatgagggatgaatggcgcgcagtataaccagcaccgcaagcgcctgacagcagtcgcgctaaagacccgttcggcaccgacaacgttcccttcatcgaacggtaaccacagcgtgggataacgcctctacgttctcaggagttatctcatgtctttgctgaccaggcttttttcgcggccggtgcgacgccattacgcgctgctcgacgaacagcaacgctgccgcatgctgctcaccgccaccgaacgcccatgtggcgaacgctgggtggaaattggcgaggcaagccttggcatgctcggccagcccctggcgcatgcgccacgtcccgacctcacgtccaacgcggcataaaaaaaccgcgcgacccgtgagggcggcgcggctttcgacaccaggagccaggcttagtccgccagccccaggcgcttgtccaccagagccgtcacctcgcggtaggccgcggcatcggtttccagcactttttcgcgagccgggaagatctcgcccagcttgcggctccaggcctcgcttttcgcctgctcagggaagcagcgctcgatcaagtcgagcatgatcgatacggtaaccgaagcccccggcgaagcaccgagcagcgcggcaatcgagccgtcctgagccgacaccaattcggtaccgaactgcagaatgccgcccttcttcgggtccttcttgatgatctgcacgcgctgacccgcgacttccaggcgccagtcttcggccttggcttcggggtagaagccgcgcaaggtttccagacgatcttccatggattgccgcacttccttgatcaggtagcgggtcaggtccatgttgtcgcgcgcgacggccagcatcggcttgaggttgcccgggcggatcgacaacggcaggtcaagcggcgagccatgcttgaggaacttggtggtgaagccggcatagggcccgaacagcagcgatttcttgccgtccacgacgcgtgtatccagatgcggcacggacatgggcggtgcgcccacggcagccaggctgtagaccttggcctggtgctgcttgacgatctccgggttgtcgcaacgcagccactggccgctgaccgggaaaccgccgtagcccttgccttcctcgatgttggacatctgcagcagcggcaatgccgcgccaccggcgccaaggaagacgaagccggcgtcgagctggcggttggagccgtcgcgtgtgttcttgatctccacgcgccagcctttgccatgacgctcgagtccggtgaccttctggaagtacgacagcttcacgcccggcttgctggcgagataagcgagcatctggcgggtcagttcaccgaagttgacgtcggtaccgttcagtgcgcgagtcgctgcgatcggctcgtcggcgggacgacccggcatcatcagcggcatccactcttccatcgtggcacggtcttcggtgtagaccatctgttcgaacgcgtgatgcttgatcagggcatcgaagcggcgcttgaggaaatcgatgttcttggtgccacgcacgaagctcagatgcggcacggcattgaggaaatcacgagggctgccgaagccttcgcgtcccgtcaggtaggcccagaattgtttggagacctcgaactgggtgttgatcgtcaccgctttcttgatatcgatcggaccgtctttgttgtccggggtgtagttcaactcgcacagcccggcgtgacccgttccggcattgttccagggattcgagctttcgacggccccggactcctgcaactcgacgatttccagcttgatgttgggatcgagctccttgagcagtacggccagagtcgcactcatgataccggctcccaccagcaccaaatccacggcttcgctatcgtgttgcgtcatcaacgcgttctccagaatcacagcattaaactgtcacgaccgcagtacgcgatcgtgtagaaccaccagccaggcggctagaaacggaggggtctctataccgctgctcgggcttgtgcccgaaggtcggccccgaagatgccggcccgctgtcgggagaacggcttttggccttctccctctcgctccgaggcttcccggagcagggcgacaggcctgggctcaacgggacaggtgcagcgagaaaatcaattgtggctgccggtcgtgaggacgtgcagccattgcaacgggtatcgcagcctcggcagttacctcgccgaagccaaagcactcaaccgcgagcggcttcgatcagttcgatgtagggctcggcctgacgctggtcgaccaccagcgccacgaaatcgcgcccttgtgcatccttggcgttcaggtcgtatcccgcttcgacaaagaaccggagaaaacgctcgaaatcatccacacgcaaaccgcgataggccttgatcagcttgtgcagcgatggcggcgtgtcatcgcccggctccggctcgagaaacagcttgatcgcgtcatcgctgatgtcctcaccgatcaccttttgtttgtctttacgcatggtttctccggtccgacgggccttacgggggcggcagtttactctgcgaggccagcgcactcaacgcgccagaaggccttgcgaccaaggtcgtacgcgaaaatcttcgatttgccctcgatattgcgccaggacaggcttctacttcgaggccgagcctatactggcgctttgcgcacaaggagtgtctggaatgaagcttccgccgttgttcgccgcctggcgccagaccctgcgggcgggctacggaggccgtgaactgcgcggcgacctggtagcaggcctgacggtcggcatcatcgccattccgctggccatggccctggcgatcgccgtgggcgttgcgccgcaacatggtctgtatacggtgttgatggcctcgccgctgattgcgctgaccgggggctcgcgtttcaacgtgtcggggccgaccgccgcgttcgtggtgatcctgctgccgatcactcaacagttcggcctcggcggcctgttgttgtgcaccatgctcgccgggctgatccttattgcgctgggtctgctgcgcgccggcaagctgatcgccttcgtgccctatccggtcaccctgggctttacggccggcatcggtatcgtcatcgcgaccctgcaactcaaggatgcgttcgggctcaccttcgccacacaaccacagcactatctcgaccaactgagccagctggcccgggcgctgcctgccatacagcccggcgatacgctggtcgccgggctgtgcctggccgtgctgattatctggccgcgtctggtaccgaaggtcccggggcatctggtcgcgttggtggtcggcgcgctggcggcggtggcactggagacggcgggcctgcccgtggccacgctgggtgaacgtttcagctacagcgtcgacggcgtggcgcaccccggcattccgccgttgctgcccgacttcgcctggccctggctgctgcctggccccgacggccagccgctgacgctgaacttcgagctgtttcaccagttgctcgcgccggcgttcgccatcgccatgctcggcgccatcgaatcgctgctctgcgcggtggtcgccgacggcatgaccggcagccagcacgatcccaacgccgaactgctcggtcagggcatcggcaatctggtcgcgccgctgttcggcggcatcaccgccaccgcagccattgcccgcagcgccaccaacgtgcgcgccggtgccagctcgcccctggccgccatcatccacgccggcgtcgtgctggtggcgattctctggctggcgcccttgttcagctacctgccgatggccgcgctggcggctctgctgatcatggtggcctggaacatgagcgaagccccgcacgtcatcagaacgctgcgcatcgcgccgcgcagcgatgtgctggtgctgctgacttgcctggtgctgacggtgctgttcgacatggtcctggcggtcggggtgggcctgctgctggccgccgggctgttcatcaagcgcatgagcgaattgaccgacaccaccgcgctgtcccgccgtcagcatcgcctgctggaggatctgcccgagcatgtcgccgcctatgccattcacggtccgctgttcttcggcgcggcagagaaagcattgggcgtgctgcgccgcttcaacccgcaagtgcgggtcgtgatcgtcgatatcagcgcggtgccgatgatggacatgaccgctctggcgtctctggaaaacgtgttgctcgactaccgaaaactgggcattgcgctgattctcagcggaagcaacgcgcgggtgcgcctcaagttgcgccgagccggcattcatcgtctcgaaggccagctgtatcacgtgcgcgatctcgcccaggctcgtgccaaggccttgcgcctgttgccggaggacaccgccggcgcggcgggctgacgccgcgccacgggcaaacagggcgcggcgttcgcgccccgagtgcggcttcaaccggcgtgcttttgcaggttggccatcatttccttcagcgcttccatgttgtcggccggatgcgcggcattctcgaaatcgcagatctgctgccagttggccgcaacgtcctcggcatcgaaaccggccttcggatcgaagccagcgcccaggctgcgctcccagcgcaccttgcccatccagccaccgcccacttcgaacagcccggacgtttcctggcattgctcgctggcgaggaacaccaccagcgggctgaccagttccggcttgagctgttcgaagacctgcggaggaatgaggccctcggtcatgcgcgtgccgccggtgggcgcgatggcattgaccagaatgttgttcttgcggccttccagcgccagcgtgcgggtcaggccgtagagccccagcttggccatgccgtagttggactggccgaagttgccgtagataccggaggtggacgcggtgaagatcacccggccgtagccctgctcgcgcatgtgcggccaggcggcgcgggtcaccttgtaggcgccctcgacgtgcacgcggtagaccaggtcccagtcggcgtcttccatcttgtggaaggtcttgtcgcgcaggatgccggcgttgttgaccaccacatcgatgcgaccgaagctgtccagcgcctgctggacgatcttgccaccgtcggtcaccgaatcatggttggccaccgcggtgccgccggcctggcggatttcctcgacgacgcgatcggcagccgatgcgttggcaccctcgccctgagcactgccgcccagatcgttgaccaccactttcgccccgtggcgcgcgaacagcaatgcatgggcgcggccgagaccaccaccggcgccggtcaccacgaccaccttgtcttcgaagcgaatggcttcactcatcggatatcctccagcggttttttgattggatgcgttgcacgcgatcgggcgagtgtcagccaggccaacgccactcacaatcaaaccgacacgaatgaatgccccggcataaggctgcaggatgatgtcgaatcgaccgccggggcgccggacgaagcgattttcgccgcgcgctgcaggcgcgcccgtgcgcccgggtggactgatcatttttcaaccgatcctctacaagccaggcgggcagcggcctggcgcctcgtttccccactttatccacagagcgccccacagcaatactggacaaccttggcgcttgctccgccccctgatcgacgcaccgctgtcaaggaaaaaaagcctttgtacaaacacttacaaaggcgatgggccaattgatcagttcttgatcagtgcttgcaacgccagggttcatgcctgttcgaagaaaccacgaataggttatccacagaagcttgcacagcctttggggatagtttcatgcgcgctatcgaggcgatgagcaaaagctacgaggcagggacatcaaggagcgactaggcttgtttcaaccgtcaaggagccgccccaaatgcctagcctagagatgatccagaccctgttcgccaattacgccctggggatcagtggtgcctgcatcggcgagcccggttgatacttggccgttgggggacgctggcgttacgctgccagccgttcaactgacggagtcgatgatgtccctgcgttcgatatgcgtgttctgcggcgccagtaccggtcacaacccggcctacagccaggcggctgaggccctcggccagacgctggcccgcaatcagatcaggctggtctacggtggcggcgccgtcggcttgatgggtgtggtggccgatgccgccatggccgctggcggcgaggtcgtcggcatcattccgcaaagcctcaaggatgccgaagtcggccaccctggcctgacccgattggaagtggtcgatggcatgcatgcccgcaaggcccgcatggccgagctgtcggaagccttcattgcccttccaggcggcctcggtacgctggaggagctgttcgaagtctggacctggggccagttgggctatcaccgcaagccgcttggtctgctcgacacgaaccagttctacagcaagctcagtcatttcctcgaccacctcgtcgaagagggcttcgtcaaggcacctcatcgaggcatgttgcagcgcagcgagtcgcccgaggcgctgctgcaattgctcaacgactggcaacctagcgccgacacacgttggagcaagcgcgcagcggtgccggcatccagctgatcgcgctgtacaaaaaacgcgcagcccggcgcaagtcccatcgcatatgggctgcgcctggtttcaccagtgttatccacaacacgctccacagtaatcggggataactgccttctagactttcccctgcgcaaaaaacaaagaaaaatagcgcgtcatctccttatatgcggtattcggagcgcccataagccccatcacgacggattgatcaaaaagcgatcaaacgcctgaaagccgcgcgctgcaacgcgctgggccgttcacccctagcttatccacagaacgcctaacaattatccgggataagtcagcagctgcccagcacaccgccgtgcagacggacgaacttcgctcgcgcctgcgcctccaattcgttacgcccgatccatggagcctgctatgccgtcccggtcctttactacacagcacctgctcatcgagccggagccggagccggagccggagccgatccgatgatgggtttcctggcgctggtactggtgaccttcgtctgtttcgcgctggtttttttcatcaagcagcgccaatacgaccatccagccctgcgcatgccctatgcgctgaggcaaccgttctttcaacccagcgaacgggagctgctggcgctgctgcagcaggcgatggacgagcgcttcgtcatcctcggcaaggtgcgtatggcggacgtcgtggaggtcaccgcggttccgcgccgtgcgccctggtatcgggccgtcaatcgcatctcggcggcacggttcgactttcttctatgcgaccggcaaagcctcgagccgcggtgcgccatcgaaatggagccgcccagcgaggccaacgccttcgtcgaggagctgtgccagacgataggcctaccgctggtccgtctgtcaccggatacggctcggggctatgacagccttcgtagtgccatcgaccgagcgttgaccacggcaggctaggcttaccgagcagcaaccgagtgtgcggaatgtgcggtgcgatgccgactcggatgccaccccgctcttgcagaatgccggcctgcgccagtcggtgctggccgggcaatgtgcttcttcggtccggaccgacatccaagcgttcgccgatccggcgagcgaatcgaagcggactggcaagacgattcacgtgctcaggttcgggcgaacggcctgactgacgacctccacaagcgttctgttcggagacacccaacaatcatgagcatgacatgacgttgaaagcccgcctgacggcccttatccagctgatctcgaaactcatcggccgttatcccggcaccgtcgccctgttcggcttctgctcgggcctggccagcttcgtgctggtggagcgccaggccgggctggccaaggtgattgccgcgttgatgctggtcagctggctctggttgatgctcgaaaccagcctgcgccgcggcctggagcgccgtttcggctggaaagtgccaccgcccctgatgcgctacgtgacgcagatggtccatcaggaaagcctgtttttcatcatcccgttctttttcatcacgacgacctggaacagcggccagtcggtattcaccgtgatgctcggtatcgccgcactggtctcgctggtcgatccgctgtactacaaatggctggcgccacgacgctgggtctacctggcgttccatgccctgaccctgttcgccgtcctgctgacggcgctgccgatcatctttcacctctcgacgccacaaagctatctctgggctctgggtatcgccgtggtactggcactgccgagcctcagcgggctgttcgcaacctggaactggaaaagcatcctcggcatgctggcgctcgccgcggcggtcggtctggccggctgggtggggcgcacctgggtgccgccagcgacgctctggctgaccgatgtcgcggtcacgcgcagcttcgacaatgcgtcgcggcaaccgggcgatcgtctccggcagctgacactgcaagagctgcgaggcaacggcctctacgcctataccgcgatcaacgcgccacgggggctgaaggagcgcatctaccatgagtggatatacaagggcaggcaggtcgaccggattccgctggagatcagcggcggccgcgatgcgggctatcgcgcctggacgcacaaacgcaactttcccgagcgggccgccggcaaatggcgcgtgcgggtggtcaccgaggctgggcagatgatcggcatgctgcgcttcgaggtcgtcgactgaaccgctgaagcccagcggcactcatacagccaaagcccattcagcaaaggtcggaggatgcatggaatggtgggagatcctgagccgtacggtcgcctcggagttttccgacctgcctgacctggaacacgcgatccgcatttcgctacgcctgctgatcgcggcgctgctgggcggcgccctggggtacgaacgcgagtacaagggcaaggccgcggggctgcgcacccacatgctggtctcgctcggcgccgcgctcttcgttctggtgccgctggaagcggggatgaagatcgaagatatctcccgcgtcatgcagggcatcatcaccggcatcggctttctcggcgccggcaccattctcaagggcgactcccttcaggacgtcaaagggctcaccacggcagcgggcatctggctgacttctgccatcggcatcgccgcgggcctggggcatgaatcaaccgccgtgctcaccacctgtttcgcgttcgtgatattgaaactgatgccgcgcctggagcgacacgtggcaaaaaactcgccccacaaagaaagcgatagcgaccccagctagacttcagctcgtcaggccatcaccgccccttttcaggagtcgctatgcactgccagccacatcatgccgcgccccttgccatcgcactcgccttggccggttgtggcaacaccgcgacgctgccggtcgagacgggctatggaccggcccccgtccttcccgaaccgacccgctcgatgatccccaccgtcaacatcgccaaggccacgggttggcccgagggccgcaaaccgcaggcggccgacggattgcgcgtggaggcctttgcccgtgatctcgatcatccgcgctggctgtacgtgctgcccaacggtgacgtactggtcgccgagtccgatgcgccggccaagcccgaagacggccacggccttcgtggctggatcatgaagaagctcatggcgcgggccggttccggtggtaaaagcgccgaccgcatcacgctgctgcgcgacaccaacggcgacggcagtcctgacaaacgcacccaatttctcgagggcctgcactcgcccttcggcatggcgctggtcgccgatcagttctatgtggccaataccgatgcgctggttcgctttccttatcgcgacggcgcactgcgcatcgaagcaaccggtgaaaaggtcgtcgacctgcctgccggcctcatcaaccatcactggaccaagaacgtcatcgccagcccggacggctcgcgcctttacgtcaccagtggctccaacagcaacgtcgcagagaacggcatggcggtagaggagaaccgtgcggcgatcctcgaagtcgatccgttgagcaagacgctgcgtctgttcgcttccggcctgcgcaatcccaacgggctggcctggcagcccgacagcggtgcactctggaccacggtcaacgagcgcgacgagatcggcagcgacctggtgcccgactacatgacctcggtgcaacgcggcggcttctacggctggccgtacagctactacgggcatcacctcgacacgcgggtcgaaccgcagcgacctgagctggttgccagggccttggtgcctgactacgccctcggtgcgcacaccgcctcactggggctggccttttatgagggctcgtcattgcctgaacgctaccgccacggcgccttcgtcggccagcacggctcctggaaccgcaagccgcgcagcggctacaaggtggtgttcgtgccgttcaaggacggccagccggacggtgctgccgaagacgtcctgaccggattcctcgatgaacaggagcaggccatgggccgtcccgttggcgtcgcggtggacaagaccggcgccgtgctggtggccgatgacgtcggcggggtgatctggcgggtgactccggcgaatgaatgagaacggtgacctggccccatgcggaggacagcgctccgtggggccttggtctgcctattcatcacgccctcagatgaccaccggcagccggtgggccagacgtatctcttgctcagaaagctccacgccataagccagcacctctacgcccgccgccaccgcctcacgtagcgcatcggcgtacaaaggatcgatctcgctcgccggacggaccgcctcgatcccggtcaggttcacgcaatacagctgcacggcgcgtataccctcgcgcgccagcgccgccagctcgcgcaggtggcgagcgccacgagtggtcaccgcatcgggaaaggccgcaacggcggtatcgccaaagccgagggtgacgctcttgacctcgacgtacgcaggccccgcaggataatccagacggaaatccacacggctgttctcgacgccataggcgacctcgcgcttgagcgcggtgaagccggccagttcgccaatcacaccggccagcagggcctcttcgaccaaccggttggctcgggcggtgttgacacaagccaggcgcccctggggcgtctccaccagctcccaggtgccgggcagcttgcgcttgggatcgctgttgcgctggaaccagacgcgcgcgccttcgcccatgcaattgagcatcgaaccggtattggggcagtgaatgcataggtgttcgccttcatcggtaacgatgtccgcgaaaaagcgcttgtagcgccgcaccagccggccctgttccagagcagtggtgaagcgcatcaggcttgccagctcagcagaccgcgggcgatgcgctcgaccgcctgctgcagacgcgacagatcctgcgtataggcgaagcgcacgtgatgtccggcctggtgacgaccgaaatcgagccccggcgtgatcgccacgaactcggtttcgagcatgtgctggcagaacccataggcgtcgccgccgaacgccgagatgtccgcgtacaggtagaaggccccctgcggctcgacggcgatgccgaaccccagctcgcgcaacgcgggcagcaggtagtcgcgccgcctggcgaactcggcccgacgcgcctcgagaatttcgatggtgccgggttggaaacaggccagtgcggcgtgctgggccatggtcggtgcactgatgtaaaggttctgcgccagcttttccagctctggaacagccgctggcggcgccaccagccagcccagccgccagccggtcatgccgaagtacttggagaaactgttcagcacgaaggccgagtcgtccacctccagcacgctcgcggcatcggtgccataggtgaggccatggtagatctcgtcgaccaccagatgcccaccccgcgccttcagcgccgaggagaggccgcccagctcgtcgcgatcgagcaaggtgccggtcggattggccggcgaggcgaccagcgcgccgacgctgtcctgatcccagtggcgctcgatcagatcgggggtcagttgatagcggacgtcgggacccaccggcaccaactgtgcggcgccttcgatcaagcgcaggaagtgtcgattgcaggggtagccgggatcggccagcagccaatgtttgcccgggtcgaccagcaggctgctggcaagcagcaaagcgccggatccgccgggagtaatcagcacgcgctcggggtcaatagacagttgatagcgctcggcgtagaaaccggcgatcgcctcgcgcagctgtggcagccctcgggcggcggtatagcgagtatgaccggcagcgagagcagcctgtccggccgcgactatgggttcggcggtggtgaagtccggctcaccgatttccaggtgaatcacgtcacgccccagcgcctgcaattcattggctctggccagcagcgccatgacgtgaaagggttcgattgcacggctacgcgcgctatatgacgaggtcatttgaccttcctgaagagtacaaaacgtgaattctaccgaaggtccccctgacaccgcagccaccgtgatattcgggagtagcgcaccccgatacgatctggtaagttcgcccgcttgcagccgcagggccggcacgggccggcagagggatttcactatcctgcgcaatggacatagcgagaggcgttcatccatgcccattaccaaaacgacacccagcaaccaactgattcgcgccttcgtaccctacaaggagtccaagggtgaggagtacatgagcgacaatatgcgcgctcatttcaccggcatcctcaacaagtggaaacaggagttgatggaagaagtcgatcgcactgtgcaccacatgcaggacgaagcggccaacttcccggatccagccgaccgcgccagccaggaagaagaattcagcctggaactgcgtgctcgcgatcgtgaacgcaagctgatcaagaagattgacgaaacgctgcagctgatcgaggacaacgaatacggctggtgtgattcctgcggcgtcgaaatcggcatccgtcgcctggaagcccgccccaccgccacgctgtgcatcgattgcaagacgctggcggagatcaaggaaaagcagatcggttcctgatcccgaacggggcgctacggcgccccgcttcatttctgtctgcaccttaccaatcgcccgcctcgccgccccttccgagccggtccgccatgcccccttccgttaccaagcctgcagcctacgtcggtcgttttgcaccgacccccagcggttatctgcatttcggttcgctcatcgcggccctggcctcctttctcgatgcgcgcgcggtcggcggccgctggctgctgcgcatggaggacctcgacccaccacgcgaaatgcccggcgcgcaggacgccatcgtccaggcgctggaggcctacggcttcgagtgggacggcccgatggaacgccagagcgatcgactggacgtttataacgcggtaatcgaacaactctggcaggatggccacgtctatgcctgcacctgctcccgaaaacagctgcaaccctttgccggcctgtatccgggcttctgccgggacgcccggcacgagccgatggatgcggccattcgcctgcgggttccagacgcagaatatggcttcgtcgaccgggtacagggtgcgttctcccagcggctgcgtcgggacgtcggggatttcgttatccgccggcgcgatgggctcatcgcctaccagttggccgtcgtgctcgacgatgcctggcagggcgtgaccgatatcgtccgtggcgccgacctgctcgactccaccccgcgccagctctatctgcaggatctgctcgggctacctcggccgcgttacctgcacgtaccgctgatcattcagcccgacggccataaattgggcaaacgttaccgctcgccaccgctgcggcctgcggaggcgacgccgctgttgcttcgcgcgctacgcgccctcggccagccaactcccgacgagctgaacgacgcgctacccaacgaggttctggcctggtcgatcccgcgctgggatgccgagcgtatcccgcgctgcccgaccctggccgaggcgcagttgcgctaacaaagacaaagccgataaatgccctgaaggctggatgaagcttgacgcctcgagcctcgagccttcgcttctctttgccggttgtggcctgccgcctggcgctgctttaccattccgctacttccgacacgagttccagcatgtatatctaccgactggtgctgctcctggtggtggggatctacctgttttcccccgcgatcatggactggtggatcgaccccaacggtgcctggtaccgcccttacctgttgtggctgattctcatcgtggtgaccttcatccttcagagtcagcgcgatgcagacgagctttagcctcagccacctgatcctcatcagcgtcgcctacctgctggtgctgttcggggtggcctgggtcagcgagcgcgggctgatcccgcgctgggtgatccgtcacccattgacctacaccctttcgctgggggtatatgccagcgcctgggcgttctacggtaccgtcggcctggcctaccaatacggctatggctttctggccacctacctgggcgtctgcggtgccttcctgctggcgccggtgttgctctatccgatcctgcgcatcacccgcacctaccagctggcgtctctggccgacctgttcgcttttcgcttccgtagcacctggagcggcgcgctgaccacgatcgtcatgctgatcggcatgctgccactgctggccctgcagattcaggcggtggccgacgccatcggtattctcaccctcgagcccctgcaggagcgcgtcgcgctgggctattgcgtgatgatcatgctgttcaccatcctgttcggcgcccggcatatcgccacgcgcgagaaacacgagggcctggtcttcgccatcgccttcgagtcggtggtcaagctgctgaccttcggcgccatcggcctgtatgcgttgtatgtcgtgttcggcggcccgcatcagctggaaatctggctgttgcagaaccagtcggccctgcaagcgctgcatacgcccctgcaggaaggcccctggcgcaccctgctgctggtgttcttcgcctcggccatcgtcatgccgcacatgtaccacatgacgtttaccgaaaacctcaatccacgcgcgctggtcagcgccagctggggcctgccgctctatctgctgttgatgagcctggcggtgccgctgattctctgggctggcctcaaactcggcgtcagcaccaacccggaatatttcaccctcgggctgggcctgaccgcacaaagcgagatgctgacgctggtggccttcataggcgggctgtccgcctccagcggtctgatcatcgtcagcacgctcgccctgtcgggcatggccctcaatcacctggtattgccgctgtaccagccgccgaccgagggcaacatctatcgctggctgaagtggacacgccgcagcctgatcctggcgatcatcatggccggctacggcttttatctgctgctgggggctgagcaggacctgtccaacctgggcatcgttgccttcgtcgccacgctgcaattcctgcccggtgtgctctcggtactttactggccgaccgcgaaccgccgcggctacatcgtcggactgctggctggcatcgcggtctgggtggtcaccatgttgttgccgttggtgggcaacctcgacggtttctacctccccctgctcaacgtcgtctatgtgctcgacgacaccagctggcacctggcggcgatcgcctcgctggcggtgaacgtactggcgttctcgctgttctcgctgttcaccgagaccagtgccgaggagcaggctgccgccgaagcctgcgccgtggaaaatgtgcgcaggccgcaacgacgcgaactcgcagccgcatccccacaggaattcgctacccaactggccaagccattgggcgccaagaccgcacagcgggaggtggaacaggcgctgcgagatctccagttgccattcgacgaacaccgcccctacgcgctgcgccgcctgcgcgaccgtatcgaggccaacctgtcaggcctgatgggcccgagtgttgcccaagacatcgtcgagaatttcctgtcttacaagaacggtgcggacagctacgtcaccgaagacatccacttcatcgaaagccgcctggaggactaccactcgcggctgaccggcctggccgccgaactcgatgcgctgcgccgctatcaccggcagaccttgcaagagctgcccatgggcgtctgctcgctggccaaggatcaggaaatcctgatgtggaaccgggcgctcgaagagctcaccgagattcccgccctgcaggtggtcggttcacgtctggccaccatcgccgagccatggcaaagcctgttgagcgatttcattcagcagcgcgaagagcacctgcacaaacagcggttgcagctggacggccatagccgctgcctgaacctgcacaaggccgcgatcgccgagccactggcgcccggtaacagtggcctggtgctgctgatcgaagacctcaccgagacccagcagctggaagaccgcctggtacattccgaacgcctggccagcatcggccggctggccgccggtgtcgcccatgagatcggcaatccgatcaccggcatcgcctgcctggcgcagaatctgcgcgaggagcgcgaagccgaccatgagatcagcgagatcagcaaccagatcgtcgagcagaccaagcgcgtctcgcgcatcgtccagtcgctgatgagcttcgcccacgctggcgggcgccagcaggacctgtatccggtcagcctggccgaagtcgcgcaggatgcgatcgcgctgctctcgctcaaccgccgcggcaccgaagtccacttcttcaatctctgcgaccccggtcacctggccgaaggcgacccgcaacgcctcgcccaggtcctgatcaacctgctgtccaatgcccgcgacgcatcggagcccggcggggcgattcgggtgcgcagcgaagagtcggagcagaccgtttacctgatcgtcgaggacgaaggcagcggtattccacgagccattcaggaccgcctgttcgagccgttctttaccaccaaggatcccggcgaagggacggggctaggccttgcgctggtctattcgatcgtggaagagcattatggacaaatcaatatcgacagcccggcggacccggaaacccagcgcggcacccgtttccgcatcaccctgccgcggtatgtcgaggcgacagatgccattgagtgaagaggcgataggcgccgaccgccggttctctgccacgcaggtcccagcgtaccgctcgcctcgccggagcttgacgagatgacaccgcaaccctcgccgaagcagatccacgccgtatcgcgatcgcgtgtacaggccgcgcaatgtccgctcagcgacactgcgcgctacctgtccacagccgccttcagaccgtcgagagagtactgatgtcccatattctgatcgtcgaagacgaaaccatcatccgctccgccttgcgccgcctgctcgaacgcaaccagtacgaggtcagcgaagccggctcggtgcaggaagcgcaggagcgcttcagcattcccggtttcgacctcatcgtcagcgacctgcgcctgcctggcgcaccgggtaccgagttgatcaagctcgccgaaggcacgccggtgctgatcatgaccagctacgccagtctgcgctctgccgtggactcgatgaaaatgggggcggtggattacatcgccaaacccttcgaccacgacgagatgctgcagactgtcgcccgcatccttcatgatcggcaaaaagcggccgccgcggcccccgcaccttcacggcctgccgcggcccaggtcggagcctcaggcgacagcgactcggccaacagcgagatcggcatcatcggccgctgtggcccgatgcaggatctgttcggcaagatccgcaaggtcgcgccgaccgattccaacgtcctgatccagggcgagtcgggcaccggcaaggaactcgtcgcccgcgccctgcacaatctttcgcgacgcgccaaggcaccgatgatctcggtcaactgcgccgcgattccggaaaccctgatcgagtccgaactctttggccacgaaaagggcgcgttcaccggcgccagtgccggccgggccggcctggtcgaggcggccgatggcggcaccctgttcctcgatgaaatcggtgagctgccgctcgaggcgcaagcgcgactgttacgcgtgttacaggagggcgagattcggcgggtcggctctacccagtcacagaaagtggatgtccgcctgatcgccgccacccaccgggaccttaagacgctggccaagaatggccagttccgcgaagacctctactaccgactgcatgtgatcgccttgaaactgccgccgttgcgcgagcgcggcgcggatgtactggaaatagccaaggccttcctggcgcggcaaggcgaacgcattggcaacgaagatctgcatttttcccgcgaggccgagcaggccgtacggcactacgcctggccggggaacgtacgtgaactggaaaacgccatcgagcgggcggcgattctcagcgagagcgaggaaatcagcgccgagctgctaggcatcgatatcgagctcgacaacctcgatgaggacttcgacgagccatgcgccacgttgggctcggctgtttcgaccagcaacgagccgaccgaggatctgtcgctggaggattacttccagcattttgtactcgagcatcaggaccacatgaccgagaccgagcttgctcgcaagctcggcatcagccgcaagtgcctgtgggaacgacgacagcgcctgggtatccctcgccgcaaaaccagcgctaccgggtagcgggttgttaccgccccaaccggcacgtaacagaaaccgggttcatcggtaacgggaacccggtttttttccgcctcaaaaaatgtcttctttccttaagtccttgaaaataaaggatttacaaaaactggcacggcaaatgctttctatctggcacaacaacaataacaagcagacccacaataagaacaagacgtaccggctctagcagaacaaaaacaagaaggcagagacgtagctaactgattcttttggagaggaaatgccgaatggggttttgccccacgaccaggccgagaacaacaaaaactgcatcagcagcgcctgaactggttggatcaatgatcgatggcaaatcagcgaccaaagaaatccgtttgctcttggctcccaacgtaggagcgattcccagaagcgatagctgaagggaacgggtgatcaaacaaaaacaacacgcccgaaatactaataacaacaaagcacgcgacatcatttaaagggggagcttcggctccccctagtgctttctggctccggccgttttttgacacctccccgcgcttcgttcaccatccctgctcccggtgctagaatccacgctcgtttcgtggccattccctttgccaccccgtcatttcgccacacagtgcctctcatgctgaaaaagctgttccagtcttttcgtcttcctctgcgccgattgccgcatcctcgccgcacccccgaaatactgtccagccggcagcactcgctgcaccgtaacgatctgagccggcacgccgtcagcgtcgtcgagcgccttcagcacgccggctacgaagcctatgtcgtcggcggctgcgtccgtgatctattgctggaggtaacgccgaaagactacgacgtcgccaccagcgccaccccggagcaggtgcgggccgagtttcgcaatgcccgggtgatcggccgtcgtttcaagctggtgcatgtgcatttcggccgcgagatcatcgaggtcgccacgttccgggcgaaccatcccgaggcggacgatgacgaagacaatcacctcgcatcacgtaacgaaagcggccgaattctgcgcgacaacatctatggcacgctggaagacgatgcgcagcggcgcgatttcaccatcaatgcgctgtactacgatccctcgagcgagcgcatcctcgatcacacccacggcgtccgcgacattcgcaaccggctgatccgcctgatcggcgaccccgaacagcgctaccaggaagatccggtgcgcatgctccgcgcagtgcgcttcgccgcgaagctggacttcgagatcgaacaacacagcgccgagcccatcgccgagctggccgagctgttgaacgatgtgccctcggcccgtttgttcgacgagatcctcaagctcttcctcggcggcaaagccgaacgcaccttcgacctgctgctggagcacgaccttttcgcaccgctgttcccagccagcgccgaggcgctcgaagacaaccccgagtacgccggaaccctgattcgcaacgccctggccaataccgatgagcgtatcgcccagggcaagccggtgacgcctgcgttccttttcgccgccctgctctggcctgccctgccggcccgggtcgccgaactacaggcacgcgggctgccgccgatcccggcgatgcaggaagctgcccacgacctgatctgggagcagtgccagcgcaccgccattccgaagcgattcaccatgcccatgcgggaaatctgggatatgcaggagcgcctgccgcgtcgccagggtcgtcgcgccgaccagttgctggacaacccacgattccgcgcgggctacgacttcctcctgctacgcgaaagcgccggtgagcagaccgacggccttggtgaatggtggaccgattatcaggaggccaacgagagcgaacgtcgcacgatgattcgcggcctcagcagcaaggatgacggcaacggcgcgccacgcaaaaggcgccgtagcgggcggcgcaagcgcggcccgaatgacaacgcaccggcgtccgcggaatagatggagcgggtctatatcggcctgggtagcaatctggccgaaccacgccagcagctccgcaacgctctcgatgcgctggaaaacatcccctcgtcccggctcgccgacgtctcttcgctgtatgtcagcgatccgctcggcccgccggaccagccgcgctactacaacgccgttgcagtgctcgacacttccctggctccgctggcgctactcgacgcactgcaagccatcgagcaggcgcagggtcgcgaacgcaaagccgagcgctgggggccgcgaacgctggatctggacattctgctgttcggcgaccgggtactcgccgaaccacgcctgacagtcccgcactaccacctgcatgccaggcccttcgtgctatatccgctcgccgaagtggcgcccgccaccctgcgcctggccgacggcaggcccctgaccgaactgctggccgcctgccccttcgagggcctggagcgcctcgacgacgcgctgtaaccggtcggtaacagccgtaacgcagaggtaacactccgattgacttagcgtcccgccatcgggactataagcgcccgctaccggcacgtgtcggatgaggcagccgccgtcgccgctggcgccccgactgcaaccgtgaccctcagaggctctaagaggacggcattcatgccagacgtaaccctgaccaccctgcaaggcctcaagcagaaaggcgagaagatcgtcatgctcacctgctatgacgctaccttcgccaagactgcctgcgaggcgggcgtcgagatgctgctgatcggcgactccctgggaatggttctgcaaggacacgacagtaccctgcccgtcaccgtcgaagagatggcctatcacaccgcgtgcgtcaaacgcggtaatcgtggggcgatgatcgtcgcggacctgcccttcatggccaacgcgacgatcgagcagacgctggacaactccgccacgctgatgaaagccggggcgcatatgatcaaggtcgaaggtgcggcctggttggccgagtccattcgcctgctcgccgaacggggcattccggtctgtgcgcacatgggattgacgcctcaggcggtgaacctgttcggtggctacaaggtgcagggcaggcaggaagcccaggcgcagcagatgatcgccgatgctcaggccctggaggccgctggcgccgcgctgctgctgctcgagtgcgtgcccagcgaactggccgcacgcatcacccaggcggtcacggtgccggtgatcggcatcggtgcgggtagcgccaccgatggtcaggtcctggtgctgcacgatatgctcgggctgtcgctcagcggacgcgcaccgaagttcgtcaagaacttcatgcaggaacggggcgacatccccagcgccatcgccgcttacgtccaggccgtgaagagcgcagaattccccgcagccgaacatggattctcagcatgaacgtggtaaggactgtcgccgatctacgtgccgcggtgacccgcgcgcgtggcgaaggcaaacgcatcggcttcgtgccgaccatgggtaacctgcacgccggccatatcgcgctggtgaagaaggccggccagcgcgccgacttcgtggttgccagcatcttcgtcaacccgcttcagttcggtcccaacgaggacctggccagttatccacgaacgctgactgccgatcaggacaagctgttcaatgccggctgccatctgttgttcgctcccggcgtcgaagagatgtatccccacggccagaaactgcaaaccatcgtccgcgtacccggcgtctccgaagggctctgcggcggtagccgccccggtcatttcgatggggtgtccaccgtcgtcagcaagctgttcaacatggtgctgccggatctcgcggtatttggcgagaaggattaccagcaactggccgttatccgcaccatggtccgcgacctgaacatgcccgttcagatcatcggcgagcccatcgtgcgcgccgaggacggactggcgctgtcgtcgcgcaatggttatctcagcgccgatgagcgtgcgaccgctccggtgctgtatcgaacgctgcagcaactggccgacgccattcgccaggggaaccgcgactacccggccctgctggccgctggcaaacaggcgctcgaagctgcagggctgcgtcccgattacttcgagatccgccatgcgccggacctgcaaccggccacgcccgaacatcacgagctggtgattctggcggcggcattcctgggcaagacccgattgatcgacaatttgcaggttcatacccgctgattcactgcgggtcgagccgatcatcggcacccgctccgtccgccccggtattgatcgcactccggggttcgggcacactctgcgccgcttgcgcacccggaggaccccgccatgcacgccatcatgctcaaggccaaactgcaccgcgcccaggtgacccattccgtgctggactacgaaggctcctgcgccattgacggtgactggctggacctcgccggcatccgcgaatacgaacagatccagatctacaacgtcgacaacggcgagcgcttcaccacctacgccattcgcggtgaagagggctcgaaaatcatctcggtcaatggcgcagctgcgcacaaggctggcgtcggacatcggctgatcatctgcgcctacgcgcactacagcgaagccgaactggccaacttcaagccccatgtgctctacatgggtgccgatggtgagctcagccacaccagcaacgccattccggttcaggtcgcctgatcggtctggtgtcagacaagcccgcaacgcctgccgcgctgcgggctttttttgtggtcggggtttgccccgcccgccaaagtctgcaatggtcaacggctacgcaaccttgcgagcgcaacgcttcggaacgccacgcgcttttgccagtcagaccagtctcgacggtgcaggaagcaccgccgccgctgcggcctcaaccgcagcggtacgcgccagctgcattcaggatgaatgcttgcgtgccagcatgatcgaatgactgtccgcacccattgcagacccgcagacagtccgccacagcaaaggaagccgcacaaccatgagctattaccagcaccctctcgatgccaccagcctgtcgtcctggaaggccttggaagaacatcgcctggccatgcagcacttcagcatgcgcgaggccttcaaggccgacccgacgcgcttcgacgacctgtcggtttcctgctgtggcctgtttctcgactactcgaagaacctgatcaaccccgagacgcgcgcgctgctggtgaatctggcgcgtgaggctggcgttgagcaggcagcccgcgccatgttcgaaggcgagcggatcaatgcatcggaaaaccgcccggtgctgcacaccgccctgcgccggccgatgggcgactcggtactggtcgacggtcgcaacatcatgcgcgacgtgcacgcggcgctggcgcagatgaccgacatcgttactcgcatccacaacaacctttggcgcggcttcagcgacaagaccatcaccgacgtggtgaacatcggcatcggcggctccttcctcggtccacagctggtgtccgaggcgctgctgccgttcacccagcacggcgtgcgcacgcattacctggccaacatcgacggcagtgaattccgtgaggtaacggccaagctgaatgtcgagaccacgctgttcatcatttccagcaagaccttcggcacgctggaaacgctgaagaacgctcaggccgcgcgcacctggtacctgggcaagggcggcaccgaagagaagctctaccgccatttcatcgccgtgaccagcaacaagcaggcggcggtcgagttcggcattcgcgagaagaatatcttcccgatgtgggattgggtcggcggccgctattcgctgtggtcggccatcggcctgccgatcgcgctggccatcggcatgtccaacttcaaggatttgctgtccggcgcctacagcatggaccagcacttcctgaacgagccgttcgaaagcaacatgccggtgctgctggccatgctcggcgtgtggtaccacaacttctggggggcgcagagctacgccttcctgccctacgaccattacctgcgcaacttcgtcaagcacctgcagcagatggacatggagtccaacggcaagagcgtgcgccaggacggcacgccggtatcctgcaccaccggcccggtgatctggggcggggtcggcgccaatggccagcatgcctatcaccagttgctgcaccagggcacgccgctgattccggccgacttcatcgttccagtggtcagccacaacccggtcgccgatcaccatgagtggctctatgccaactgcctgtcgcagagccaggcgctgatgctcggcaagacgcgcgaggaggctgaggccgaattgcgcgccaaggggatggacgaggccgaagtccagcgtctcgcgccgcacaaggtcattccaggcaaccggccaagcaacaccgtggtcatggaaaccatcagccccggccgactgggtgcactgatcgcgctctacgagcacaaggtcttcgtccagggcgtcatctggggtatcaactccttcgaccagtggggcgtggagctgggcaaagagttgggcaaggccgtctacggccagatgaccagcttcgatgctccgccggccgaagacgcttcgacccagggactgatcgacttcttccgcggtcgtcatcgcggctgacctgtcgtacgccgggccggatcatcggcccggcgtacggatcctcgccagactcggcagccttccgccgattgcgatcgggcgggcacgggcaacccggcacctggcgtaacatgggcttcccgcctgccgatctagatccgccatggaatccattcgccgtcatatcgaaactcaagtgctcagcctgaccggcctggccatcggcggtgtcgattatgaaaacccaccgggcgatcccgggctgtttggcccggacgcagtctgctggcgcgtgcatggcgatttcacttcgatgttggtaggcggaatatccgcgttattgttgcaagccctgcatccgctcgcgctggcgggcgtctgggatcactcgaacttccgtgaagacctgctcggtcggctacggcgcaccgggcagttcatctcggccaccaccttcggcaaccaggccgacgcacagcggctgatcgagcgcgtccgcacgatccatttgcaggtgaccggccatgcagttgatggccgcccttatgccgcctccgatcccgatctgctgacctgggtgcacgtcgccgaagtcagcagctttctcaaggcgcacctgcgctacctcaacccggcgttatcgggtcaggcgcaggatcgctactacgccgaggtggcgcggatcgccgaggcgctcggcgcgcgcgacgtgccgcgctcgcgtcaggacattgccgactacttgcaggcgatccagccgcagctacgctgcgacgaacgctcgcgggagatcgtgcgaatcctttttgcagcccccgcgcccagccgtctcgccaagcccttcggagcgctgatgatgcgtgctggcgtcgacctgctaccggactgggccagccggatgctcgatctcgagcagtcgcgccccgagcgccagctgatccgcctcggagtcagacgcaccgcgccagtgctgcgctgggccgtgcgcagcggctcggttcaccgcgctcgcaggcggatgggcctgccgccccgctagcgtgaccgacaggttccgcctgtggagccaccccggagcctatgccaccatgagcgccccgcgggcgcccgcatcttccggaggtaagcagcatgcaagaagtcgtcatcgtcgccgccacccgcactgccgtcggcagcttccagggcgctctggccaatacccccgccgtcgacctcggcgcctcggtcattcgtcgtctgctgcagcaaaccggcctcgacccggccgaggtcgatgaagtcattctcggccaggtcctcactgccggcgccggccagaacccggcacgtcaggccgccatcggcgcagggctgccccacgcggttcccgcgatgaccctcaacaaggtctgcggctccgggctcaaggcgctccatctggccgctcaggcgatccgctgtggcgatgccgaagtggtgatcgccggcgggatggagaacatgagcctggcgccttacgtcatgccagcggcgcgcacgggcttgcgcatgggccatggcaaactgctcgacagcatgattcaggatggcctgtgggatgcgttcaacgactaccacatgggcatcaccgcggaaaatctggtggacaagtacggcattacgcgcgaagcgcaggatgccttcgcagcggcgtcccagcagaaggccagggcggcgatcgaagccggccgcttccgggacgagatcacgccgatcgagatcccccagcgcaagggcgaaccacttgttttcgataccgatgaacagccacgcgccggcaccacggccgaaagcctggccaagctcaagccggcgttcaagaaggacggcagcgtcacggccggcaatgcctccagcctgaatgacggcgccgccgcggttctactgatgagcgccgaaaaggccgaggcgctcggcctgccggtcctggcccgcatcgccagctacgccaacgccggcgtcgatccggcgatcatgggcatcggcccggtatccgccacccgccgctgcctggaaaaagccggctggtcactcgacgaactagatctgatcgaagccaacgaagccttcgccgcgcaggcgctggcggtgggtcaggagctgggctgggacgccgacaaggtcaatgtcaacggcggcgcgatagccatcggccacccgatcggcgcatcgggctgccgcattctggtcaccctgctgcacgagatgatccgccgcgacgcgcacaagggcctggcgacgctctgcatcggcggcggccagggcgtcgcgctggcgctcgagcgctaatcgggcctcatcacgccggtcagcgccggcgatttccgctagactgcgcggccctctcctccgagtcgccgcgcatgccgtctctcgaacaggcgctgcgcgccgccctgcaccgccgcgacgctttgattaccgacctgcaccatcagggcaccgactgctatcggctattccatggcagccaggaaggcgcgcccgggcttacggtcgatcgctacggtccgcagctgctggtgcagagctttcatcagccgctagagcgcgacgcgctgctggccctgcatgcacaaagctgcgcgagcctgggcgtagcgctctcactggtctataacgaccgctcgcagggcaactcacggatcgatcgcaccgatccggtgtaccgcgccgacgagcgcgcactggcagaccagaccgcccgggaatggggattgaactaccgcgtccgtgcgcgccacagcggccaggaccctttgctgttcctcgacctgcgtaacgcccgcggctggatcaaggccaacagcgccggcaagtctgtactcaacctgttcgcctatacctgcggggtcgggctctgtgcggccgcaggcggcgcctccgaggtcctcaacctggacttcgccgagagcaacttggcggtcggccgggagaacgccgcactcaaccccgacctgtcacccatgcagttcctacagtcggattactttccggcgatccgccagctcgccgacatgccaatcccgcagcgacgcggccgctctctgcctgactacccacgcctttcgccgaagcagttcgaccgggtactgcttgatccacctgcctggtcaaagagcgccttcggcacggtcgacctgctgcgcgactatcagagcctgctcaagcccgcgttgctcgctactgccgaggatggcgtgctggtttgctgcaacaacctggcgaaggtcggcctggaagaatggcgcgagcaggtgctgcgctgcgcaacgaaggcaggccggcccgtgcgcgagtggcaggtgctgacgccggccgccgactttccatcgaccgacgggcgggccccgctgaagattctggccctgcaactatgaggcgcagcggttctcgaatcgcatagaggaacccgcatgtcatgccatactccaaggcagttcactgcccggaatgtaggtccgcatgcccaacggaatgaagcgcgcgctcatcgccctgatgaccgcactgatctgctattgcctcctcggctttctgatattgcccggcgttgcccagcgggtcgtcaaccagcaactgatccagtacgcaacggtaccggcgcgcctggagcgcatcgaattcaacccgttcagcctcgagctgacgctgttcgatctgcacctgggcgagcccgataaaccgcaactcggtttcgagcgcctttacctgaatttgcagtggagcagcctctggcaccggaccctgcagatccaagacatcgaactggttgaactgcacaccgaagtggttttcgacaaggacggcgtactcaacctgacccggctgttcgacctgccgccggctgaagagaccccggacgaggaagagaaggagccgttcgcgctgagcatcggtcgcctgcaactggtggaaggctcggttcacttcgctgaccaccgccccgcagagcccatcgatttcgtgctcgactcgctcaacttcgagctgctcaacttcgccacccgttcggaagatgccgccgacgccgtgctggtggcaaccggccctagcggagcccgggtcgactggcgcggacgagtcagccttgcgcccgtgagttcgtccggccaactgaaggtcagcaatctgttgctgaaggatttctgggcctacgcccaggatgcggttcccttgaaactgcgcgaaggccggctcagcttcgccagcgactatcgcctcgatcttgcgcaaagcaccgagctacagctgagccacctgaacgcgcaattgacgccgctcgaactcgacagccccgacggggcgccgctggttcgcctggaaagcctcgaaatcagcgagacatcactggaccttgccaagcaacaggtgatcgtcggcaagctgcgtagtcgtgcgctggagacctgggtggctcgagagcctggcggtgagctcaactggcagaagtggctggcacccgaatcatctgcagggccttcccggcacgccgaacagcccgatgtatcgcccgcctcatccacctcgactgacggcacggcggcgcccgaggccacctggcaggtcctgttacgcgacgcccagctacgcgactatcaggtccacctgagcgaccgcgtacccgagcaggaggtggcgctcgagctgggcgcgctggacctcgatatatccgatttcgacagctcgggtacttcgccgtttggcgtcaagctgaacacccgtgtcggcaaacagggcacgctgaaggccgccggacacctgcagctacagccggcgaccgggcagctcgacatcagcacgcaagacatcgaccttcgcatcgcgcaggcctacctgaccccgttcgtccatctggaactacgcagtggcttgttggccagccagctgcggttcgacctgaccggtaccgacccgctggccttcagcgtggacggaacagcgaatgtcacgcaactgcatacgctggacaccatcaaggatcgggatttcgtcaaatggcagcgtctcgaactggacgacctgaagtaccagtaccccgcggcgctgcagatagggcatgtcggcctgacccagccctatgcacgcttcatcatcaatcccgacctcaccaccaacatcaatgaccttctggtggacaagccgtccactggcagcaccgacgcagcggcagctgcaacggagccggcagaaccgatggccatccgtatcggcggtatcagcatcaccgatggctcggccaatttttccgacctcagcttgcgtccgcctttcatcaccgcggtgcaggacctcaacggcaaaatcggcacgctcgacaatcgcgcccagcagccggcggcggtcgatgtgcagggcaaggtcgatcgctacgcgccggtgagcatcaagggcagcctgacgcctttcgatcctctgcagagtctcgatatcgcaacccaattcaggcaggtcgagctgaccaccctgtcaccctactcgggaaaattcgccggctaccggattcgaaaggggcgtctcgatctcgatcttcactaccgcatccagcagggccagctcagagcgcagaacaaggtcgtgctgcagcagctccagctcggcgaacgcgtggaaagccccgaggcggtggatctgcccgtgcggctggccgtcgcgctgctcaaggacagccacggcaccatctcgcttgagctgccggtgcagggcgacctcaacaacccgcaattcgacgtcatgccgatcgtttggcaaaccctgcgcaatttgattacccgggccgtcaaggcgccgttcaagttcctggctggactggctggcggcgatcaggacgatctcagccaggtgctgttcgcccccggaagtaacgagctggatcaacaggctcgcggcaatctcgacacgctgggtcgcgcgctacgggagcgtccggtgctgcgcctggaagtcgaaggacagagctcgccgcaggcggacggcccgctgctggcggagcagtggctgcagcgcgagtaccaggagacctggtacaaggtgctgcagcgccgcggcgacaaggtgccggccgatgcggcgcaactggagattggcgaggaggaaaaggccgccatgctcgaaggtatctaccgcagccggctcggccagcagccgccggcccagtgggccgagctcgacgaacaggcgcgacgtgaaaagatgcgcgaagcgattgtcaccagccgggcggacagcaccgcgctcttacgccggctgagccgagcccgcgcggcgtcgatcaaagactacctcgtcgaccaggcggggctcgaagattcgcgggtctatttgctggacaccgacatcactcaagccgagcacaacgagcgcgttccgacgaccttgcatctgggaagcgaatgacatgacagtcccgattcgttgcgccgcgctgctcgcgctgacgttcgccgtgccgtcacaggccgatacgctacgctgcggcagccagctggtcagcaccggagaccgtacgttcgaagtcgaacagaagtgcggcgagccccgccacagggatctggttgggcacacgctgggaccgtacgccaggcaagagctggtcatcgaagaatgggtgtacggacccgacaatggcatgctccagatactcaccttcgagggcaatcggctggtgcgtatcgagtcccgccgtgcgcgctgaggaagcgaccaccatgtctagtcacctgccgctcgcactatgctgcgcgctgctgttcgctggcaccgcccaggcatcctctactcatcgctgcggcagcacgctggtcagcctagacgcctcgaccagcgaggtgcgaagcaagtgtggcgtgcccaaggaagcggcgatggtgggctacagggaagtgatcgacgactacggtttccgccacgaagtgcaggtcgaggaatggacttacggccctaccaatggcatgtaccatttcctgcgtttcgagggaaatcgccttcgccagatcgacagccagcgtggccgttagcgctgggggaccgagcacggtacgaagtcaggccaatggcattgcgcgctggaaaccatggcgctaagcgaccagcgaccagcgaccagcgagcctttgctccgttgtttggcggtggtaagtcccgcaccctgtgggcgttagcgcgtgtcggcctgacctgaccgaccccgatgcactgcagaacgaccggtgctccataaaaaaccccgcctggcggcggggcttttatcgctacgccgcagtcgcggcactagcctttgtcttactcggcggctttgaggccatctgccgatacgtcgcgaactcctttgatggtcttggccttgttgatcgctgcctcacgctctgcctcggtggctacggtaccggacagcgaaacgatgccatccttggtttcgacttcgatgtccatacctggcgtggcgtcttcggccaacagcgcggatttcaccttggtggtgatccaggtatcggaggtggcatcgccagcctctttcatggtctcgttggcggccaacatgacggtatcagccttgtccagcgctggggtggtgtcggcgaaagcggcgcccgccatcggcaagctcaatgcagcggcgacggcagcggcggtaagagagttctggatcatgttcataatggcactcctgtttttcttcggatgtctgcggtattacttcgacctcagattcatagataaactcgcaagcggcatgccactttctttctattaaaaaaccattaaaaatcaatcagttgaaatacagcagtggcttacagccactagcacactgcaagtttgcctagggtttagcgtgcaagttgcaatcaattcgaagcggcggatgtccgtcttcgccgggtccgcaccgtagggcgtaaacaaaaaaggaccccgaagggtcctttctttgccgctgttgcgcgttaggcgccagaggcctcggcggccgccacgtccttgatggacagcttgatacggccacggttgtccacgtccagcaccagaaccttcacttcctggccttccttgaggacgtcggtgaccttctcgacgcgctgatcgctcagcatcgaaatatgcaccagaccatccttgcccggcaggatgttgacgaaggcgccgaagtcgacgatgcgctcgaccttgcccacgtaaatcttgccgatctcggcctcggcggtgatgcccagtacgcgctgcttggcagcttcagcggcttccttggtctcgccgaagatcttgatcgaaccgtcgtcctcgatgtcgatcgaggccttggtctcttcgcagatgctgcggatggtggcgccgcccttgccgatcacgtcgcggatcttgtcctgatcgatcttcatggcaatcatggtcggtgcgttggccgacagctcggtgcgcgactgcgcgatgacctggttcatctggccgaggatgttctggcgcgcttccagggcctggcccagggcgatctccatgatctcctcagtgatgccctgaatcttgatgtccatctgcagtgcggtcacgcctttggcagtaccggctaccttgaagtccatgtcgccgaggtggtcttcgtcacccaggatgtcggtcagaacggcgaacttctcgccttccttgaccaggcccatggcgataccggcgaccggtgccttcatcggcacgcccgcatccatcagcgccagcgaggcaccacagacggacgccatggagctggaaccgttggattcggtgatttccgatacgacgcggacagtgtacgggaactcgtcagcgctcggcagcatggccgcgacgccacgacgcgccaggcgaccatgaccgatttcgcggcgcccggttgcgcccatgcggccacactcaccgaccgagtacggcgggaagttgtaatgcagcatgaaggcatcgcgcttttcgccttccagggtgtcgagcagctgagcgtcgcgtgcggtgcccagcgtagcgacgaccagcgcctgggtttcaccgcgggtgaacagcgccgaaccgtgggttttcggcagcacgccaacttcgatattcagcggacgcacggtacgggtgtcgcgaccgtcgatgcgcggcttgccgttgacgatgttctcgcgaacgatgcggtactcgatctcgccgaaggcttccttgacctcggaagccgaaggctggccttcttcgctggcgaacttggcgacgatctggtcacgcagctcgcccagacgcgcataacggtcctgcttgacgatgatggtgtaggcctgggaaatctgctcgccgaactcgctgcggatcgcatcgagcagcgcggtgttctcggctttaggctgccagtcccaggtgggcttggcggcttcggcagccagttcgttcacggcctggatcacggcctggaactcgtcgtgggcaaacagcacggcgcccagcatctggtcttcggtcagctccttggcttcggattcgaccatcagcacggcgtccttggtgccggccacgaccatgtccaggctagaggccttgagctgctcgtagttcgggttcagcaggtagccggtttccgggtggaacgccacgcgtgcggcgccgatcgggccgttgaacggaatgccggagatggccagtgcggcggacgtaccgatcattgcggcgatgtccggatcggtcttcttgctggtcgaaacgacggtgcagatgacctggacttcgttctggaagccttccgggaatagcgggcggatcggacggtcgatcaggcgcgaggtcagcgtttccttttcggagggacgcgcctcacgcttgaagaagccgccaggaatcttgccggctgcgtaggttttttcctggtaatggaccgagagcgggaagaagcccttgctcggatcggcggtcttggcgccgaccacggtcaccagtacggtgacgtcgtcgtcgacggagaccagcacagcgccagaggcctgacgggcgacgcggccagtctcgagggttacggtcgactgaccgaactgaaatttcttgataaccgggttcacggtggttccttctctatgttgccttgggggaatcgttatctgcgccctacgggcagagcctcacgccgggcgcttgtcgcaaaattcttgggcagtgacgggtatcgaaccctgccgctgtccgaaatacgcgcttctgaaaggcaaaagctggaagcggggctagcccacttccagcttcggcattcagcttcgcgtaagcatcgcttagcgacgcagccccagacgaccaatcagagcgctgtaacgagtggtgtccttgcccttcaggtaatccagcagcttacgacgctggttgaccatgcggatcagaccacgacgggagtggtgatctttgccgttggccttgaagtgaccttgcagcttgttgatgttggcggtcagcagggcaacctgcacttccggagaaccggtgtcgccttcaccttgcttgtactcgtcaacgatctgggctttttcttcaacgctaagtgccatgatgggctccttctatgaacaggccgggacgtatcccgtttttttaaaaagaggcatgaccgtgcctgccgacagccaccctcgtcacgcccgccgccgaaacggtgggcgcatcggtcattccgaccgaatcaagcgacgcggcgcgatgcgcccgtcttcgctcacttcaccgataccgatgaagcggccgttatgatcctgcacacgcagcatgccgaacttcggcgcttccggtgcacgcaccggctgcccatgcagccagtaaaaagcactatgctctgacaactgcaacagcggccagtgttccaacccgctgtcgaccggcttgagaaaagcgtctaccgcttccgccccgccttctgcatgagcctgttcgagcgcttcgagactgaccgtctgggtcagatcgaaaggccctgcctgggtccgacgcagctcggcaacgtgcgcaccacaacccagttcgcggccgatgtcttcgaccagcgtacgaatataggtgcctttgctgcagctcaccgcgaggcgagccctgtcggcgtccagagacagcagatccaagcgcgcaatattaacagaacgtggctctcgctccactacttccccagcacgcgccagcttgtacagcggctggccgtcgcgcttgagcgccgaatacatcggcggaatctgcagcagatcgccccgaaacgccggcagtaccgcttcgagctgcgcctgggtcaccgcgacaggcttgcgctcgagcacctcgccctcggcatccgcagtgctggtggtgacgccaagctgggcaacggtttcataacccttgtcggcatcgagcaaatactgcgaaaacttcgtggcctcgccgaaacacaacggcaggacgccggttgcgagtggatccaggcttccggtatgccccgctttttcggcattgagaagccagcggactttctgtagcgccgcattggaggtgaacccacgcggcttgtcgagaagaatgatgccactgactgagcggcgaacgcgttttacctgagccacccttactctccgacgtcatcgctgtgcttgcgatcttcagccattgcccgctcgatcaacgacgtaagctctacgccgcgccgtacgctggcgtcatagttgaaatgcagctgaggtacggtgcgcagtttcatcgccttgcccaactgcatccgcaggaaaccaccggcctcgttgagaatcttgaggttggctttgaccgcgtcctcgtcatcgtccttgcccatgatggtgatgaacaccttggcatgggacagatcgcgactgacttcgacggcggtaatggtgaccagccccagccgcggatcctttacttctcgttgtatcagcaacgccaattcgcgctgcatctggtcgccaatacgctgggtacggctgaattctttggccataaaggaccccgctacaggctgcgggcttcaagccgcaggctaaaacaaaaacagaaaaacaaacggcaagctcaagcagcatgttcaatcactgcctgaagcctgccgtctgtagcttggagccgcttagagcgaacgcgccacttcgaccttctcgaacacttcgatcttgtcgccagccttgacgtcgttgtagctcttcaccgcaataccgcactccatgccggcgcgcacttcggcaacgtcgtccttgaagcggcgcagcgattccagctcgccctcgaagatcaccacgtcgtcgcgcagtacgcgaatagggcggttgcgatgcaccatgccttcgatgaccatgcagcctgcgacggcaccgaacttcggcgaacggaacacatcacggacctcggcgatgcccaggatgttctcgcgaacgtcgctgcccagcatccccgtcagtgccttcttgacgtcttcgatgatgtcgtagatcacgttgtagtaacgcagatccaggccttcctgttcgacgatcttgcgcgcacctgcgtcggcacgcacgttgaagccgaacagaacggcattcgacgccagcgccaggttggcgtcgctctcggtgataccaccgacaccaccgccgataacacgtacctggacctcatcgttacccaggctgctgagcgagccctgcagcgcctcgagcgaaccacggacatcggatttgaggacgatattgagcgtcttcttctcttcctgccccatgttctcgaagatgttttccagcttgccggcatgcgcacgggccagtttcacttcgcggaacttgccctgacggaacaaggccacttcgcgcgccttcttctcatcagccagcacgctgagctcgtcgccggcatcaggcgtaccgtcgaggcctaggatctcgaccggaatcgacgggccggcttccttgattggcttgccgttctcgtcgagcatcgcgcgaatacggccgtagttcgagccgaccagcgccatgtcgccctgacgcagggtaccgtcctgaaccaggaccgtagcgaccggaccacgccctttatcgaggcgcgactccactaccacaccgcggccaggcgccgaaggtgtcgcggtgagttcgagaatctcggcttgcagcagcacggcttcgagcagttcgtcgacgccggtacccatcttcgcggaaaccggaacgaaaggcgtgtcgccgccccactcttccgaagtcacttcgtgaacggacaactcactgcggatccgatcgagatcggcgcccggcttgtcgatcttgttcaccgcgaccaccagcggaaccccggcagctttcgcgtgctggatcgcctcgatggtctgtggcatcacgccgtcatcggccgccacaaccagaatcacgatatcggtcgcctgcgccccgcgggcacgcatcgcggtaaacgcggcgtggcccggtgtatcgaggaaggtgaccatgccgcgatcggtctcgacgtgataagcaccgatgtgctgggtaataccacctgcttctccggcagcgaccttggcccgacggatatagtcgagcagcgaggtcttaccgtggtcgacgtgacccatgacggtgaccaccggcgcacgcgtgatcgcctcgccttcgaacttcagcagttcagccagttgctcttccagggcgttgtcgctgaccagcttgaccttgtgtccaagctcttcggcaatcaactgggccgtttcctgatccagcacctggttgatagtgaccggactgcccatcttgaacatgaacttgatgacttcggcagccttgaccgacatctgctgcgccagatcgccgacggtgatggtctcgccaatcgcaacttcgcgaacgatcgggccggtcgggctctggaagccgtgcgcattgcgcttcttcagcttcgacttgccacgcccgccgcgacggaacccgtcggcatcgtcttcgccactgcgcacggtgcgcgacagcggagccttggtcttcagcgatgggcgatgctgcgcctgcttgcgatcacgacgctcgtcatcatcgctacgcgccttgtccgaccggcgcggctcgtccttcttgcgctcctcgacaggggcggccggaacgaccggggcgggctcggcttctactgcaggtgcgggctcttcggacgcagcagccggcgcttgttgcgcctgggcagccgcttgcgcttgggcctgaagccgggcttcttcctccgcacgcagtcgcgcctcctcggcagccttctgccgagccgcttcttcggcggcgcgctgctcttcaagctcgcgctgcttctcggcttcgatctcgtcagggctacgcttgacgaaggtctttttcttacgaacttcaacgctgatggtcttgctgccaccgaccttcaacttggtcgtggtcttgcgctgcaatgtgatcttgcgcggctcgtccaccttggccccatggctgctcttgaggtgcgccaacagggcctgcttttcgttatcggtcactacttgctcggcgctggtgtgcgacagtcctgcctcacgcatctgctgcagcagtcgctcgaccggtgtgtcgaccacctgggccagttctttcaccgtgacttgcgtcatgcatctctctcctcaggccgctaattacttactcgaaccaatgggctcgggcggccatgatcagcttgccggcacgctcttgatctatgccgtctatgtcgagcaggtcgtcaatcgactgctcggccaggtcttcgcgggtaatgacaccccgcattgccaactcgaccgccagttccttgttcatgccatccagctcgagcaaatcctcggctggctgggcgtctgccagtttttcttccgttgcgatcgcctttgtcagcaggcgatccttggcgcgggttcgcagctcattgacgatatcttcgtcgaagccttcgatgccgagcatttcctccattgggacgtaggcaatctcttcgagcgaagtgaaaccttcctcgacgagtacttgagccagctcttcgtcgacatccagctcgtcgatgaaattacgcaggatgtcgccggtttcttcctgctgcttggtctggatatcggcctcggtcatcacgttcaacgtccagccggtcagctgactggcgagacgcacgttctgaccgcctcgcccgatcgcttgggccaggttgtcttcaccgaccgcgatatccatcgcgtgcgcatcctcgtcgacgatgatggcggccacttcggccggcgccatggcattgatgacgaactgagcagggttctcgtcccagaggacgatgtcgacacgctctccaccgatctctccggataccgcctggacgcgcgacccgcgcataccgatgcaggcaccctgcggatcgatgcgcttgtccttcgaacgcacggcgatcttggcccgtgagcccggatcacgcgatgcgcccatcacctcgatcagcccttcagcgatttccggcacttcgatacggaacaactcgatcaacatctgcggcgcggtgcgcgacaggatcagctgcgggccgcgattctcggtgcgaatttccttaagcagcgcacgtacccgagcgccaacgcggaaggtctcgcgggcaatgatatcttcgcgagccaacagtgcctcggcgttgttgccaaggtcgacgatgacgctgtcgcgggtgaccttcttcacggtgccggagatgatctccccgagacggtcacgataagcctcgaccacctgggcccgctcggcctcgcgcaccttctgcacgatgacctgcttggcggtctgggcagcgatacgaccgaattcgatcgactcgatcttttcttccagaacgtcgccgaccttcgcgtgggcctcctgggcctgcttcatgtcgacggtcagctggtgggccgggtcgtcgaaattttcttcctcgacgacggtccagcgacgaaatgtttcgtagctgccattctgccgattgatctcgactcgcaggtccacctcatcctcgaagcgcttcttggtagccgtggccaacgccagctccaatgcctcgaagatcacaccggccggtacgcctttttcattggataccgactccacaaccagcagtacttctttgctcatcgtacgcctcgcctttcgcaatccattggggtccgcgggatccgcgattcactcaaaacgggggattatgttggtcttgtcgatcatgtcgatcggcaacaggtattcgtggtcatcgaccagcaccaccacatcctgctcctcgaccccgcggagaagaccctggaaattgcgccggccctcgaagggcgagcgcagccttattttgacctgatcaccgacatgcgccgcgtactgctcaagggtgaacagcggtcgatccataccaggcgaggacacttcaagcgtgtaatcggaactgatcggatcttcaacgtcgagaacaccactcaactggcggctgaccttttcacagtcatcgacaaggattccatccggatgatcgatatagaccctcaacaaggaatgtcggccctgtgaaatgaactcgacaccccagcattgatagccaagcgcctcgaccaccggggccaacaaggcctgcaactgttctagcttgctcgacatcgaagtcctcgtgcatgccgtacaaatgaaaaatgggcgaaacgcccatccctgatgatcgcctgtagatgccggcgacctggcttgaagctaataaaaagccccttaacaggggcttttcatcaactggttgcgggggctggatttgaaccaacgaccttcgggttatgagcccgacgagctaccagactgctccaccccgcgtcaaactgggcacgaattatacgaccgcgccaaaaataggtcaacccaaacactaaaaacaagaaagcccgcgtctgcgggcctgcttgtttggtaccgaggaggggactcgaacccctacagcctatggccactaccacctcaaggtagcgtgtctaccaattccaccacctcggcaaaaacctgtatcactgctgcttttcgacttgcggtacttcgtctgcactcggcgcggccggagccgattccaagacaggtacatcttctaccgccggcttgctaactggcacttctagcactgctggatccggcaagcccgcccgagaaacctgctcggcctgacgcgtcgcgaagaaccccaaacccaagctggtcaggaaaaaaacgccagcaagtatagcagtaaaccgactaagaaaggtagcagaaccttggcttccgaatacggttgccgaagctcccgaaccgaatgacgcgcccgcatccgcaccctttccttgctgtagcaacaccagcacaaccacaccaatggcaaccagcagatgcaccacaatcacaacagtctgcaacatctgatcagttccctgcggcgcgacagatcgcaccgaaatcattcgctttcagagaggcaccaccgataagccccccatcgatatccgccatcccgaacagctcagcggcgttctccgccttcacgctgccaccgtacaggagacgcacctgcgcagcgacgctttgactctctcgtgccagctgagcccgaatggcggcatgcacctcctgagcctgctcaggcgttgcggtgagccccgagcctatcgcccagaccggctcgtatgccacaaccgccttttcgaaagcggctattccggcgtcagccacgacatacgccaactgccgcccaaccacttccagggtctgcccggattgacgctgttccagcgtctcacccagacacagcaccggggtcataccgctctccagtgccgccttgaattttcggcttaccgtctcgtcgctttcgcccagaagcaggcgtcgctccgagtggccaaccagtacccacccgcaccccgcatcagccagctgagcagcagactcttcgcccgtcagggctccgaagccattctcagcagcgcaatcctgagcacctacggcaatcgccttgccctcaagaccgctaactacctgcatcaagtgcaggcaggacgggaaaacagccacctcgaccgcggccggcagctcctgctggcgaagcgcctcgatcagctctgcgacgctggcgcgggtaccgttcatcttccagttaccagctaccaaggggcgacgcatgctttacctcgtcggtcaaagtgggcgcagatggtactcaacgaaaacagacctggcaagcgccaatcacacacaaacttcggtgactgcgtttgccagctcttcggcgtaggaacggacctgctcctcgtcatcaccctcgaccatgactcgcaccagtggctctgtacccgacttgcgcaacaggacgcggccacggccggccatgcgccctgtgacgctgtcacagaccgcctggacctgcgggtgggaaatggggtctcgatcgccagcgaaacgcacgttgatcaggacctgtggacattttttccaaaccaggcgctcctgcgccaggctgtgaccgcgccgtctcaacgcaagtaccacctgcagcgccgcgataatcgcgtcgcctgtcgaaacatgctgcgcgcagacgatgtgcccggaattctcacccccgagcacccagtcacgctcaagcatttcggccatcacatagcggtcgccgaccttggcccgaacgaagggaatgtcgcggtccttcaaggccagctcgagccccagattactcatcagcgtgccgacgacgccgcccgccaggcgaccacgatcttggagatcggtggcgatgatatagagcagctcgtcgccatcgacctgggcaccggtatggtcgaccatcatgacgcgatcgccatcgccgtcgaaggcgatcccaaggtcagccccttgctcgaccactgccttttgcaactgcgccacgtgcgtcgaaccgacctcggcattgatgttcaggccatccggctgcgccgcggtcaccaccacctcagcgccaagctcgcggaacacactgggtgccaccttgtaggttgcgccatgagcgcaatcgagcacgattttcatgccagagaagtcggtactggtgggcacactgcttttgcagaattcgatgtagcgtccggcggcatcgttgatccgcgaagccttgcccagctgcgccgattccacgaccgtcattggcgtatccagcagctcctcgatcatcagctcaacctcgtccggcagcttcgtaccccgcccagagaagaacttgatgccgttgtcatgatgaggattgtgcgatgcgctgatcacgatgcctgcgtcggcatggaaggttcgcgtcagataggccaccgcaggtgtaggcatgggcccaagcagcaacacgtccgcaccggccgccgaaagccccgcctgcagcgccgactcgaacatgtatccggagatacgggtgtccttaccgatcaggatccggcacttgccgtgcttgcgaaatgccatccctgcggcccagccaagcttgagcatgaagtccggtgtaatcgggaactgccctacatggccacgaatgccatcggtgccaaaatattttctacccataaaaatccctattcggccgcttgcaccgcggcgatcattcgaaccacatcgacggtttccgccacgtcatgcacgcgcaaaatgcgagcgccattggcaacagccaacgcagcgagcgccaggcttccagacaggcgatgcgccacatcacgtcccagcgtctgcccgatcatgctttttcgcgagacgcctaccagcaaaggtcgtcccaatgcgtgtagctgccccatatgcttgaacagactgagattgtgcgacaggttttttgcaaagccaaagcccggatcgagaacaatccgctccgcagcgatgcccgcagccgcacaaaccgccatccgctcacgaagaaatgccaacacttcggccgtcacgtcttcatagcgcggatcgttttgcatgttggaaggctcgccttgcatgtgcatcaagcacaccggcaggccagtgtcggcagcagcgtccagcgcgccgtcacgagagagtgaacggacatcgttgatcaggccggcgccgagtcgtgcactttcgcgaatcacggctggcgtggaggtatcaaccgaaatcaccacatcgagctcgcgagcgatcgcctcgaccaccggcgcaacccgctcgagctcctctatcggtgaaacggcgcgcgcgcctggacgggtggactccccgcctacgtcgaccagcgtcgcgccagccgcgatcattcgctcagcatgacgcaaggcggcatcgacaccgacatgctgaccgccatcggaaaaggagtcaggcgtaacgttgaggatacccatgacgtgagggcgcgataaatcaagaacccggctaccacaaggtagccgggctggatgcaacggttcggtcattaacgaagccttggcttagtgctcgccggcaggaccaccgatcggcgtttgcggacgcccattttcgggctgcacgggtgtgccggtagacccggagccatcctgccaatcacgaggctcgcgaggtgtgcggccggccatgatgtcatcgatctgatcggagtcgatggtttcgtacttcatcagcgtctcggccatcaggtccagcttgtcgcgattatcggccaggatctgcttggccgtgccatagcactggtcgatgatgctgcgaacctcaaggtcgatcagcttcgccgtatcgccagaaacgttggcgtgttggctaccggcactgcgacccaggaatacttcaccttcttcctcggcatacatcagcggcccgagtttctcggaaagcccccacttggtgaccatgtttcgagccaactgggtggcccgcatgatgtcgttggatgcgccagtggtaacgccttcgaaaccaagcgtcatctcttcggcgatacgcccaccgaacagcgaacagatctgactgatcaaggcacgcttggagaggctgtaacggtcctcctccggcaggaacatggtgacacccagcgcgcgaccacgtggaatgatcgacaccttatagaccgggtcatgctccggcacgatgcgcccgacgatggcatgccccgcctcgtggtacgcggtattgagacgctctttctcagacatgaccatggatttgcgctcagcgcccatcatgatcttgtccttcgccagctcgaactccttcatttcaaccacacgcttaccggcgcgagcggcgaacaatgaagcctcgttgaccaggttggccagatcggcgcccgagaaaccgggcgtgccgcgtgcgatcaaagctggctcgacgctatccccaagcggaaccttgcgcatgtgtactttcaggatctgttcgcggccacggatatccggaagtccgactaccacctgccgatcgaagcgtcccgggcgcaacagcgcggggtcgagtacgtccgggcggttggtcgcagcgatgacgatgatgccgtcgttcatctcgaagccgtccatctccaccagcaactggttgagggtctgctcgcgctcgtcatgaccaccgcccagaccggcgccacggtgacgaccgaccgcatcgatttcgtcgatgaaaatgatgcagggtgcatgcttcttggcctgctcgaacatatcgcgcacacggctggcaccgacgccgacgaacatctccacgaagtcggaaccggaaatggtgaagaaaggaaccttcgcctcaccagcgaccgccttggccagcagcgtcttaccggtacccggcgagcccaccatcagcacaccgcgcggaatgcggccaccgaggcgctggaacttgcccggatcacggaggaactcgaccaactcggtaacttcttccttggcctcatcacaaccagccacatcggcaaaggtggtcttgacctgatcctcggagagcaggcgcgccttgctcttgccgaaactcataggcccgcccttaccgcccgcaccgccctgcatctggcgcatgaagaacatgaagaccgcgatgatgaccagtatcgggaagctggcgaccaacaactgcgtccagatgctctgttgctctggctgcttaccttcgatcacgacattgttgttgatcaggtcaccaatcaggccgttgtcctgaatggccggccggatcgtcttgaacgtctcgccgtcgctacgcttgccggtaatgacatagccgtcgaccgtcacgcgctcgactcgcccttccttcacctgctcgatgaagtcggaatagttaagcgtctgcggctcggtcgggctcgaaaagttgttcatcaccgtcaccaggacagcggcaatgatcaaccacagaatcaggtttttcgccatgtcgttcaattcactaccctctagagcaggcctgttgtcgggagcctgcatgacggccatttcgctctcggcctaacttactacacaacgtcgctgaacgggcagcttggtctgtaacccgatatgaaacatgctagccggtaaagccgggcggctagtgccggcccgaagatttttgctcgactttcagttaggaccgcgactcggacatctcgttgccagctgcgcggtagccacgggccagaagatactgttcacgcgagcgatccctggaggacaagggtttgcgcatttgcaccttgtcgaaattctgccggacttctttcaggtaggcatcgaagccctctccctggaagatcttgatcagaaaatccccacctggccgcaatacccgcatggccagatccagcgccagctcgcaaaggaacatcgccttcgcctgatcagcaaccttcaccccactcatattgggggccatatcggaaatcacaaggtccacctgcgtatcgccgatggcctgaaggatttcggcaaacacctcgtcctccgtgaaatcgccaagcacgaaagtgacgtcggcgatgctatccatcggcaggatatcggatgcgatcagccggccacggtcgccgatcacacggctggtgacctgagaccagccacccggtgcggcaccgagatcgacgacagtcatgccgggacgcaggatgcgatccttttcctggatctcgagcagcttgtagctcgcccgggaccgatagccatcgcgctgcgccatcttcacatagggatcgtcgaaatgttctttcagccaacgcgggctggtcttggagcgtgccaagctgttacctcatctgtgcggctcaaggcgtgtcagttacactagccgccgttttcaagggttctgacgcaagggtcgaattatgccgctcaccaacgagcagaagaaacagtacaaatccatcggccatcacctgaagccggtcttgatcgtctccgagaacggcctgaccgaaggcgttcaggccgaactggaccgtgcactgagcgatcatgagctaatcaaggttcagctgcggatcaccgagcgcgatgaccgtcgtgcggtgatggacgaactctgcaagatcggcggctgcgaactggtccagtccatcggcaagatggcgttgatttatcgcaaaaacccgaaagccaacaagcaactctcgaacgtgcatcgctttcagggatgagccgtcgagcacagtcgcactacgctatcgctctcgcccgggagcgacctgcaacaccagcagcagaccacaaaggcccatcacctgatagctgaacaacaaccagtaggccggcccgacggcattggccttcaccacgaaataactcgccgcaagcagcaataccacaagcagcaactgcccacgcacatctcgccagaggctgcgtagcccgccgatctgaatcagcactaccgcctgaagcgccacgcagaacgcagcgaaccctaccagtaacggcctgagcgcgcctgcaatttcctcgagcagcagcggcgccaagccgaacttggcgagcgctggcagcatcacgaattgcaacagccagaggccgccgacccagaatgtctgggccagctgccagctgatcacgcccgcgcgcatcgcgtggcgatcagatatgacgaacctcgacgatttcatactcgaccaggccgctgggggtcttcacggccactacgtcaccttcctccttgccgacaagggcacgggcgatgggtgagctgaccgacaacttgccgcgtttgatatcggattcgtcatcgccgacgatctggtaggtcaccgtttcgtccgtctcgacattggcgatttccaccgtggtgccgaagatgaccttaccggtatgcggaatactcgcgacgtcgatgacctgagcattctgcagacggccctcgatgtctcgaatacgcgcctccaccatcccctgctgctcacgagcggcatggtattcggcgttttccttgaggtcacccagctcgcgggcttcggcgatggcctgggtgatctgcgggcgcaattcggttttgagatgcttgagttcttcctccagggcgcgagcgccctggacagtcattgggtatttagtcatgccttgattcctgcatggagatcctgcaagcggcgcacggacttctcgggaccgaacttcagcgcctcacagatcgcctgcccaccggccagggtggtggtgcagcagatcttgtgctgcagggcgttacgacgaatcgagtaggagtcagcgatggactgacgcccctcggtggtgttgatgatcagggtaacttcgtcatttttgatcatgtcgacgacatgaggacgcccttcggtcaccttgttcacacggcgcaccggcagtccggccgcctcgatgatcttggccgtaccagccgtgccgacaacctcgaaaccgagctcgatcagatcacgcgccacctgcgcaacatgcggtttgtcatcgtcacgcacgctgatgaaggcgcagccgctgttcggcaggatctcgctggcgccgagctgcgccttggcgaaggcttcggcgaagctgtcacccacccccatcacctcgccggtggacttcatctccgggccaaggatcggatcgacacccgggaacttggcgaacgggaaaaccgcttccttgacgctgtagaagttcggaatgatttcttctgtcagcccaacctctgccagcgtcttgcccgccatgacgcgtgcggcaatcatcgccagcgaaacgccgatgcacttggatacgaacggcacggtacgggacgcacgcgggttcacttcgataacgaagatatcctcgccctgcacggccatctgcacgttcatcaagccgaccacgccgagttccagcgccatcttcttgacctgatcgcgaatctcgtcctggatgtgggccggcagcgagtatggcggcagcgagcaagccgagtcgccggaatgcacgcccgcctgttcgatgtgctgcatgatcgcaccgatcaccacttgctcgccgtcgcacaccgcatcgatatcgacttcgatcgcgcagttgaggaagtggtcgagcaataccgggctgtcgttggaaaccttgaccgcctcgcgcatataacggcgcagctcttcttcctggtaaacgatttccatcgcccggccgcccagcacgtaggatggacgcaccaccagcgggtaaccgatgaccttggacgcagccagggcttcttcttcgctgcgcgccgtcgcgttcggcggctgacgcaggttcaggcgctcgaccatctgctggaaacgctcgcggtcttcggcacgatcgatggcatcgggactggttccaatgatcggcacgcccgcttcttccagcgcacgcgccagcttcagcggcgtctggccaccgtactgcacgattacgcccttgggctgctcgacgcgaacgatttccagcacgtcttccagggtcaccggctcgaagtacaggcgatccgaggtgtcatagtcggtggagacggtttccgggttgcagttgaccatgatggtctcgtaaccgtcgtcacgcatcgccagggccgcatgcacgcagcagtagtcgaactcgatgccttgaccgatacggttcgggccgccaccgaggatcatgatcttgtcgcggctcgacgggttggcctcgcactcttcctcgtaggtcgaatacatgtaggcagtatcggtcgcgaactcggcggcgcaggtgtcgacgcgcttgtagaccggcaggactttcagcttgtgccggtgagcgcgcaggttcttctcggtcaccccgagcagcttggccaggcgcgcatccgagaagcccttgcgcttgagcttgtacatgacatcacgatcaatgctggacaggcccaaggtcttgatctgctcctcttccttgatcagatcctcgatctgcaccaggaaccactcgtcgatgcgcgtcaggtcgaagacctccgcgacggtcttgccggcacggaaggcatcggccagataccagatgcggtcggcgcccggcacggtgagctcgcgcttgagcgtgctttcgctttccggatcagccagatcgagcttcggatcgaagccggatacaccgacctcaagtccgcgcagcgctttctgtacggactcctggaaggtccggccgatggccatgacttcgccgacggacttcatctgggtagtcaggcgcgcatccgccttggggaacttctcgaaggcgaaacgcgggatctttgtgacgacgtagtcgatcgccggctcgaaggacgccggggtacggccaccggtgatgtcgttctgcagctcgtcgagggtatagccgaccgccaacttcgccgcgatcttggcgatcgggaagccggtggccttggaggccagcgccgacgaacgcgacacgcgcgggttcatctcgatcacgaccatgcgcccggtgttcgggcagatgccgaactgcacgttggaaccgccggtctcgacaccgatctcgcgcagcaccgccagggaggcgttacgcaggatctggtattccttgtcggtcagggtctgcgccggggcgaccgtgatggagtcaccggtgtgcacgcccatggggtcgaagttttcgatggcgcagacgatgatgcagttgtccttcttgtcgcggaccacctccatctcgtattccttccagccgatcagcgactcgtcgatcagcagttcgctggtcggcgacagatcgaggccgcgggcgcagatctcttcgaactcttcccggttgtaggcgataccgccaccggtgccgcccatggtgaacgaggggcgaatgatgcaggggaaaccgaccttctcgagcacgccataggcttcgtccatgttatgcgcgatgcccgaaaccgggcaggccagcccgatgttcttcatcgccttgtcgaaacgggagcggtcctcggccttgtcgatggtgtcggcgttggcgccgatcatttcgacgccgaacttctccagtacgccgtgcttttccaggtccagcgcgcagttcagcgcagtctggccacccatggtcggcagcagcgcgtcagggcgctccttctcgatgatcttggcgacggtggcccacttgatcggttcgatgtaggtggcgtcggccatggccgggtcggtcatgatggtggccgggttggagttcaccaggatgacgcggaaaccttcttccttcagcgccttgcaggcctgggcgccggagtagtcgaactcgcaggcctggccgatgacgatggggcctgcgccgaggatcaggatgcttttgatatctgtacgttttggcatggtctctctcgaattctgtgctcggcgggcttagcggcgcttggccatggcagcgatgaagcggtcgaacagcggtgccacgtcatgtggtccgggactcgcctcggggtgaccctggaagctgaaggcaaccttgtcggtgcgctcgatgccctgcagggtgccatcgaacagcgacttgtgcgtcgcacgcagattgctcggcaggctggcctcgtcgaccgcgaaaccatggttctggctggtgatcattaccacaccggtgtccaggtcctgcacggggtggttggcgccgtggtggccattcggcattttcaccgtcttggcgcccgaggccagggcgagcagttgatggccgaggcagatgccaaacaccggaacgtcggtttcgaggacttcctggatcgccttgatcgcgtagtcgcagggttccggatcacccgggccgttggccaggaagatgccatccggattcagtgccagggcttcgctggcgggcgtttgcgccggcaatacggtgacccggcagccgcgggcgaccagcatgcgcaggatgttgtacttcacgccgtaatcgtacgccaccacatgatagggaagctcgctagccgggatctcggcgtggccgtcatccttcaggttccagacggtcgaacgccactcgtagcgttccttgacgctgacttccttggccaggtccatgcccttgagcccagggaagctgcgcgcgagctccagcgccttttcttcggtcgcgtcggggcctgccaggatgcagccgtcctgcgcgcccttctcgcggaggatgcgggtcaggcgtcgggtatcgataccggcgatcgccacggtgccgttggccttgaggtactcgggcaacgattgcttgtcacgccagttgctggagatcagtggcagatcgcggatgaccaggcctgccgcccagactttccacgactcggcatcctcgggcgtggtgccggtgttgccgacgtgcggataggtcagggtgacgatttgcttggcgtaggaagggtcggtaaggatttcctgatagccggtcatggcggtattgaacaccacctcaccgatagtctggccgtcggcgccgatggattcgccgcgaaagatactgccatcggcaagggccaaaatggctggcgcaagggctggcttagtcaagagacctcccaaagatcaaggctgaagcaggcgcagattgtaaaaaagcgggatgacgtgtgaaggtcatcccgctttttgtttgattcattctgcgcaacttttagtggacacactaaaacgggaagcttacagaaaaggccttttcaggtctagccgaaatccgcccgaacgccaagcggcagctgtctcaacgcaacccaagcacgtcctgcatgtcgtacaagcctgccggctgctgctccagccacaacgccgcgcgcaccgcgccgcgagcgaacgtcatgcgactggaggccttgtgcgtgatctcgacacgctcgccttcggcagcgaacagcaccgtatgatcaccgaccacatcgcccgcgcggacagtagcgaaaccgatggtgtcgcgcgctcgcgccccggtttgcccctcgcgaccgtacaccgccaccttttgcagatcgcggccgagcgcttcggcgaccacctcacccatgcgcagcgcagttcccgaaggcgcgtcgaccttgtgtcggtgatgggcttcgatgatctcgatatccacctcgtcgccgagcacccgcgccgccgtgtccagcagcttgagacaaaggttgaccccgacgctgtagttggccgcgaacacgatcgggatctccttcgccgccgctgccagcttttccttctcttcgaccgagaagccggtcgtaccgatcaccatcgccttgcccgcccggcgacacacgtccagattcttcagtgtcaccgaaggatgggtgaagtcgatcagcacatcgaactcttcggccactttcgccgcgtcaccgatcaagggaacgcccagccgcccaatccccgccagctcccccgcatcggcgccgaccagggtactgtcgggacgatcgattgccgcggtgagcccggcggctccacctgtctgctggacagcctcgaccagcgtcttacccatgcgcccggcggcgcccatcactgctatacgtcgcatagaaaccgctccacgctgcaagcttcatgctgcagcagcgccctccggggaagtccgccggctgcagcctgccgctgagttaaagatcgccgaaaaagcgcttcatgccttcgaaccagccactggccttgggcgaatgagagctgtcgctctgcagcgtcttgcggaactcgtcgaggagctcacgctggcgcttgcccaggttgaccggcgtttccactgcgacacgacacagcagatcacccgcggcaccgccacgaaccggcgcgacacccttgccacgcaggcgaaattgcttgccggtctgagtgccttccggaatcttcagcttgacccgaccatccagcgtcggcacttcaagctcgccacccagcgccgcgtcggcaaagctgatcggcacctcgcaatacaggtgcttgccgtcgcgctggaaaatcgggtgctcgcgcacattgaccaccacgtacagatcgccggccgggccgccctgcgcgcccgcctcaccttcgccggtcaagcggatacggtcgcccgtatcgacgcccggcggcaccttgaccgacaaggtcttctgctcttccacgcggccctgaccatggcagctgccacagggatcggagatcatcttgccgctgccatggcagcgcgggcaggtctgctgaacggagaagaagccctgctgcatgcgcacctggccgataccgccacaggtggtacaggtgaccggactggtgcccttcttcgcgcccgaaccatcgcaggtcttgcactcgaccagcgtcggcacgcgaatggtcaccgtggttccgcgcacagcctcttccagatccagctccagcgtgtagcgcaggtcgctgccgcgctgggcaccaccacgcgaactgccacgtgcaccggtgaagaaatcactgaacacatcgccgaagatgtcggagaagttggcaccgccgtagccggcgccgcccgcacccgcccccatctgcggatcgacgccggcatgaccgtactggtcgtaggcctgacgcttgcccgcgtcggacagcacttcgtaggcctcgttggcctccttgaaggcctcctcggcagccttgtccccgggattgcggtccggatggtgcttcatcgcgaggcggcgataagcctttttcagctccgcctcgctggcgccacgctcgacacccagcacttcgtaatagtcacgtttggccataaatatcctgaaccttcaaattcgtaccctccagacacgccgacgcgggagcaagcccccgcgcggcgatcaggcccgccacggtatcaccgcaacgggttgggctggatggcggcgaccacaaggacagccccaccccacccagtcatggaggtcataagccgcggcttacttgttgtccttgacctcttcgaactcggcgtcgaccacgtcgtcgccgccctgcgcgttatcgccagccggctggccttcgccaccctgcggctgctcggcgtacatcttctgcgccagcggcgtggaggcctgggagaccgcagcgatcttggcttcgatttcggccttgtcatcacccttgatcgcggcttccagttctccgatcgccttctcgatgctgctcttgtcttcctcggtggccttgtcgccagcctcggtgagcatcttgcgggtcgcatggaccagctggtcgccctggttgcgcgccgtcaccagctcctcgaacttgcggtcttcctcggcgttggcctcagcgtcacgcaccatctgctcgatttcctcctcggacagaccggagttggccttgatcacgatggactgatgcttgccagtggccttgtccttcgccgacacgtgcaggatgccgttggcgtcgatgtcgaaggtcacctcgatttgcggtacgccacgcggagccggcggaatttcagcaaggtcgaaacgacccagcgacttgttctgcgccgcctgcttgcgctcgccctgcagcacgtgaatggtcaccgcgctctggttgtcatcagcggtcgagaacacctgcgacttcttggtcgggatggtggtgttcttctcgatcaacgcggtcatcacgccacccatggtttcgatacccagggtcagcggggacacgtcgagcagcagcacgtccttgacgtcgccagccagaacggcgccctggatggcggcacccatggcaacggcttcgtccgggttgacgtccttgcgcgcttccttgccgaagaactcggcaactttctgctgcaccagcggcatgcgggtctgaccgccgacgaggatcacgtcgtcgatcttggaaacgtcgatgccggcgtctttcatcgccatgcggcacggctcgatggtgcgctgcaccagatcctcgaccagagcttcgagcttggcacgggagattttcacgttgaggtgcttcggaccggtcgagtctgcagtgatgtacggcaggttgacgtcggtctgctggctggaagacagctcgatcttggccttctcggcagcttccttcaggcgctgcatggccagcggatcgcccttgaggttcatgccggtttctttcttgaactcgtcgacgaggtagtcgatcaagcggatgtcgaagtcctcaccaccgaggaaagtgtcgccattggtagccagcacttcgaactggtgctcgccatcgacttcggcgatctcgatgaccgaaacgtcgaaggtaccgccacccaggtcatagacgatcacggtgtggtcgcccttggccttgtccatgccgtaggccagcgcagcggcagtcggctcgttgatgatgcgcttgacgtccagaccggcgatacgaccggcgtccttggtggcctgacgctggctgtcgttgaagtaggccggaacggtgatcaccgcctcggtcaccggctcgccgagatagtcttcggcggttttcttcatctttttcaggatctcggcagagatctgcggcggtgccattttctggccgctgacttctacccaggcgtcgctgttgtccgccttgacgatcttgtaggggaccatctggatgtctttctgcacgacgtcttcgtcgaaacgacggccgatcagtcgcttcaccgcatacagggtgttgtgcgggttggtcacggcctgacgcttggccgactggccaaccaggatttcgccatcattcgcgtaagcgatgatcgacggcgtggtgcggccgccttcggcgttctcgatcaccttggccttgccgttttccaggatggagacgcaggagttggtcgttcccaggtcgataccgataatcttgcccatgtgcttctctccgaacttttgattgatccgcgcctgtttaccggctgcgggtaacacaaaaacgcttggctaccagatgggggtcggtcgccgaaattcaagccttctcatcgatcgaaggcggtgtttctgccggcgccttgctgacgacgaccatcgccggacggagcagacggccattgagcagatagcccttctgaaagaccttgagcacgctgccaggctcggcatgggtgctttcttccatggccatcgcctgatggtgttcagggttgaacggctcaccttgcggatcgaccggcaccagctgatgacgcgccagagtatcgagcagcaacttgagcgtcagctcgacgccttcacgcataggcttgaccgcctcgtcatccggattcgacaactcgagcccgcgctccagactgtcggcgaccgccaacaggtcaccggcgaacttttcgagggcgaacttgtgcgctttttcaacgtcctgctcggcgcggcggcgaatgttctgcaactcagcggctacgcgcagcgactggtcctgcgcagctgcgagctgctcttcgagggactgcacccgggcagcaaggtcttcggccacctcggcttgcgcattctcgttctcttcaggggtctgattgtccaggttctgctcgtcggccatgcggtcctccttatcgatacgtcagcgggcagtgacccgcgcttgtgccgctatatgggggcgacaaatcctccttcaagggccgcctggcattcttgaggtcgcaattcacccctgtgcgacgcgataccgccatatgtccatttcatttacacaccatccatccccgacgcttgtagcgtccactgaaagcactgtataaatagccagtcaactacgcaggagccctgccatgctggtccacctttccgttcataactacgccatcgtcgaacacctcgacctcgagcttaaacgcggcatgagcgtgatcagcggggaaacgggcgcgggcaagtcgatcatgctggacgcccttggccttacgcttggcgaccgcgccgacagcagcgtggtccgcatcggtgcagacaaggccgacattctcgccagcttcgatctggatgacatacccgacgcccgcgcctggctggccgagcgtgacctgaataacgatggcccctgcatcctgcgccgcgtgatcacggccgaggggcgttcgcgcggctatatcaatgggacgccttgcccgcagggcgatttgaaggcgctgggcgagctgctgatcgacattcacagccagcacgaacatcagtcgctgctcaagctggacacccaccgtcgcctgctcgacgaatacagtggcagtcaggatctcgcgcgccaggtgcaactcgccgcccagcgctggcgacagacgcgacaaagcctggaacgccttagcaactgcagcgatgagcagcgtgcgcgccatcaactgctgagttaccaactggaggaactcgaggccctcgccctcggtgaggacgagctcgagcagctggaacaggagcacaagaacctatccaacgcggaacatctgctcggcgcatgccgtcaggtcgtggatctgtgcagcgagaatgacgccggcaacgtcctgtcggccctgacctcgagcctgcagcgccttaccggcttccagcatcagcccggcgcgctggccgaagcggtcaacctgttgtccagtgcgcagatccaggttgaagaagcgatcggcgaactcaatcgcttcctcgaccatttcgattcggatccgcagcgacagcaagccctggaggagcgcctcgacagcatctataccctggcacgcaagcatcgtgtccagccgcccgagcttcccgcactgcaacagcgcctcttcgaggagctggaaagtctaaatgctgatgacacggcgctggagcagcttggcgaagaactcgccgcgtatgagcgacattacaaagaaaaggccgcagagctgagtgccgcgcgccagcaagcggcagagtcgctggcggttgcggtcgaagcggaaattcaacggctgggcatgccaggcggcaaattcagcgtagtgctgaagcccagtgccgaaggtgatttcacgccgtacggcatggaacaggtggaatttcttgtcagcgccaaccccggccaaccgctgcgcccgctggcgaaggtggcctctggtggagagctgtcacgtatcagcctggcgattcaggtgatcaccgcgcagacctcgcgcattccaacgctggtattcgacgaagtggacgtgggaatcggtggcccaacggccgaggtcgtcggccagcttctgcgccggcttggagagcgaggccaggtcttgacggtaacgcatctgccccaggtcgccgcgcaggggcatcatcatctcttcgtccacaaggcgcgtggtaccgatgaaacccatacggcggtcgccacactggacaacagcgagcgcgtcgaagagatcgcacgcatgctcggcggggtcgatctgaccgagcaggcgctggcccacgcccgacagatgatcggctcggcacaagcgtcctgattcggcagcgtcaacaggcgacacatggctcgcagggttttgaacagaacggcttcgcatggttatcgcccgcttccggcctgcttgcactcgttgcgtgacgccgccgacctaactacagcaacgggccgaggctagaacgagctgaggtgcacatagacgaaaccccgcaattgcggggttcgtcgatccgaggcgacatcggccgcctcactgcatgcgggctcagtcagccttcttgcggacgtatagcaccaggttatggtcgaccagctcgtagccgtggcgcttgacgatttccttttgcagcttctcgatctcgggatcgaagaactcgatgacgtcgccgctatcgacgcacaccatatgatcatggtgaccgccatcagccagctcgaataccgcgtggccgccgtcgaaattgtgccgaaccaccaggccggccgcctcgaactgggtcagtacccggtaaaccgtcgccagaccgacatcctcgccggcctccatcaaggccttgtaaacatcttcggcgctcatgtggcgctgatcagtggtatccagcatctgcaggatcttgacccgcggcagggttactttgaggccagctttgcgtagttcgctattttcaaccatggttggctttctcgctgctgctgtttcgcagcctccttcaatacgggtatgatccgggctttgcccagccaagatagtggaagtcacctaccgatgcaaaacaccaagctcatgctgtccagtctcacgctcgtgggcctgttcgcactcgccggttgttcattccccggggtttacaaggtcgatattcaacagggcaatgtcgttacgcaggacatgatagaccagttgcgccccggaatgacccgttcgcaagtgcggtttatcatgggcagcccgctgatcaccgacaccttccacgcaaatcgctgggattatctctacagcattcagcctggcggcacccagcgtcagcaggagcgcgtcagcctggtgttcaatgccaacgaccagctggcggggctggccggcgatttcaagcccggcgtcagccgtgacgaagcgattctcggaaccgaccggcccgccccggagaccccagcccgcaccgagcccgaggcagccgagcctggctcactgctcgagcaaatccagcgcgacgtcgacgccgccgagccggtccctgtccctacgccagaagccctggagacgaactaggggccgattggacaaacaaaagcccggcatgccgggctttttcattgctgatcctgcgctagctgctcgctccgcctgccttgttttgcgccgccttcgctgcgcgctgcttgcgtacttccttggggtcggcgatcaacggccgataaatttcgacccgctcaccttcctccagcacgcgctcatccggcttgggcaccgctttaccgaagatgccgagcggcgcgcctgcgagatccagcccagggaaaaagcgatccatgcccgaacgcagcgccgcatcccgcacggtggtgccctgcggcacggtcatgcgtagcagcttctgcttgtcggccaagccatagaccacttcgatcgcgattaccgggttatccatacagctgtttcgccctgtcacagaacgcgtcgaccagggtgttggcagcctgattgaacagcggacccaaggtcgccctgaccagcggcccggcatagtcgaacgttaggtcgagactgatcttgcaggccttctcgcctagggccttgaactcccagatgccatgcaagtggctgaaaggcccctcttccagcttcatctcgatgcgcttgcccggctgcagctcattgcgcgtgagaaaacgctgactgatgccggccttcgccacggtcatgctggcctgcatctgggtttcactgctggcaatgacctcggtggcagagcaccagggcaggaactgcggatagctggcgacatcgttgaccatgtcgaacagagcttgcgccggatacgggagcagcgccgagcgttgaatatgcgtcgtcattcgaaccttctacttcgtcgttcgaccatcgatgattgatcgcagccgataacagctcaccgagagcaagcgtggtcacgcaggttccgtcaaggagccgtttccagggctgaacaagcgtaaagatggcacattgtcagggataagcgctcccctctcaagtttcacaccgtcgcagcgtgctggttatcgccagccgcagcgggactccctataatgcgcaccctatggccaaacagaagaaacagtcccccgggaccatcgcgctgaacaagaaggcgctacacgactacttcatcgaacagaaattcgaggcgggcctcgtgctggccggttgggaagtcaagagtttgcgcgccggcaaggcccaactggtagacagctacgtcctgctcaaggacggcgaagcctggttgatgggttgccacatcacgccactgaccactgccagcacccacgtggttgcggaccctacgcgcacccgcaaactgctgctgaacaagcgagagctgggcaagctgttcggtgccgtgcagcagaagggctacgcgtgtgtcgccttgtcgctttactggaaaaagcacctgatcaagtgcgacatcgcactgggcaagggcaagaaggaattcgacaagcgccataccgagaaggagcgcgactccgatcgtgagatccagcgcgccatgcgcaccaaaggcaaagaagactaggcctttcacctcgccgagcgggcctcgccccgctccgatggccggactgtcagtcgacagccggcaagcacatcagccttccagatgcttttccgaccgcccctgacgtcgctgcgcccgcgccaggcgctgcgcctcctgctgcccttcggccagcacctcgcgtacgtaactaatatgccggtggatcacttcgcgcgcgtcatccgcacggcggtcgatgatcgcatcgtacagttcctgatgctgacgcatgagcatgtcgcgcgtttcgttgcgcagcgcgtacatcccgccgatgttggtcacgacattgcgtttgagcagatcgaacagaccacgaatggtgtgcagtagaacggcgttgtgactggcttcggcaatggccagatgaaagcgcgcatcggcggcgccctcctcggcacgggtgaccgttccctcgcgagcatagcaatcctgtaatgccgcaaacgcttcgccgagccgctgctgatcgagctcggtggcacgctgcgccgcgtagtaggcgcagctaccttcaagcgtgtgacgaaactccagaagatcgcgctgcgcatcggcattgttttccaacagatgcagcaacggatcgctgaaagttgaaccgagggattcagcgacgaaattaccgccgccgtgacgactcaccaataagcccttcgccgccagcttctggatcgcctcgcgcaaggatgggcgcgaaacaccgaactgctcagccaggacgcgctcagcggggagccgctcacccgccttgagggttccttcgaggatcatcgtttccagctgctcgacgatgttgtcggccagccttcgctgacgcaccactcccacttccatgacgcctctcgattggttttaccactggacgaatttcagcgtagccagctgttctcggcatcgcaacagaaagcttttcgacgaaagtctatagcttgctaattgacgcaccgaagccgagctcttacgctggccgaactcttctgtaaattggtattaccactttacaagaaagagcacccaacaagaagaggactacttaatgcggtctccagctatctgcccatcgccggtccgcccggactcccactcgcacatttcgaccatgggagcctgacatgtctaacggactgctcgccctgtttgccttcactcctatcctgcttgccgccgttctgctgattggcctgcgctggcccgccagtcgcgctatgccggtggttttcctgttcaccgctgcgatcggcctgttcgtctgggacatgagtgtgacccggatcattgcctcgacgctgcagggcctggtaatcaccctcgggctgctatggatcatcttcggcgcgatcctgctgctgaacaccctgaagcactccggcgggatcaccgccatccgcgccggcttcaccaccatcagccctgaccggcggattcaggcgatcatcatcgcctggctgttcggctgtttcatcgagggggcctccggcttcggcaccccggccgccatcgccgcgccgctgctggtcgcggtcggcttcccggcgatggccgccgtgctgatgggcatgctggtgcaaagcacaccggtgtccttcggtgcggtcggcacgccgatcgtggttggcgtgaacagtggtctcgacaccgccacgctgggcgccgagctgactgcacagggctccagctggccgatcttcctgcagcagatcaccagcagcgtcgccatcacccacgctatcgtcggcaccgtcatgccgctggttatggtgatgatgctcacgcgcttcttcggtaaggagaaaagctggaaagccggtttcgaggtcctgccgttcgcccttttcgccggtctggcctttaccctgccctacgtggcaaccggcgtgctcctcggccccgagttcccgtcgctgttgggcggtctggttggcctggccatcgtcaccaccgcggctcgcttcaagttcctggtacccaagaccacctgggacttcgccgacgcgaaggattggcccgcagaatgggtcggcaccatcgagatgaaactcgacgaactggccgctcgcccgatgagcgccttccgcgcctggctgccctatgtgctggtaggtgcgatcctggtcatcagccgcgtcttcccacaggtcgctgccgcgctgaagtccgtttccatcgcgttcgccaacatcctcggcgagaccggtgtcagtgccagcatcgagccgctctacctgccgggcgggatcctggtcgccgtggtactgatcaccttcttcatgcacggcatgcgagctggcgagctgaaagctgcggtcaaggaatccagcagtgtgctgctcagcgccggcttcgtcttgctgttcaccgttccgatggtgcgcattctgatcaactccggcgtcaatgccggcgacctgcccagcatgccaatcgccatggcgcgctatgtcgcggacagcgtcggcggcatctacccgctgctggcgccttccgttggtgcgctgggtgcgttcctggccggatcgaacaccgtcagtaacatgatgttcagccagttccagttcggcgttgcgcagtcgctgggcatttccggggccatggtcgtggcgatccaggccgtcggcgccgctgcggggaacatggtcgccatccacaacgtggtcgcggcatccgccaccgtcggcctgctcggccgcgaaggcatcaccctgcgcaagaccgtttggcctaccctgtattacgtgctggcgaccggcgtgatcgggctggtcgcgatctacctgatgggcgtgacggacccactggtcggcgtctgatgtaaagcaggacctttgccccgatcacgctcggggcaaaggtgttgcaatctcgcgatcgcgggcccgtcatgtagcgaacgcgcctgatcgtaatagagccttcgtcgacgacgagagcaccacgagacctacctcgtttcattcggtgagaacacacgatgatcatctctgcctctacggactaccgcgccgcagcgaaacgcaagctgccgcctttcctgtttcactatgtcgacggcggcgcctatgccgaatacacgctgcgccgtaacgtcgaggacctggccagcatcgccctgcgccagcgagtgctgcgcaacatgtccgaactgagcctggaaacccagctgtttggcgaaaccctgtccatgccggttgccctggcccccgtcggcctgaccggcatgctcgcccgccgcggcgaagtgcaggccgcacgcgccgccgacaagaaaggcattccgttcaccctgtccaccgtctcggtctgcccgatcgaagaagtggttccggcgatcaagcggcccatgtggttccagctctacgtgctcaaggaccgcggcttcatgaagaacgcgctggagcgggccaaggcggcaggcgtgaccactctggtgttcaccgtcgacatgccgacccctggcgcacgctaccgcgacgcgcattcgggcatgagcggcccgaacgccaatgtgcgtcgtatgttgcaggccatgacccatcccttctgggcctgggacgtgggcctgcacggcaagccgcacgacctgggcaacatctccacctaccgcggccatccgaccgggctggaagactacatcggctggctggccgccaacttcgacccatcgatctcctggaaggacctggagtggattcgcgagttctggggtggcccgatggtgatcaaaggcatcctcgacgccgaagacgctcgtgacgccgtgacctttggcgcggacggcatcattgtctcgaaccacggcgggcgtcagctcgacggcgtgctgtccagcgcccgcgccatgccggcgattgccgacgcggtcaagggcgacctgaaaatcctcgccgactcaggtattcgcagcggcctggacgtggtccgcatgattgccctcggcgcggacacggtcatgctcggccgcgcgttcgcctacgcgctggcagccgacggcgaagccggggtcagcaacctgctcgacctgatcgagaaggaaatgcgcgtggccatggtcctcaccggcgccaagtcgatcagcgaaatcaccaccgactcgctggtccgcgagatcgaccactaccagaccacccgccacgtcggctaagcctcgccccaaaacaggccgcacggcatgccctgcggcccgctttccctttcggagcctgccatgaacgcgcccgcccttccgtccgaatttctcgctgccgtcgagaggctgatcccggccgagcggcgcttcgacgatcccctctcgacactggctttcggtaccgacgcgagcttctaccgcctgattcccaaactggtggtgcgcgtcgaatccgaggcggaagtggtgggcctgctcaagctggcccacgcccagcgggttccggtgaccttccgcgcggccggcaccagcctgtccggtcaggcgatctccgactcggtgctcatcgtgctgggtgacaactggaacggccgcgagctacgcaacggcggcgagcagatccgcctgcagccgggggtcatcggcgccaacgccaacgcgatcctggcccccctgcagcgcaagatcggccccgacccggcctcgatcaacgcggccaagatcggcggcatcgtggccaacaactccagcggcatgtgctgcggcacggcgcagaacagctacaagacgctcgccgggctgcgcctggtactggccgacggcagcgtggtcgacagcgaagacgccgccagcgtcgaagccttccgcaacactcacggcgccctgctcgacgggcttgccgagctgggccgcacaacgcgcgccaacaaagagctcgccgcaaagatccgccacaagtaccgcctgaagaacaccaccgggttttcactcaacgcattggtcgactatgacgacccgctcgatatcctcaaccatctgatggtcggctccgaaggcaccctcggcttcatcagcgcggtgacctaccacaccgtgccggaccacccgtacaaggccagcgcactggtggttttcccggacgtggaaacctgctgcctcgccgtgccggtgctcaagcagcagccggtctctgcggtggaactgctcgaccgccgcagcctgcgctcggtggaaaacaaggccggcatgcctgactgggtcaagcagctgtcggtaaacgcctgtgcgctgctgatcgaatcgcgcgcggccagccagtcgctgctgcacgagcagatcgaccagatcatgacctcgatcgctcatttcccggtcgaaaagcaggtcgatttcagcgaagacccgaccgtctacaaccagctctggaagatccgcaaggacacttttcccgccgtcggtgcggtgcgccagaccggcaccaccgtgatcatcgaggacgtgaccttccccatcgaacgcctggccgagggcgtcaaccgcctgattcagctgttcgacaagcatgcctacagcgaggcgatcctgttcggccacgcgttggaaggcaatctgcacttcgtcttcacacagggcttcgacgatccgcagcaagtcgcccgctacgaagcattcatgcaggacgtcacccaactggtcgcagtggagttcggcggtgcgctgaaagccgaacacggcaccggccgcaacatggcgcccttcgtcgaactcgaatggggccacgaagcctaccagctgatgtggcagatcaagcgcctgctcgacccgcagggcattctcaatcccgacgtggtgctcagcgaagacgcggacattcacctcaagcacctcaagccgatgcccgccgctgacgaaatcgtcgacaagtgcatcgaatgtggcttctgcgagccggtctgcccgtccaacggactgaccctgacgccacgccagcgcattgtcgtctggcgcgacatccaggcgaagaagcgcgcgggcatcgacaccgccgaactcgagcggctgtacgactaccacggcgtcgaaacctgcgccgcgaccggcctttgcgcccagcgctgcccggtgggcatcaacaccggcgacctggtgcgcaagctgcgcgggcgcaacgcggacaacacccgcgcggccgattggctggccgggcatttcagcaccgccgtacagggcgcccggttcatgttgcacgtggccaacggtgcacacctgatgatgggcacgcggctgttgagcaagacgtccgccgctatcagcaaagccagccacggccgcgtgccgcagtggacgcccgccacgccgcagccgctgcaacgcctgcatctgcccaacccacccgctggcgatcagcgcccgcgagtggtctatctcgccgcctgcgtgtcgcgcgccatgggccccgccgcccgcgaccaggagcaggaaccgctgctcgataccactcgcgcactgctggaaaaggccggcttccaggtcgtcttccccgacgacttgaacaacctctgctgcggccagcccttcgcctccaagggctatgccgaacaggccgagcgcaagcgtcaggaaacgctggacgccctgctcaaggccagccgcggcggccttgatccgatctattgcgacaccagcccctgtactctgcgcctggtccaggacctgggcgacacacgcctgcaggtattcgatccggtgcgcttcatccgcgcccatttgctcgaccggctggacttcgagccgcaggacaaccccatcgccgtccatgtcacgtgcagcacccaacacctcggcgaagcccaggccctgatcgacatcgcccgccgctgcgccaagaacgtgatcgtgcctgaaggcatccactgctgcggcttcgccggtgacaagggctttaccacgcccgagctcaacgcccacgcgctgcgcagcctgaaggatgcggtgcaggtctgcgaagaaggcatttccaccagccgcacctgcgagatcggcctgtcgcgacatggcggcatcgactaccacggcctggtctacctggttaaccgcaacagccgagccagagcggccaccccttccagctgaggcgcagcccggagcgcgcccggtcacgccgatgaaacgctcgagcgcagccgcagtccgactttatgagcccagcattcacagaggctcattcgcctcggcgccgccgcgcaacagccgcattggcaggcccgccgggaagtcaactccctggaggatcccatgaagaaatttgccctacttgccgcagccgccctgattgccagccccgctgtattcgccgctgacaaggatctttgccagctcaacctgcaagagatcgacgacaacatggccaccaacaaggccaccctgggcgatccggctcgcggcgaagtccaggacctgatcaagaaggcgcgcgacgccaagcagtccggcgacaccgagacgtgcatcgcgcagtcgaccaaggcgctgcaaatgctcgaaggcccaggcagcaccggcagcaccggctcggccggaaccggttcgggcgccagcaactaagcccgtccagccacccaggcaaggccaccccgccgtggtccttgccggattttttcacgatgctccttgaaacccgatgaaacgcccctacctaacgtagcaagtgttcgacgcgggctgagctctggcgtacactgcgcagcacatgaggctgcgacacgcttcatggggccgattaggattcgacgccggtaacaaaactctaggtgcatgccgagttggtaacagaactcgtaaatccactgttgcaaacttatagttgccaacgacgacaactacgaagggtacgcgctagccgcctaaccttcatctggtcgcttcggcgccagcggtcactaggggatgcctgtaaacccgaaatgactgtcagatagaacaggatcgccgccaagttcgctgcagacgtaacggctaaaactcatgcagctcgctccaagcaccctgccaatcgggcggcgcggagttaactcaatagatttggctacgcatgtagtaccgacagtggagagctggcggacgggggttcaaatccccccggctccaccaattcaacactgaaacccgtctagaacgcgggtttcagaccagatttgatggcattggattactcacagtccgtctgtgaatccaaaaggtatgccatcatgtccaagcgtcaaagcaaaacaggtgtccctcacctggtctatcaagccaacaccggcttccagtactacctcacattcccgaagcacttcgcagctaatccgaaactgcctgcgcaaatccgatggtcgctcagccacgacgaagcgcttgcacgtgacctcgcaaggtatttgaacgcctctttcgagcagtttcttgcgaaggcgaccgagcactacgtcgagctcttttctgaccgcctgctggctgacctccaaaggtttcacttggcggtaacggaagcactcaaattcgccgaccgagtttggaaagtacgcccgtcgccaatgaagctcgcgaaccaagacctatcggccgcccacgctcgcatgatgaaagagagtgccgagcgtgtggtgctttatagccatgagccaggcggcgaaatcttcttcgccctcacgccaacacccgcgttggtaaaagcgcttggggtcgggttcgtacgctttgactggccgctcggaaccagcaaccagaacgtcgccagcgacgctgcccggtacatttacgccgcccttgatgtgcttgagactgtcccaccctctccaggtcggtattcgaaagaatctcctgcgtttgcggcgatgacgctttatgaatacctgtgccatgcccgcccagaccagggtcggaatctcatgcacatccccccagcactaccgcagtctcggcaagctttgcattttcatcttcagcaagccaacgcgatgcatttgaagctacgcatcatcgatcgtgcgctcttggtgcaggaagagtccgggctttatgtgatgcttatcgaactcgatccgctgtgcatgaaagcgcatctgagagaaaagaaaagctttcggattgagttgctcaccagctcgatcatcattgcggtcctcatgctgacgtatacgctgcagaaggttgataaggtgctgttgcgttactttcaggaagacgatcacgaagatccttacgcccaggcgatgcaggagatcggtgacctcgttcggcggatgttgagctctgctgcaaccaccgagcctatgcagacgattccggagctgaactcaccggcagatgctgtggcaccgccgcaggatcctggcacgctcgcgttgctgaatgcgctcgggagcgttctgcccgactcgcagaaagccaggcttgaaaccctcttttcgcagccctctgtcaacgaacgcatcgtctcgccggcgtgcggtccaaacgcagggttaagcctcgcagctttggcaaaggaatacgaagaacggcaaattcgtgaaggagcctgggctaacccgcggactcgcattaccgcaaaggcccgcctggaaggcctgtgcgagctgcttggcgggcaccggcaagtcgaaacgctaactcgcgctgagttcaacacgctacgcgatcatctgcgcagctatccgaagaaccggcaccgccttcgcgccacccgtaaccagccgctgagtaagatcatcagcgacgggaaatttgagccgatcaacccgcgcactgcgaaaaagttctttgagctggcaagggcgcttgtcacctacgcccatgatcaaggccacatcaccgaaaacatcgcggccggattggcattcagcaccaaaggtgccgaggccccaaggaagcgcacctatagcccaagccagatcgagaaacttcttcacggcccggcctacacactgacccagccgcctcgctggcgtctggacgactacaagttttggttgccgctgcttggcctctataccggcgcgaggctcagcgagctgtgccagcttcggctggaagacattcggcaggagctcggcgtttggatcatcagcatcaatcggactgggtcgaagcagctcaaaacgtccgactctgaacggctagtgcccatacataaacagctgatcgaaacaggcttccttgagtatcaccaagcgcgcttggacatagtagagcacgatgtaaaagctcccctttttgaaaatatccgtgtctacggtgatctttctcctgggcacgttgcgagtcgttggtacctgggctcaagccagcgcagtcatggctatttggggctctgcggccttggagaggagggcctgacgtatcacggcctgcgccacacctttattaaccaattccgcagacagaacctggacctcgcgaaagctaaagcactcgtgggtcacgctgataaaagtacaactggcggctatggcgactgctatccgtcagacgtcctcaaggacgagatcgacaaaatcgatttcgggcttggcttggatcacatccattaccggcactatcaggagctaaaaaaagcacaaggtgacttcaaagtcgggcggccggtgggcacgccatttccgaacgtgcgagcccctaaacgccactggaaatcgtacgcataaggcctagccaaacagaggcgggagccctgctcctgccctttttacacatcccttaattattgacaaagtgtcaataaaagctatcgaaggtgcctttccaatagattatcttgactgttcatttatacagtaataatctcaagcctcacccaccgtgaggtatatatgaatgtaacgtcccctatctccattcctttttataagggtatgagtctgatcgtagagcctggccatgaagagcacttgcgaatcgccttggcgaacatctccgcggtaacggacgcgataaaccgcttccactcttcaccgttacttaccgagttcatggacactacgctgtcccgcttcctgcgagaaaacacttacgcaggaaagtccgagcatatgctgcgggctcgaatggaaaagctgaaggtcatcctgacccgagataaccctacacgccgagtcgctgagcttgatcgagctgatgtgcagcgtctaaaggatcagctgccattgttactgaagcagaactcggcctcgggaagtaaaggcgcaaacctcatgacctattaccagctgttcaatcgcatgctggacgaggcgctggagagcaaactaattaccgatgcgatcaaggttgctacttgcagtacaaaaaaggccgaggtcacaaagccatttctggatagcaacctgattcagatgctctccggctggccttaccaaaagtacctcgcgggcacactgcccaaggtctaccaggatgccaagccgtatcggttctggttgcttcctctcgggctctacaccggcgcgcggctcaatgaactctgccagcttcgtgtgcatgatgtgatccgggatgtccacggcgtagaactcatcgacataaacgataacggctacaacaagtcgctgaaaacgggctcatcggcacggcagattccgatctgcacgaagcttgtggagatgggttttataaatttcgtagaggaacgacgtcaggccgatggcaacgatgcattgcttttcggcgagctgagcttcgatccgaagcacctatactcccgcgatccgagtcgctttttctgcgggccatgtacgggaacaggctatattggccagcattgcccaccggcggttaatggcgggctgaattttaaaagtctccgtcgctcgtttgccgtgcgactggaacggtcaggcatatctccatccacgatcgcccatctgctgggccatgagggcggtgctccggaggtcacagcagaccactacttggaaaagccgctgagtttgagattactggagcagatggaacgcggcctgacttacaacatccagaccgacgagattcgctgggagcattttaaaaagctgctcaatagccaagcgggacgcggaaagcgcgggaggaaaagtaagctgcagcttcactaatgcatagagcgggaacgatcatcgcttggagatgattatgagacaggatgaataaaaggccgcagccaatctgcggcctttttcgttctgaacacaacaggaaagaaaccgaattttcacgcaactccgggcatcgcttgcggcgacggttggcacgccctatcgctgagcacagtccaccatcgaagaacttgcatccgctgcgacgagaattccgtgacagtctgctgctgccacacaaatttcagttgaagcgtgggcgctttggcatcaaaccggacaccgcttcataacgccactgtgacagacacacggcacggtcacccggcgcatcgacactcactaactgccgcaagccctacgagtgacacggcgagactgcagcactcgagtcatgtgacatggcggtcgtaagacaagtgtgccgcagtgatcgggcttatgattgaggccggggcggcagcgcccgcgaatggcgcagctcacgtctgtgcacaatcgccatttcggccaggcaacgcctggcggctatgatttgacaacaaaattgcgggggcatacttgaagcagcgaagcgttccttcaagtatgcccccgcgccccatacttgaaaccttcaagtatggggcagttgagcattttgggcgtttgcaggtaagcgaaacgaatgtggagcgagaccgagcaataagaccaaaatgatcaactgccttcgcgaagcggctgccattgttgtcaaaaaaggcagctttcttcatttgccgcaggtaaatggctagctccaatttcgatgctatgcatggctacctctgctaaagcagaagaagcctgctcacgtccgcttcctctacgggatgcgcgacgtttctatgcaacggccgccgcttggtcacctcccattttgctaacccaccacttcatatgtcaggaagtacgcacctctctggctgacaaacactccgcagcgccatccctgtaccagccttctcgatgactgaattactcacgaaatcggtcggtccttagttttctccctccgtgcccaagcggtagactgagacacacaaagcagtttcgttctccgaaggttacccatgtccaaactcgccgaattcaaagctctagaagcccagctcgcagcccagctcaagcagcttgatgctcttaagaatgacgacaaactcaagcgcgaaatcgagttcgaggaaaaactccgcaatttgatggggcaatatgacgtaggcctgcgcgaaattatttcaatattggatccgcagcccagccgcaccagcatcagcgccaccccgacgtctcaagcgcctcgtcggcagcgccaagttaaggtttacaaaaacccagaaactggagaggtggtagagacgaagggtggcaatcataagattttgaaagcttggaaagaaaagcacggcgccgaaaaggtagagggttggcttcagtaagctatccgaccaacacaagagccaggcactgcctggctttttctttacgctttcagcggtcaacggatgcaagcgatcgcactacaaccagtacctggaattcatcggtcctcgcatgcactcgcctagttgcaccgcaccacccacaactgatccagcctggtcgtgaaactttggctcatcatctcccgtcgcatgccccagtccggcgcggtggttacgcggccgggccggagggtattgcggccccacttggcgttgattgcatcgagcacgcccataacgcgctccgacgcggcgggctgggtttgggcgaatagatcgtcggtgtactcgccgcgctggcagaggtccatcagcaggacctctgccttgctgaacgaaaagccatcgcgatagatgtgttccaacccagcgatcgccgcccggatgatgtagcgggtgtcgttggtgggatacggcagctcacacacgacgcctttcgcgaacttgggctcgtcgggattaaacatgccggtacggatgctgattcggacgcgcttgcacatggactgctgtgccctcagcttctcgctggcccgagcggcatatgccgccactgcgtccttgattggctcaagctcgcgcaggcgcttgccgaacatccgcgagcagcagatctcctgtttgggtgacgcgacctcctccagatcgaggcacggcgtcccgcgcagttcgcgtgcggttttctcgatgaccacgctgaattttttgcgcagggtccaggcatccgcgctagctagatcccaagcagtacgtatgcccaacctgttcaggtgctcggtcatccggcgaccgacaccccatacatcgccgacgtcagtcacgcgcagcaccttgtcgcgccgcaccgggtcgagaaggtccactaccccacccgtctgcttctgccagcgcttcgctgaatggttcgccaacttggcgagcgtcttggtccccccaatgcccaccccgaccgggatacctgtgctgcgcagtacctcagcgcggatccgcctgccgagcacttcgacgtctggcacaccggtaaggtcggcaaacgactcgtcgattgagtacacctcaaccgcaggcaccaggctctcgatgaccgtcatgacgcgctcgctcatgtcgccgtacagcgcgtaattgctggaaaacaccacaacgccccaacgctccaggtcgcgccggatctgaaaatacggcacgcccattttgataccgagctgctttgcctcggccgagcgcgcgatcacgcagccgtcattgttcgaaagcacgacgataggcgtacggcgcaagtctggtcgaaagacacgctcgcagctggcgtagaacgagttgcaatcaatgagggcgatggcccgctcagtacttgccatggattcggatgctgtatgacaccacgccccatacgtagagttcttcgctttcgaggaggtaccgcggcgggaacttcggattagccgagcgcagaatgacctggctgccggctcggtcgaaaatcttgaccagaggctcgttattcagcgctgcgatgatcacctcccctttttctgcctcccgtccccggtcgatgatcagaatgtctcggtcgaaaatgccgacctggatcatgctctccccgtctgcgcgcgccaggtaggtatgcggagctcggatgttcatcagctcgtcgagcgagatgctcccctccatgtggtcctgcgctgggctcgggaatccggcgggcacgcagaaactgaaaaacggcagtgcaattgtggcgggagcagcaggtcccaacatatggacgggcatggcacagacctcataactgtatgcatatacagtattctgagactagagtccggtcaattgaaccagatgtgcgggggcacccatgtgtggacgtttcgctcagtaccgaatcgcctatgagtacctggacaagatcgcgatgcagctgcccttgccattgcgtggcagcgtgaatcctgagccaatcggacgctacaacgtgtgtccgcaatcactggttcagctcctgcaccaggacgatgatggcctgcgcatggagccggtcaagtggggttacgccccattgtgggcacaggggaagcgaccaccagcgataaatgccagggtggaaacggcagcgactagcaagttctttcgcgatatctggcaaaccggccgcgcaatagtgcccgctgatggttggtacgagtggaagaaggacgcggccaacccgaagatcaagcagccctactacatcacgctccgtagcggcgagccgatgtttttcgctgcgctcgggcggtttcagcgaggcgcctcgctggaaccccgagacggcgacggctttgttgtcattacgtcatctagcgctgccggcatgctcgatattcacgatcggcgtcctctggttctatcgccagagtacgctgcgctctggatgcagcaggagcttttgccgctcaaggctgaggagctagcactggcgcatggtttatgcgtcgaggaattcgagtggcatccggtgggtaaggacgtcgggaacgtgcggaatgatgggccggaacttatcaataggatcgcccagccgctggtataaaggcatttcgcttcaatgaccgttggtgacaacctaaatcaagtgcgagctttgctttcaggcccgccactgtatgggctcgcgcgacggtgagtcgtcagtttagaaaagtgagccagggaaattcgctaaagctcaaacgacgagcttgaacacacctcttaggggcagatagcaccgcttccgcttatggccggaagccgcctgtcatcagcggccgctaccggccaatagctgcctgtggcgaggattcagcgagccaagagcgattcaggagatggctaacagctcatcccaaaggtggcccgatatacacccccgaaagcctagctcggtcaaagctgaacacatgcgcatgtgggctttcgccgcaccggccaacaaggggtatcaggtgatcgggtttgccttcagccagcaggacttgccctccgcatatcggacattcacttgaaaagcgcacgaaccttgtccaaggtctcttagcgtcgtcacggtacatttcgagttcagcagagtcctccttaagtgcaagcaacggagccggagctttcacaactcgattgtccactagttcaacccagggctgatgcacgccgcgccatatgaaccaggcaagaaagaccactaaaacactgcttgcgagctggcgtagcgtgagtgcctggtcaatcgtggaaaggctccataacagtgccaaaacccaaagcagcagagatcccataccaagcagcacaatgaaaaacatcatcaagccctgccaactccggttctccagtacgcccctacggaaaataagccgtaaaaacaatgctggctgcacctcaccgttttccgttctggtgtagacgatcggcatatgcgcctgccctaccagcgagctgttatcactagtttcaaccggccgagtagagagccagtaaacacgctgattgcctgatccgcccttcccgtcactgctttcaatgataggcaaatgcttcaagcccatttgctcagcacgtcgccgaatcgagttcatccgggcgtccaagaatgtttctagagtggcagttgatagccagcgtgccgggtcacggccagcggctgccagcttcggatctaatattttaagcaacgtcgcccgatcaaaggtctgggggtcctcattacccttctccagggcagcgatgctggcctcaagtaggaattggattactttgtaagctttcacttccggagcaggcgacttccgcagctcttcatccaggcaacgcatcacttccagcacaagccctcccgaagccccgtaaataaaggggctaagcatctccatgaaccctcccgaaccctttatgtagggttcgggggaggttctaacctgctcgcatcatgactcttgaagccgtctttacaccagaggcctagcccatgagcatgttcgttgcactcgattcaaacggccaactgatcactattgaaaacgccatcagcgggcttgcttgcaattgcacctgcgcctgctgcggtgagccggtagtcgcccgcaaaggccaaatccgtgagcatcacttctcccaccactcgaacaacgaaagctgcttcatccagcgcgaaagcctgctgcacctgtacgccaaacaggtcatccgcaaccaactcggtctacaaatccccccgatgcctggcacttggccggcgagcgtagatcaaaccagctggtgggatttcgaaagagtggatgaagaagtgccgcagcaaggatttcaaccagacctggtcgcccaccttagggatggcagccaactgttcatcgaggttgcggttacctcgtttattggggaggaaaagctggagcggataaaaagagccggcattaaaaccattgaaattgacctcagcgagctgctgtttaacaagcagcccattccctccaaagaggtcaaaacctatattctgaagcaagcacacaacaaatcttggattttcccagaaccaccgccaatacctatgccacacgcaatagaatggctatcccttccgagcaagccacttgcagcagggcccgaagccaaatgcatcgagcaccgctatacgatcatgggcatgtgggtatctgcccggatacttcctacaggctcagttgccgtgcgctcctggtcattcaacccacagataactgaactgcttaaatgctggcgtaaccagcttggcggcgagtacaaccctagattcaagaactggatctactaccctcgatctcgtgaagaagtgctgaatcgcctgcagcagttaaatgaaaaatcctgagcaaacggtccgccgcctagagacattcgactgcgcctatgggccattagcggtccaatatgaattactgcttttgtccctcagccatgcgaggcaactggtcagcatcgattaatatcactggaaagtgcatggcagatttccaaatctgcacgccgcacgtgctcctaacctcccgctgcgccccgtttttcgccactatattgcgtagctccgccggaatagggttccatccgcacatcaaggatggagaccctcatgtacctggctgaactcaccataaaaaacttccgcaagctgcgtgacgccaagctggaattccagcctggactgaatgttctcgtcggcccaaacaacgtgggaaaaagcgccgtagtggatgctctccggaccctcttggccggacatgaggagccttatccccgtctcgatatcgccgaccgtcatcggcctacagaaggcgaatcagaaggcgacatcagcttccacttcgtcttcaaggatctcagtcacgacgacgaagccgacttcatcgcggctctgcagcccagtactgacaactccatggaagcgcacatccacgtcaggtacaccgatgcagatcagactggccgcttccgggtgaaacggtggtgtggagatcaccaggacatcccgctcacctcggacatgatggaaaacctgcgcggcgtctacttacaacctctgcgtgatgcggcccagggattacgtccaagccgcaacagccaactggctcgcctgctccacctcctgaccgatgatgaaggtcgggagaagatcaatactgcgttgaaagaactagatgagcagttgcagcagaacgaggcgatcaaaagtactcatgcagcgatctccacgcggcacggctccatgatgggtgaacagttggcgcaggtactagccgtcggactcagcgcaaccgatttccagcgcctttccgcacgtctctccctaagtgctcagtccatggagattgagcaaaacggccttggcttcaacaatctgattttcatggcagttgtgctcagcgagctggccaagaatcctgaagcagcgtaccgaagcttaatcgtggaggagccggaggcccacctccacccccaactgcagcgcgttctcctgagatacctggccggcattccgaccaaagaaggtgagaagccagtgcaattgttcgtcaccagccactcgccgaacttcgccagcaattcgaaacttgagtctctggtgtgcttagtggagaacgaagccggcgtgaagaccttctttccacgtgatgttcagttcgcgaaaggcaagcgggagaaactggaacgctacttggacgtgaccagggctgagctgtttttcgcccgccgcgtcatttttgtagagggcgccgcagaactcatgttggtcgacgcgctcgcgaaggttttgggattcgacttgagggaatatggcatcagtctcatcagtgttgaggggctgaatttcgactcgttcctgccgctgtttggagagaacgggctgcgaattccggtgtcggtcatcaccgatgctgatccgttcgaagaagaagaggtatctgaacccgctgcggctgagcgacctgaggaggaaatccaggaggagctactcgcggtggcagcctatctcgacgaagcaggtgcagaaaacggggacgccgccgtacagctcgccgacgaaggtggcgagtcgaagaaaaagaaaaagaaaaagctaaaagctgcctatccctcgcttggcgaagctgttcggatatcgagcaacacgctgaaaatgaaggaatccgaagatcagtttgtgaaggtgcaccacggggtgaagacccttgagtacgacctggcgctacaggcggaaaaccgggatacgatgctgaaagcattggccgaacttcatcccaggatctctgtggcgctgcggaaaatcgtagacggcgtgccagacaacactgccaaagccaaggcgctgttctgcgggatgttcgagcgcaaagacaccaatagcaatgttcagaagggccgcttcggtcaagcgcttgccgaacagattgcattaacgccaggattcaaggtcccagagtacctcgagcaggctattcggcacgtttgccagggaacggacaagccatgaagctatccgatgagcagaaagctgtaatcgaagcctccttagaaccgatggcagtcactgcttgcgccggcagtggtaaaacagccaccgctattcggcggctgatcgccattcggcaaaagctggccgatcaccgcggccgtgtcgtgctgttgtcgttttccaatgtggccgtgaatacctttaacaagggctatgcagagctagcctcggatctgccggatgacgctaatcgcaagcgcgtagaagtggacacgctagacgggttcttcacccagcatgttctgcgcccccatgcctaccgcaccatgggcgccacgcaaaccccctatcttgtatcgggttcggaagcgttcttaagtagcttccagtactggaagagcaaaaccgaacgcccaatcccgatcaatgatgtgcaggtaggcgtagaggatggaaagttgatcttcttcatcgacaccagaggggcggtggaaaagcttgattacggaaaggctcaggtgctcatcgaaaagctggggcgcactggcgcatatacccatgatcttgggcgctactgggtagttcgaacgctgcttcaacagcctgccattctgagggcattggctacccgctatccccagatgctggtcgacgaatcgcaggatctgggcacgatgcacaaagttaccttggaaatactcatcaaggcgggcgtgcaggtatcactgatcggagatgttaaccaaggcatcttcgccttcgccggcgctgatggcatgtttttgaaaacctacgccgaccgctcgggagtgaaagactacaagcttacgcgcaattaccgctccctccctccgatcatcgatatagccaaccgcctctgcggccgaaacgacgagccagacaggcaacccgggcaaggtggcgcatttttcgtagggtacaaggacgccgagctccctaagctaatcagctctttcaaagctcgtctcggcgaactgggcatagaggagaaagacgcagtcattctcagcaggaacacagatcgcgccgccaagcttgcaggaaaaacagaagccccaggacagggagttgtgaacctttttgcagaggctgcattggcccgcgatcaacagcatcgctatcagcatgctttccgtctggtatgtaacgcggttgtgagtctgatcgacgatgccccgcgcggactcagctcggcgctgcagggggcgccccatgaagcctggatgcttgggcttaggcggttgctgtgggcatttacccgcaataccgagactgggctaccgtcctgttcgctccaagccaaagcacagtggcatccgaagctggtcgcaaatctgcgcgccttgcttactcaaactgatcaactgttcgggctgaaaatagtctctgcgttcggaaataaaatggccaagaagcgcttggaggacgtcgcgctcagcggtgccaaagctgatgaccaagaagctcatggcttaagagttgagactgttcaccaggttaaaggcgagtccatcggcgcagtgctctatgtcgcgaccaaggccaatatcaccgccttgctggccggcacggctacggaggacggccgtatcggctacgtggcactgacgagagcgaaaaatctcttttggcttgccgtccccaacagttgcctgggcgcaatgcgcacagacttgatcaacgcgggcttcattgaggccgcagcacagtaaagatgagctaaccaagctcggtcgatcatgcgtatttgcacctgcgtgcccagtcacttgcattggttctgaccggtctttcgcatggctaaggggcgcaagcagccattcacgaccagcagctatccggccaaaagcagccgatcatgagggcagctaacggccagtcgattatagagtcagttctgaacgcctagttggcgctgtccgcatactgggtaaagcactgcagaggccgaagccc

SEQ ID NO: 15 - DNA, 674257 bp, Pseudomonas sp.
atcggcgagggcgccaaggcttcgctgagcgccttcgatcacctgatccgcagttcggtcgccgactgagccgcgggtaaacaaaaaagggggagtcgacgcaggtcggctccccctttttttgttccgctattgttgttcaggcgctgcgttcgagctcgctgacctgcaagttgacccagtcttcggcccgctggttgagttcggcaaccgcccgcggcccttcgctttcggcgcgcattgccggccctatgacgacccgaatggttccaggccgtttgccccagccggacttgggccagaacattcccgcgttatgtgcgattggcagcaccggcaggtcggcattcacggccagcgccgccccgctgcgggaaaactttcccggttggccgaccggcacgcgggtaccttcagggaagatcagcacccaggcgccctgctccaggcgctcctggccctgcttggcgacctggcgcaaggcggccttggggttgtcgcgatcgatggcgatcggcttgagcagcatgatcgcccagccgaagaacgggacgcgtagcaactcgcgcttgagtacctggctcaagggctcgaagtaggcggaaaggaagaaggtctcccacgtgctttgatgcttggcgagaatcacgcagggccggtccggaatattttcctggccgctgacttcataacgcaggccgacgatggtcttggccaaccataccgcgctacggcaccacgtctggacgacgaagcgatagcgcgtgcgaaacgacatgaagggcgcgcagaccaggctgaccagacaccaggcaaaagccgtgaaggccagcaacagatagaacaaagcaatgcgcaccggcagcaatacgctcattgctttgtccccagcagatgttcggctactgccgccaggtcatcgaaaacccgcgtgcccggtggcagcgcaccttccagagtcttcatgcccttcccggttcgcaccagataaggcacgccgcccagacgcatccctgcatgcagatcacgatggctatcgccgacaaccggcacgccttcgagattttccaggtgaaagtgctcggcgatcttgcggaacaacccgggcaacggcttgcggcaatcgcagccggcgtccggtccgtgcggacagtgcacgatgaggtcgatacgaccgccctgctccatcaccagctgctgtagcttgaaatgcatgtcgtcgagcgtggttgcgtcgaacaggccgcgtgccaagccggactggttggtggcgaccgccaccgtccagcccgccttgcacagccgagcgatggcttcgatggatcccggaatcgggatccattcggccaggctcttgacgtacgcgtcggagtcctcgttgatcactccgtcgcggtcgagcactatcagtttcactggcctagccaagtgcggaaatatcggcaacgccaaggaacaatcctctcaaccgggcaagcaaggcatagcggttggcgcgcaccgaagggtcttcggcattcaccagtaccgcctcgaagaaggcatccaccggcccccgcaggtgcgccaggcgttccagcgcctcgcgatactggcggttcgaggcaagtggctgaaccgcctgttcagcctgttgcagagcggaatacagtgaaaattcggtggcgttgtcgaagtagcgcggctctaccgtctccggcaatttcgcctcgaacttgctgagcaggttccagacacgcttgttggccgctgccagggcttcggcttccggtagattgcggaacgcctgcaccgcctgcacccgctgatcgaaatccagcgccgagcccggctgtacggcacgcaccgacagataggacgccacctcgatgccttcgtcttcataacgcgcccgcaggcgatcgaagatgaattccagcacctgatcggccagcccctcggccttcacctgcttgccaaactggctgacggaaaaccgcacagcggccaccagatcgaggtccagctgcttttcgatgaggatgcgcaggatgcccagcgcagcgcggcgcagcgcgtaggggtccttgctgccggtgggcagcatgccgatgccgaagatgccgaccagtgtgtccagcttgtctgccaccgccagcactgcgccggtgtgggtggttggcagttcggcgccagcaccgcgtggcatgtattgctcgttcaaggccaaggcgacgtcgttgggctcgccaccgttggcagcgtagtagtagccggcgatgccctgcatttccggaaactcgccgaccatttcggtggccaggtcgcacttgctgagcaaaccggcgcgcgcggcccactgggcgttgccctcggtgcgctcggcaatgaaagcggcgagccgggagacccgcagcgccttgtcatagacgctgccgagctgcgcctggaagatcacgttcttcaaacgctcattgaagctgtccaacggctgcttcttgtcctgcttgaagaagaactcggcatcggtcagacgtggacggacgaccttctcgttgccggcgatgatctgcgccggatccttggattcgatgttggccacggtaatgaaacgcggcagcagcttgccgttggcgtccagcaggcagaagtacttctggttgtcctgcatggtggtgatcagcgcctcctgcgggacctccaggaaccgttcttcgaaggaacacaccagcggtacaggccattcgaccagcgcggtgacttcgtccagcaatgccggcgggacgatggccgtgccgttctgctcgccggccagttgctcgatacgcttggcgatcagctcgcggcgctcggcgaaatcggcgatcacacgagcgccacgcaggtcctccagatagctagtcggcttggaaatgcgtaccggccccgggctgtggaaacgatggccgcgggactcgcgacccgcgcgctgggtaagaatcgtgcaatcgatcacctggtcgcccaacagcatcaccagccactgggtcggacggacgaactcttccttgcgtgcggcccagcgcatgcgcttggggatcggcaggtcgttcaacgaggtttcgacgatgccaggcagcagctcggcggtcggctggcctgggatcgagcggctgtaccggagttttgggccgctacggtctatttcagcgaggtccacaccacacttgcgggcgaagcccagggcggcctgggtcggctcgccttcggcgtcgaaggcggcctgcagcggcgggccgtcgaggttaatgctgcgatccggctgttcgctatcgagctgctcgatcagcaccgcgaggcgccgcggggcggcaaacgcctgcacccgcccatgggcgaggccagcatccttcaagcctttttcgatgcccgaacggaatgcttcggacaacttgcccaaggccttgggtggcagctcttcggtgccgagttcgaccaggaaatccagtgcactcattctgcagcctccagcttggccaatacttcgtcacgcaggtcaggggtcgccatggggaagccgagcctggcgcgcgcctgcaggtagctctgcgccaccgcacgagccagtgcgcgtacgcgcagaatgtattgctgacgcgcggtcaccgagatggcccggcgggcatcgagcaagttgaaggtatgcgaggccttcaacaccatctcgtaggtgggcagcggcagttccagctcgatcagccggttggcttccgactcgtagaaatcgaagagttcgaacagcttgtcgacgttggcgtgttcgaagttgtaggtcgattgctcgacttcgttctgatggaagacatcgccataggtgacggtgccgaacgggccgtccgtccagatcaggtcatagaccgaatcgacgccttgcagatacatcgccagacgctccaggccataggtgatctcaccggtgaccgggtagcactcgattccgccgacctgctggaagtaggtgaactgggtcacctccatgccgttcaaccagacttcccagccaagaccccaggcacccagcgtcggtgattcccagttgtcctcgacgaaacggacgtcatggaccgaggtgtccacgccaatacggcgcagcgactcgaggtaaagctcctggaagttttccgggttgggcttgagtaccacctggaactggtaatagtgctgcaggcggttggggttctcgccatagcggccatcggtgggacggcgcgaaggctgcacataggcggcgttccaggtttccggaccgatggaacgcagaaacgtggcggtgtggaatgtaccggcgcccacttccatgtcatagggttgcagaacgacgcaaccctgctctgcccagtagctttgcagggcgaggatcaggtcttggaaggtgcgcacggcaggcgtaggctgggtcaaaatttcacctgtgctggcttcgacagaaagccccggagtatacccgataacggctccggcccgtggtagcgcgtgccttccggcgcgcatcggtggccaggccatctgctcgtcgcccttttcgaaaggacaaaggaacatgccgcgttgcgcctggtgcagtgacgatccgctgtacatcgactatcacgacaacgagtggggcgtaccaacccgcgatccgcaggtgctgttcgaattcctcatcctcgaggctttccaggccgggctgtcgtggatcaccgtgctgcgcaagcgcgagcgttatcgccaggtgctgttcggcttcgatccccagcgtctggcgcagatgaccgatgccgaaatcgacgagcgcatgctcgaccccggcatcatccgcaaccggcgcaaactcgaagcggcacggcgcaacgcgcaactgtggctcgagctggaagatccggccggctggttgtggtcattcgtcgatggtcagccgaagatcaatcatttcgaatcgatcaaacaggtcccggcggtgaccgccgaagccgaggcgatgagccgcgcgttgaagaaggccggcttcagcttcgtcggcccgaccatctgttacgcctacatgcaggcctgcggcatggtcatggaccacaccatcgattgtgatcgctatgcgttgctggccgatgcgagtgcctagtggtcaggctgccgaacgagtagcgcagcgcccggagcagttacactagcggctttgattttcgggagagatccttggacaagttcaaaggtgcgctggtggtcggcttcctgcgtctgttcgccctcctgccctggcgcgcggtacaggggctgggcaatgccatcggctggttgatgtggaagctgcccaatcgttcgcgcgaggtcgcccgcatcaatctggacagatgctttcccgagctcgccaacaccgagcgggaacggctgttgcgcgcaagcctgcagcagatcggcaagaccttcaccgaaagcgcctgtgcctggatctggccggcagacaagaccctgcgcctggtcaagcaggtcgaaggtttggaagtgctcgaacaggcattggcgtccggcaagggcgtggttggtatcaccagtcacctgggcaattgggaagtgctcaatcacttctattgcgcgcaatgcaaaccgatcattttctatcgcccgcccaagctcaaggctgtggacgatctgctgcagcggcagcgggtccagctgggcaacaaggtggcgccttcgacgcgtgaaggcatcatcagtgttatcaaggaagtgcgcaaaggtggcgccgtgggtattcccgccgacccggagcccagcgagggcgccggcgtcttcgtgccctttctcggaacccaggcgctgaccagcaagttcgtgcccggcatgctcaccggcggcaaggcggtgggggtattcctccatgcgttgcgcctggaggatggttcaggctacaaggtgatcctcgaagcggcgccgccggcgatgtacgacgaggacgtagaggtcgcggtcgctgccatgagcggcgtcatcgagcgctacgtgcgcacctggccgagccagtacatgtggaccatgaaacgcttcaagaaacgcccggcaggcgaatgccgctggtactgatatacgacaagcaggacgtcaaatggccaaccagcgacagcacccacgtgcccccatgaagtgccgcatccgcatcagtcacgaatccttcggcgaaatcttcgcccatacccgtgatctgtccgatggcggcgtctacgtcaaacatccccagctgaccgagctgcgcaccgggatgatcgtcagtggccaggtgcaggacctgccgattccggcgccggagctggaaatggaagtcatgcgggtcgacgcggagggtgtcgggctgcgcttcgtcgggcgcgactgagcgcttgcaacggcccggtccaggccgggcgacatggccgcatagagcgccgaattccacgtggcagacggatgcgggaaagcccttgtccttcgaaaacatcctgatacatttagcctcccggagccgcccctacccgtggccaggtccttgcgaggcgcttttccatgagtcgcgcggttgttgaagtcggctccacccctgccgaagatcctgtagttcccttctttttactcctcgaacggctgcggccctaccggcacgccatcggcctgtgcgtgtcgctagtgctcttcgccctggcactgctcgcctgctggcatctgcttggctcgatcgatacggggcaggtgcgcgacgcattggccgcggtgcctccacgctcgctgttgctgtcggcattggcgagcctggccggagtggttgtgatgatcgcctacgaggcgtccgcagcccgttacgcgcaggtgcgtctgccctggcgtaccctggcgctgggcggcttctgcgcgttctcgattggcaacgcggtcggcttctccgtgctctccggcggctctgtgcgctatcgcctgtatggccggttggggctgggtgcggccgacgtcgcgaggatgaccttgttcgccagcctttcgctgggcctgtgtcttccagtagtggtcgccttcgctgcgctgtatcagccggccgatgcggcgcgggccctgcatatatcggagcctgtcctgcgcatcgttgccattgggattctcctgttggccagtgcggcagttggcatagccgctcgcttccgctccgaagcacgcccggcaccgggctgctggcgcgtcgaactggggcggctcagcgtgcgcgtgcctggtggtcgcctgaccctcgcgcaactgctcatcagcgtgctggatgtcggtgtggctgcctcagtgctctacctactgttgccggatgcgccgcccttcgtcagcttcgcgctgatctacatgctggcgttggctgccggcgtgctcagtcatgtaccgggtggtgttggtgtgttcgaggcggtgctgctggcagcgttcgccgggcgcctcgatccggccgcgctgatcgccgccatgctgctttaccgtttgctctacgtgctcctgccgctgtgcgtcgccggtgtgctgttgctgatcgccgaagcacgccgcctctggctggcgcgtcaggtggcacgggtcgccggcggtctggccgttccgctgttggcgctgctggtgttcgtcgccggcagtctgctgcttttttccggcgcgaccccggcggtcgatgagcgcctggcaaccctgggcttcctgccgctgccggtgatcaccgcatcgcatctgagcgccagcctgatcggcacgctctgcctgctattggcccaggggctctaccggcgtctgtccgcggcctgggcactgacgctggcgctgctctgcctcggcgcgctggcctcgctgctcaagggcatcgattggccggaagcgctcgtcctgctggcgattgcggcattgctggcgaccttccgccgcgagttctatcgccacagccggctcatggaagcgccggtttcgggcgcggcgctcgccggaaccctcgggatcctggctgcgtcgatctggctgctgctgttcgcctatcaggacgtaccctacagccatgaactctggtggcaattcgagctggacgccaatgcaccgcgcagcttgcgcgccgtgctcggcagcgtgctggtgctggtcgtggtcggtatcacctggctgttgcgtccgccaccgccggccatccgcctgcctgacggcgaggcgctggcacgggcggcacggatcgtcggcaacggcgagcagcccgaaggcgggctcgcgctcagtggcgacaaggccctgctgttccacccgaacggtgacgccttcgtcatgtatgcccggcgcgggcgcagcctggtcgcgctgcatgatccgattggccagccccacgagcgtgccgagctgatctggcagtttcgcgacctctgcgaccgtcatcatgctcgcccggtgttctatcaggttcgcgcgcagaatctgtcgaactacctggacattgggctgacggcgctcaagctgggtgaggaagcgctggtcgatctggccggcttcgacctgaacagcaacggcaaggaaatgaaagccctgcgctacacctggaatcgcggccagcgtgacggtttgacggtccagttctacgcccccggtgaggcgccgatcgacgaactgcgcggcatctccgatgcctggctgcaaggcaagaaagtgcgggagaaaggcttttccctgggccgtttcagcgccgactacctcgcccatttccgcatcgtggtggtgcgcgtcgacgggcgcgcggtggccttcgccaatttgctcgaatgcggcagccgcgccgtggccagcctagacctgatgcgcgtgctggccgacgcgcccaaatccactatggagttcctcatgctcgggctgatcctgcatttcaaggaggccggctacgcccgcttcagcctgggcatggtaccgctggccggtctgcagccgcgtcgcggcacgccgctgccgttgcgcctgggtgcctgggtgttcacccgtggcgagagtttctacaacttccagggactgcgccggttcaaggacaaattccagccgcagtgggagccccgctacctggcggtgcccgccggtctcgatccctgggtggcgctggccgacacggcgacgctgatcgccggcggcatgggcggattggtgaggcgctgaaatgaaacgagacagctggttcaaaggcggactgttggccgccgtcttggcggtcggtgtcgccgtcgtctggcacgaacgtgacgactcggggctgcagcatttggtactgtatgacggtaccccagcactccggatcggcgcgcatgccgcgccgcagcacgtgctgatactggtgaccgaacagcagcggctcgatccggccacgctcgagcgcctggccgcttcaggcccggtcgagctggtgcaggtgccgctgtccggcagttgcgtggcgcagcaacgtcagcgcacggaagccgaaggattgctgggcggcgctccaacgctggtggccgggctcggcccagccgccgtctcggcttggcgctggctggctgaacaaaaagacgactcggcccaggcgctgtcggtgggcttcgatctggagcatcccgattgcgccgagccgctgccgcagacggcgccacacggccactggatcggcgcctggaatgacaacccgggcgatgccaacgcgctgttcctgcgtggccagtccaatgccgaaccgcgaatcagcgcctacggcacggcattgacgacggtgctcgagtccgagctggcccgcctgctcagcggccaggccaacccgatgccggtgatcgaacacccagcggcaacgccgtcggataccctgacactcttctattccggtgacggcggttggcgagacctggaccgcgcctcggccgagcacatggccaaagtcggctacccggtggtcggtatcgacaccctgcgctactactggcggcacaggagcgcccagcagagcgccgatgacctgtcgcggctgatgcagcactaccgcgaggcctggcacatcaagcgtttcgtgctcgccggttactcctttggcgccgacgtgttgccggcgatctataaccgcctgcccggcagcgatcgcgagcaagtcgatgcgttgctgctgctcgccttcgcccgcagcggcagtttcgagatcgaggtgagcggttggctcggcaagcaaggcgaagaggcggcgacgggcccggagatgcgtcagctgccggcagccaaggtgttttgcgtgtatggcagcgaggaggcggccgacagtggttgcactcaatccgacgccgtcggcgagcggctgcaactgtctggcggtcatcatttcgatggcgactacgatgccctggcggaaaagctgctcgccgcgattcgggcacggcaacccggttcctgagcggtcatcccgctacgggttagagcggttgggcttcaggacttaaccgacttgtcgagcttgcgcaggaacacgcccatttccttttcggcctgcttgtcgccatgcgcctgcgcggcgatcaggccttgctcccaggcgcgccgcgcgccttcgaggtcgccgctggcctgcagtgccttgccgagcagcttccaggccgccgaataggtcggatcctgttcgatgcagcgctgcagatgcgtcgcggcctgcgctgcgtcgcccgcatccagatagcccttgcccaggccaaagcgcagcatgggattgtccatgcctttggcgagcatcttttccaatgattcgagcatggcttcctcttgatcgcggcaatgggtcggtacggtgagcaggtcgacccattccgccaatcgctagctggcctgggtgaccgcgctgagaaactcttgagtacgggtttcctgcgggttgccgaacagctcgtccggggtcccctgctcatggatgcggccttcgttgaagaagcatacccggtcggcgaactcgcgggcgaagcccatctgatgggtgaccatcaacatggtcaggttgtgttcgtcgccgaggcggcggatcacgttgagcacttcgccacagagctccggatccagtgccgaggtcacctcgtcgaacagcatcacccggggccgcatggccatggcacgggcgatggccacacgctgttgctgaccaccggagagttgcgccgggtaatgctcgagtttgtcctccagcccgaccatggccaacagctcgtccgcgcgttcgcgggcttcggttttcgacagccccagcacctgcaccggcgcctccatcacgttctgtcgagcgttcatgtgcgggaacaggttgaagctctggaagaccatgccgaccttgccgcgcacgtggcgctggtaacgaccgctggccggaatcagatggccgtcggacgcgggcatgtgggtcagcggctcgccgtcgacttcgatgacgccatcgtcgatggtttccagggtcatcaaggcgcgcagcagggtcgacttgcctgagccgctggggccaatgatcgcgaccttctcgccattggcgacttccagatcgaggtgatccagtacggtgaggtcgccgtagcgcttggtcacctggtcgaagcgcaccagtggctcggccacgtcagggttgccgttggcgaaggtgttcggactggcgtcgagatgcggtgaagtattcatcgggcaagctccaagcggttttcaagacggcggacgcaccaggccagggccaggctcaggatcaggaaaaacaggccgaccatggtgatcggttccaggtagcggaagctctcggagccgatgttcttggcctgctgcatgatttcgaccacggtgatcgccgaaagcaccggggtgtccttcaacatggccactaggtagttgcccagcgccggcaatatcggccgcagggcctggggcaggatgacgtcgcggtaggcggtcgtcggcttcatgttcagcgcggtcaccgcctcccattgcgcccgcgggaccgcatcgagccccgcccgatagacttccgccgtgtagcaagcgtagtgcacggcgatggcgacgatgccggcctgcaatgcgctgagattgatgccgtaattggggaatacatagaacaggaaataggcctggatcaacagcggcgtgctgcggatgaattcgatcaggccggtagccggccaggaaagccacacacgcttgctgcggcgggcgacggccagaaacaggccgagcaccactgcgatggcgaagccgctgatggtgatgccgatcgttttcagcgaagcctgtagcagttgaggcaggatttcccaggcgaactgccaatcgaagaaattcatgccaggccccctttgatccgcccgcggctgaggcgccgttcgaccagacgcatgccgaggttgatcgcctgggccatgacgaagtacatcaccagcgccatgccgaagatttccagggtcatgaaggtcgcctggtccaactgccgtgaacggaacgccagatcggaaatggtgatgagcgaaaccaacgaggtgttcttcaacagttcgatcagcaggttggtcccaggcgggatggctgccagcagcgcctgcggcaggatgacccgcgtaaagcgcttgatcggcggcatgttgagcgccacgcaggcttcatattgcccacgtgccaccgagcggatggtgccgcgcatgacctctgcgccgtaggcgccgatatgcaggcccaggccgcagatggccacggtgaaggcggacagttccacgtggaacggcggcatcggcagcacgaaatatagccagaacagctggaccagcagcgaggtgccgcggaacacctcgatataggcaatcgtgaaccagcgtagtggagcgaacggtgacaggcgacccagggcaccgagtacggcgcaaacgatcgccaatagcgaggcccagaaggtgatctgcagtgtcacccaggccccttggaacatgaggggaaggagttcgcccataggttcgatgcctctgttgcaggaacgaaaccacacgagcagagccccgtgccacctgaggcacgaggctccgcgcgtggatcactgggcgcagagttgcgcggcggtcttgtcggtaatgttggacttgtcgaagccgaacggctcgacggtcttcaggtgctcttcgctgccgagccacttcttcagttcggcattcacggcgtcgcgcagcgcggtgtcttcggggcggaacgccagcgcaccatagccggtgtgcgacggatcgtccttgaactcgctgatggcctcgagcgagtcgccacccttctccgccaggcccttcatggtcagctgggtgcctaccgcggcatcggcgcggccgctgcgcaccgcctgcagctgcgcggtggtatcggggacctggaggatctggtcatcgctgatgccgccgtcgcgggcgtagttcaggttcacggtcccggacatgatcgccagcttggcaccgctcttggcgatgtcttcgtagctgtgcaggttcttcgggttgcccgccttcaccagcagcgtatcgggcagctggtactgcggatcggtgaagatcacctgcttgcagcgctcgggcgtgatgtacatgccggccgcgatcaggtcgaagcgcccggcacgcagaccgggaatcagcgagccccactcggtgaggacgggtttgatggtttcgacgcccatgcgctggaaaatcttctcgacgatctccggcgattcgcccgtgacgctgccgtcggtggcggtataggcgaagggggtttcgttggcatagccgatgcggacgctgttgctcttcttgatctcatcaagggtgtcggcgttggccaggctggcgagcgagaggccggccagtgcggcggaggcgagcaacagcttgccgaaatggaaaggacgtgcgcgattcatcgtgaattctcctgtgcttttatggttcgcaggcgggcctgctgtataggagggcagtttcatgagcatcaggacagggcattccctgcctcagcgcggctttggacttctttgtcttcggaatgtgcgccgcgtttcgccgcccgagcataacaaagaccgttttctcaatgggattgcactaggacaattgcatgacactgcacttcggctgatcctgtcggttcgactgaaggtggatcgtcatgcgcaactggaaacaggccttgctcgctgcccggagtggcgcgtcgaaatacaagctgctggttaccgccatcgcaaccgacatcgaacagggaaacctgcacgatggccaacgtctgccgccgcaacggctgctggccgaacaactcgacatcagcgtgcagacggtgaccaacgcctacaaggagctggagcgccaaggctgggtgcgctgcgaggtcgggcgcggcagcttcgtcagtcggcggatcagcgagcgtgtggccagctccatgctcgatcgcggtgaaaattccctgctcgatttctccaccgcgcggatcatccggacggacagccatgaccgttactggcggcagacctgcgaggaactggccgccgagcacgaacaaccgtggattcatgcctgccgcccgattgccggcttcgagcatcaccgcgaagtgggcgtgcgatggctcgcagggttgggcctgaccgtggagttgcaggatctgttgctgaccaacggcacctcccatgggatctttctcgccctcgcctctttggctgggccggacgatctggtgctctgcgaaaactgtaccgaccacggggtaatcggcaccgcccaggtgctcggcttcacccttcagggggtcgagaccgaccgtcatggtctcgatccggagcatttcgaggatctgtgcggcaacgagcgggtcaccgccctggtctgtacgccgaacctgaacaaccccaccagcaccatcatgccggatacgcgtcgtcgcgagatcgccgagatcgcccgtcgctatggcgtctacgtgatcgaagatgacgtttacgggccgctgctcggcgaccaccgcgatgccttgccaatcagccattacctgccggaacgatcgttctactgcaccagcctgaccaagtcggtgcttaccggactgcggatcggctatatggccatgccgcggcggctggcgttgcgcaccgaaagcatcctgcgggtcaacagctggatggccgcgccattgcttggcgagatcgccacacgctggatcgagcgcggtgtggccgatgagctggtgcgtgttcagcgtgggctgatcgcgacccgccaggccgcggtgaccgccgaactgggcgattacctgcgcggcagccacccggcctccctcagtgcctggctgaacgtgcccgagcattgggagctggatgcgctgcagcacgagctgcgcaggcgcgagatcgccctgaccctgcccgaccccttcctgccgccggggagccaacggcccaaggcgatgcgtctgtgcgtgggtgccgaatgcgacgacgagcgtttgcgcgaggggctgtgcagcatccgcgaagtcttcgagcagtttccggagatccatgaatttcgcggcgcccgctgacagcgaatcgcccctgcaccacgtgctcgcactgccagcctatgggcccatgaacagggcgtttcggcccttctgagcggcacgatcatggggcgaaaaaaagagtcctagtacattgggctgctgaaatcggcgctcctacactcggcgacatccaccatcggaatgttcgccatgcagccgattcttctcgaccagctcttcgaagcacgtgaacgcattcgcggcctcgtgcggcaaacgccgctggagcgttcggcgtcgcttagccggctggctggcgtgccggtgtggttgaagctggaatcgcagcaggccaccggcagcttcaagctgcgtggcgcgagtcatgcggtcgcgcagttgtcagaggcgcagaaacgcctcggcgtggtcaccgcctccaccggcaatcatggccgtgcgcttgcctacgcggcggcgcagcagggggtcgccgccatcgtctgcttgtcgcaattggtgccgccgaacaaggtgcaggcgatccgcgagctgggcgccgaggtggtcatcatcggccacagccaggacgacgcccaggtcgaggccgaacgcatcgcccgtgaacggggcgccgccttcatcccgccgttcgaccatccgcaggtcatcgccggccagggcacgctcggcctggaaatcctcgagcagtgcccggaagtcgccgaggtgctggtgccgctgtccggcggcggcctgtttgccggtgtcgccctgggcctcaagcgccagcgcccggaaatccgcgttcatggcatcagcatgcggcgtggcgcggcgatgtacgccagcctcgaggcaggccacccggtcgaggtgcaggaatgccccagcctggccgattcactgggcggcggcatcgacctgaacaatcgctacaccttcgccctcgtgcgcgagctggccgaccagatccatctgctcgacgagccagccatcgctgccggcattcgccatgcctatcacgaggagcggctggtgatcgaaggcgccgcggccgttggcatcgccgccctgctcgaacgttcgatcaagccgcgagggccggtggtcatcgtgatcagcggccgcaacctggacaccggacagcacttgcgcgtgctcaacggcgccgacgagtaacccaacaacccaaacccgacaaccttgctaccggtgcgtccggagtaccctcgatggagatcaacatggccgagaccgtgctgctcagcgaaaccgatctccgcgcctgcctggccctcgatccggccagcctcgacgcggtcgaacatgctttccgcctgctcgcgaccgaggcggtggcgatgccgccgatactgcgcctggacattcccgagcataacggcgaggtcgacgtgaaaaccgcctacctgcccggcctgccgcgctttgccatcaaggtcagccccggcttcttcgacaacccgacgctcggcttgccgagcctgaacgggctgatgatgctgttctcggcgcgcaccgggctgctcgacgccctgctgctggacaacggcttcctcaccgcggtgcgcacggccgccgccggcgcagtggcagcgaaatggctgagccggacggatgccagccgcgtggccattctcggcgccggcgaacaggcgcgtctgcaactggccgccctgcgcctggtgcgcgatatccgcgaggtgcgcatctgggcacgcgatccggcgaaggcggcggcctttgccggtgagttggagggtgtcgatgcccgcgtcgccgataacctcgacgccgccatggacggggtcgacatcgccatcaccaccacacccagccgcacgcccttgatccagccgcatcatctgcagccgggcctgcacatcaccgccatgggttcggatgccgagcacaagaacgaaatcgccgccgccaccctggccgcctgcgatctctacgtcgccgaccgcctgagccagacccgggtactcggcgaactgcaccacgcactcgccgcgggtgtggtggatagcgattcatcgtccctggtcgaactcggccaggtgatcgccgggcatcaccccggccgcacctcggccggtcaggtcaccctttgcgacctgaccggcaccggcgcgcaagacactgccatcgccagcttcgccttcgaacgggcgcgcgcagcgggcaggggtttcagcttcaacccctgatcttcagacgcgagcctgttcgcgcccgggccgcacgccgggctcgcgagccagctcgcccctgcagagcaagcgcggtccatccacgagggcaaaaagatgtccgaaatcgtcgtcaatctcccgttcagtcgggaggaatatgcgttgcgtatcagccgggtccgccaggtcatggccgcgcgcggtatcgagctgctgatcgtcaccgacccgtcgaacatggcctggttgaccggttatgacggctggtcgttctacgtacaccagtgcgtattgctggcgctcgagggcgatccactgtggtttggccgggaccaggacgccaatggtgcgcgccgcaccgtgttcatgggcgacgacgatatcgtcggctacccggaccactacgtgcagtccagcgtgcgccatccgatggactttctgtcgcgcgatgtgatcgccgcgcgcggttgggaccgactggccatcggtgtggagatggacaactactacttcagcgcggcggccttccgctcgctgcagcagcacctgccgcacacccagtttttcgacgccaccgcgctggtcaattggcggcgggcggtgaaatcgcctcaggaaatcgagtacatgcgcgtcgccgcgcgcatcgtccagcgcatgcacgagacgatctacgagcgtatcgagccggggctgcgcaagaacgaactggtcgccgatatctaccgcgccggtatcctcggggtcgagggccacggcggtgactatccggcgatcgtgcccttgctgccgaccggcgccgacgccagtgcgccgcatctgacctggaacgacaacccgttccgactgggcgccggtaccttcttcgagattgccggctgctacaagcgctaccactgcccgctgtcgcgcaccatctacctgggcaaaccgccggcgcacattctcgaggccgagcaggccgtggtcgagggaatctccgcgggtctcgcggtggcgcgtccgggcaataccaccggggacatcgcccgcgcctttctcaaggtgctcgacaaattcgacatccagaaggacagccgctgcggctacccgatcggcatcagctatccgccggactggggcgagcggaccatgagcctgcgcccgagcgacgaaagcgtgctcgagccgggcatgaccttccacttcatccccgggctgtggatggacgactggggactggaaatcaccgagagcatcctgatcaccgagagcgggatggaaaccttctgcgacttgccacgcaagctatacgtcaaggactagccatgagtgaaacgctgctgcgcaaccccatcagccccaccgtcgacttcgagcgtgacggtgtgcagcatggctatctgcgcctgccctactcacgcgacgactcggcctggggcgcggtgatgatccccatcagcgtggtcaagaacggcgcgggccccaccgcattgttcaccggcggcaaccatggcgacgagtacgaaggcccgctggcgctgagcaagctggccagcagcctcgacccggcgcgcgtgcggggtcgggtaatcatcgttccgttcatgaacgcgccggcggtatgggccggtacacgcacctcgcctattgatcacggcaatctcaaccgcagcttccctggccgacccgatggcagcgtgaccgagaagatcgccgattacttccagcgcagcctgctgccgctggctgacttggtgctggacatccattcgggcggcaagaccctcgactttctgcctttcgccgcctgccacctgctgcccgacaaggcccatcaagcccgttgcgaggccggcatgcgcgccttcgcggcgccctactgcatgcgcatgctggagcaggatgcgctgggcatgtacgacaccgcggccgaggcgctgggcaaggtgttcgtcaccaccgagctcggcggcggcggctccatcagtgcccggacgctggccatcgccgagcgtggcgtgcgcaacctgctgatccacttcgatctgctcgatggcgaaatcgagccggccgagtcggtgatgctggacatgccggacagcgattgttacctgtgcagcgagagtgacggtctgctcgagctgtgcaaggacctgggcgagaccgtgcgcgccggcgagctggtggcgcgggtgcatgatgcacggcgcaccggtgccgcgccggttgagtaccgtgcacggcgcggcggcctgatcagcgcgcggcactttccgggacgggtgcagagcggcgacacgctggcggtaattgcgcaggtgctgcagtgagcgccgcgcctgttgggcgacgagcggctcgtcagtctacggccggagggcgcaagagagctgcagtgtcgtccggacgcgatgtttttgggaggcatcatgcacaagctcgatcgctatgacctgaagattctgcgcatcctgtccgaggatggccggatcaccaagtcggcgctggcggaggcgatcaacctctcggtgacgccggcctgggagcgtgtgcgcaagctcgaggccgccggattggtgcgcggctatcgagcgctgatcgactggggcgcgctgttccggacccagcaggtcctggtggaaatcagcctggcacggcataccgcgcaggacatgcggcgcttcgaacagcgcctggccgacgcgccggaagtcgccttctgctacgccaccggtggcggtatcgactacatcgcgatgatccgtgcacgcgacatcgaccactaccagcgcttcatcgacgcgctgttgctcgaagacctgggtatcgagcgctactacacctacatcgtcaccaagagcgtcaaacgcgacgagggcggcgcccccacggcacccgacgaagacgtacaggcgccgcatacggggacgttctgaccggcgcgactatcaccatggctcgaatgccactagaatgcgcgccgccttggccctgttggcccggcaaatgggttccctcaccccatcacgttcaaaaaggacatgccatgctgcagattccctcgtcggtccatagggccacactgggcggcctgatcgccttccacatcctgatcatcatcgctagcaactacctggtgcagctgccgatcattctgttcggctggcacaccacctggggcgcgttcagcttcccgttcatcttcctggccaccgacctgaccgtgcgcctgctcggcaagggcccggcacgccgcgtgatcgcccgcgtcatggtcccggcgctgatcgcctcctacgtggtttcggtgctgttccatcagggcacgttcagcggtttcgcggcgttgggcgagttcaacctgttcgtgtttcgcatcgccatcgccagcttcctcgcttacgtgttcggccagattctcgacatccaggtgttcgaccggctgcggcggctgcgccagtggtgggttgcgcccaccgcttccacgatattcggcaatctgctcgataccttcgtgttcttctccatcgccttctggcacagcgacgacgccttcatggcggcaaactgggtggagatcgccagcgtcgactacgtgatcaagctggccatcagcctggcgctgttcgtgccgctctacggcatgctgctgaacgccatcgtgcgcatgctgccggtacagcaaaccgcgaccgcataagcgacagcctcggccagagcgcaaaaaatgcttggctcctacgcgtagggtggaaaacggcgaagccttttccaccgcagcctccaggcttttctcgtttgcccaccgccaaacagaaaattccacccgccaatcgcgccgctacggaaaaaagcccaagccgccctcccctagcatgtctcccatgccactcggcccggaggcatcgccatgtcgctcaaacaccccctgttgttcaaatcgctttgctacgtcgacggtcagtggatccacagccgtagcggcgacagtgtcgccgtgcaaaacccggccaatctggccgagatcggccatgtaccgatgctcgaacgtgagcagatcgtcgccgcggtggacgccgccgagcgggcctttgcgtcttggcgtctgcaaagcctggacgagcgcgctgccctgctgcagcgctgggccgcgctgatcctgcaacatcaggacgatctggcggcgattctttgcgaagagcagggcaagccgctggccgaggcgcggggcgaaatccgttatgcggccagtttcatcccctggttcgccgaggaggctcggcggttatatggccggaccatcccgagccatatcgccaatgccgacctgagcaccctgaaggagccggtcggtgtctgcgccctgctcacgccctggaacttccccagcgcgatgatcacccgcaaggccgccgcggcactggcggccggctgcacggtggtggtcaagccggcgcacgaaacacctcattcggccttcgccctggctcagctcgccgaggaagcgggcctgccggccggcgtgttcaacgtggtgctcggcgagccgcagatggtcatgcaaaccctggtacaggacccgcgcgtgcgctcggtgagcttcaccggttcgacccgggtcggtcgtttgatcctggaggccgctgcgcccggggtgaagaaggtggcgctggaactggggggcaatgcaccgctgatcgtctgcgacgatgccgacctggatcatgccgtgcaggtggcgctggatgccaagtttcagacgtccgggcaggactgctgcgccgccaaccgcatcctcgtccagcgtcccgtctatgaagccttcctgacgcgcttcgcccgtgccatacgtgaattgcgcgtcggcgccggcctggatgaacgcagccagatcggcccgctgatgcaccaggcggcgttcgacgccactgccgcgcgggttgccgacgcgctggaaaagggcgctcggctgctggccggcggcgagccccacgcccttggcggctggttctggcagccgacgctgctggccgacgtcacccccgacatgcgcatctaccgcgaagaaaacttcgccccgatcgccggcgtgctgccgttcgacagcctcgacgaggcggtcagcatggccaacgacaccgaatacgggctggccacctacatctgctcgaatcggctggacgtgatccacccgctcatccggcggctcgatcacgcgatggtcgcggtcaacggcaccaagttcaccggccacccgatccccttcggcggcatgaaagcctccggtctcggccgagaaggcggcagcgagggctttgagcccttcgtcgaaaccaagtacgtctgcatccatcaccaaggtcagcgttactgatggcctggttgatcgggcggagctgtggcactgagttggcgcaatgctcgggccgcttccgtgggagccccgacctcggggcgaagctcttgggcaccggattggcagcattcggcgcgaggtcgcgcctcccacaaatgggggcggcgtgcactgctttttgtgggaggcccgaccccggggcgaagcttttcgggctccgagttggcgccgttcgccgtgggtcgcgcctcccgcaggacaaagcgtgccactcgcagaaagtggcgccatgcacctactgcttttgtgggaggcccgaccccggggcgaagcttttcgggcaccgagttggcgccgttcgccgcgggtcgcgcttcccacagattctggccactagccgaagagccaacaacacactggcggaccgaaaacggcctgccaggcaagtcgagccatttccgcccttaggggcgggtcaggatgagggaggcggaatccgagcccctttttccattaccgcaaaggagacgcccatgagccatgactacgatgccctcttcgcccaggaccgtgcccacttcatgcacccgtccacccatgcccacgaccatgccagcggggcgctcaaggggcgcatcgtcaccggcgcctcgggcatccgtatccgcgaccacgaaggccgcgagctgatcgacgccttcgccgggctgtactgcgtgaatatcggctacggccgcaccgaggtggccgaggccatctaccagcaggccaaggaactggcctactaccacacctatgtcggccactcgaccgaggccatcatcgagctgtcgcggcgcatcatcgactgggcgcccgatggcatgaagaaggtctattacggcctctccggctcggatgccaacgaaacccagatcaagctggtgcgctactacaacaatgtgctcggtcgcccgcagaagaaaaagatcatctcccgccagcgcggctaccacggctcgggcatcatgaccggcagcctgaccggcctggccagcttccaccagcacttcgacctgccgcacgcggacatcaagcacgccgcctgcccgcacttctacaaggccccggccgggatggacgaggcggcgttcgtgcgccattgcgccgacgacctggagcagctgatccagcgtgaaggcccggacaccgtggccgccttcattggcgaaccggtgatgggcaccggcggcatcatcgtcccgcccaccgattactgggaggcgatccaggcggtgctggcgaaatacgacatcctgttgatcgccgatgaggtggtctgtgccttcggccgtctgggcacgcccatgggcagccagctgttcggcatgaagccggatctgatcaccaccgccaaaggactcaccagcgcatacgcgccgctgtctgcggtgatcgtcggggaaaaagtctgggacgtgatcgacgaagcctccgcgcgcgacggcgccatggggcacggctggacctactccgggcatccgatctgtgccgcggcggcgctggcgaatctggatatcctggaaagagagaacattcccggcaatgccgccgaagtgggggcctatctcaatgcacagctgcgccagacgttcgactatcacccgctggttggcgaggtgcgcggcatcggcatgctggcagcgctcgagttcatggccgatcgcgaggcccgtacgccgttcgacccggcgctcaaggttggcccgcgcgtctcggccgcgtgcctggagcgcggcatgatcgcccgcgccatgccgcacggcgacatcctcggcttcgccccgccactggttctgacccagacggaggccgatcaggtggtcgagatcgcccgaagcgcggtagacgcggtagctgccgaggtgctctgacgcacctcgtcgaacctcagaagaaggtcaggccggcctggaacaggcgctccacgtcgcggatgtgcttcttgtcgacgaggaacaggatcacgtggtcgcccgacgcgatgaccgtgttgtcatgggcgatcagcacttcctcgtcgcggatcaccgcgccgatggtggtgcctggcggcaggacgatcttgccgatagcgcgtccgacgaccttgctcgagcgcggatcaccgtgggcgatcacttcgatggcctcggccgcaccgcggcgcagcgaatgcgcgctgacgatgtcgccgcggcgcacgtgggtcaacaaggtgccgatggtggccagctgcgggctgatggcgatgtcgatctcgccgccctggaccagatcgacataagccggattgttgatgatgcacatcaccttgcgcgcaccgaggcgcttggccagcaacgacgacatgatgttggcttcgtcgtcgttggtcagcgcgaggaagacgtcggcgtcgttgatgttttcctccaccagcaggtcgcggtccgaggcgctgccctgcaggatgatggtgctgtccagggtgtcggagaggtgacggcaacgggctgggttcgattcgatgatcttcacctggtagcggctttcgatggcctcggcgaggcgctcgccgatatgtccgccaccggcgatgacgatgcgacgatagctgtcgtcgagccggcgcatctcgctcatcacggcgcggatatgcccgcgcgcggcgatgaagaagacctcgtcgtcagcctcgatcaccgtgtcgccctggggcaggatcgcctgattgcggcggaaaatggcggccacccgcgtgtcgacgttgggcatgtgcttgcgcagctggcgcagttcctggcccaccaacggcccgccgtaataggcacgcacggccaccagctgcgccttgccctcggcgaagtcgatcacctgcagggaaccgggatgctcgatcagccgcttgatgtagttggttaccacctgctcggggctgatcagcacgtcgaccggaatcgcttcgttgctgaacaggccggagcgcgtcaggtacaccgactcgcgtacccgggcgatcttggtcggggtatggaacagggtgtaggcgacctgacaggcgaccatgttggtttcgtcgctgttggtcaccgccaccagcatgtcggcatcgtccgcgccggcctggcgcagcaccgtcgggaacgagcctcgaccgaccacggtacggatgtccaggcgatcgcccaggtcgcgcaggcgatcgacatcggtgtcgaccacggtgatgtcgttggcttcgctggcgaggttttcggcaagcgtaccgccgacctgccctgcaccgagaatgatgatcttcaagcgatcactcctgaaaggcagctgtgggccaccgcatccattattggccgaagcattccgcctggctcatttacgaattctggccgttgggttgggccgcgatttttatcagtttggcgtaatagaagccgtcatggccgttttcctgcggcagcaactgacgcccatgggattgttcgacaccgaaaccgctcggcaaatccagttcacgggcaccaggcatgcgcgccaggaaggcttcgatcacctcgcggttctcggtcggcagtaccgaacaggtggcatagagcagcacgccgccgaccgccagcgtcggccagagcgcatcgagcatctcgccttgcagcgtcgccagcggcgcgatgtcgtcggcctgccgggccagcttgatgtccgggtggcgacgaatcacccccgtcgccgaacagggcgcgtcgagcagaatgcgctggaacggctggccgtcccaccagacttcggtcgcgcgcgcatcggccgcgaccagcttggcctgcaattgcaggcggtcgaggttttcctgaacgcgctgcagccgcttgggctccaggtccagcgcaatgacttccgccagcgccggctcgcgctcgaggatatggcaggtcttgccgccgggtgcgcagcaggcatccagcacgcgctgccccggcgcgagatcgagcagcccggcggccagttgtgcggcttcgtcctgcacgctgacccggccttcggcaaagccgggcaactggttgacgtcgcaggccgcagccagacggatcccatcctcgctgtgctcgcaggcaaaggcgtcgataccggcgctttgcagctcgccaaggtaggcgtcgcgctgggtctgacgatggttgactcgcagcatcatcggcggatgaacgttgttcgccgtgcagatcgcctgccaatgctcgggccagtgcgccttcagggtcttttgcagccagcgcgggtgggcgaagcggatcaccggatcgcgctccagctcggcgaacaacgcctcaccgtcacgctgggcgttgcgcagaacggcgttgagcaatcctttggcccatggctttcgcaacttttccgcgcagccgacggtttcgccgatggctgcatgcggcggaatacgggtgtagaacagctgatagagaccgaccagcagcaaggcttcgacatcgcgatcagcggccttgaacggcttctgcagcaggcgctcggcgaggccagccaggcgcggctgccagcgggccgcaccgaatgccaggtcctgggtcaggccgcgatcgcgggcgtcgaccttgcccaacacttcgggcaggctgccgttcagcgaggccttgccggacagcacggcgctgagcgcacgcgccgcggccaggcgcgggttcatcgacattattcgaacaccttgccaggcgtgaactgctcgcgccggctgttgtacaggtcgccgaaatgcagcggcttgccgttcggcagttgcagacggatgagccgcaacgagccctcgccgcacgcgacctgcagcccatccttgctggcctcgaggatctggccgggcgcgccctgccctgaatccaggcaagcggcatgaatcttcacgacggcgtcgtccagccggctatggcagatcggccagggatgaaaggcccgcaccagacgctccagctcaacggccgggcggcgccagtcgaggcgcgcctcgtccttgttcagcttgtgcgcataggtggcctggctgtcgtcctgcacctcgccgctgagcgtgcccgcctcgagcgcggcgacggcctggaccagcgcatccgaacccagcgcggcaaggcggtcatgcaggctgcctcccgtgtcatcagcggtgattggcgtgctgaccttgagcagcatcggtccggtatccaggccggcttccatctgcatcacggtcacgccggattcgctgtcgccggcctcgatggcgcgctggatcggcgccgctccccgccagcgtggcagcagcgacgcgtggctgttgacgcagcccaggcggggcagatcgagcacggcttgcggcaggatcaacccgtaggccaccaccaccatcaggtcggcgttcagctccgccagttcgctctgggccgcggcggcacgcagggtctgcggttgatagaccggaatgccgtgctgcacggcgagctgcttgaccgggctgggcatcagcttttgcccgcgcccggctggccgatccggctgggtgtagaccgccaccacctggcgcccggcgtcgagcagggtttgcagatgctgagcggcgaactccggtgttccggcaaaaacgatgcgcataggggactcgtcaatcaataaaaaaggcttgctgctgcaagcctttggggtcggtgatcaagcctgctgacggtgaagcttttccagcttcttcttgatccggtcgcgcttgagattggagaggtagtcgacgaaaagtttgccgttgaggtgatcgcattcgtgctggatgcacaccgcgagcaggccttcggcgatcagttcgtagggctggccgtcgcgatccagcgccttgaccttgaccttctgcgggcggtcgacgttctcgtagaaaccgggcaccgacaggcaaccttcctggtactgctccatctcgtcggtcaggaactcgaactcggggttgatgaaaacccgcggctcggacttgtcctcggacaggtccatgaccaccacgcgcttgtgcacattgacctgcgtcgcggccaggccgatgccgggggcgtcgtacatggtctcgaacatatcgtcgatcagttgacgaatgccgtcgtcgaccacttccaccggtttggcgatggtgcgcaggcgtggatcgggaaattctaggatgttcaggattgccatatgcgtttgtgatgcacttatggaataaagtcaaaagccgctgctaagatgccgggcagcttgtaaacggcttaacgccgctttccacaagggtttctgcggcgctagggcgctttacgtgaaggcacatcataaagggattcaccacatgaggaaatcactactcgccctgctgctggtggcggtaagcggcctggcgcacgccgctgtgacgctcaaggatggccatccagagcaatacaccgtggtgaaaggtgacacgctctgggacatttcggggcgctttctcaaggaaccctggaagtggccggagctgtggcacgccaacccccaggtggaaaacccgcacctgatctatcccggcgacagcctgagcctggtctatatcgacggccagccgcgcatcgtgctcaaccgtggcgcgtcgcgcgggaccatcaagctctcgcctaccattcgcaccacgcccatggccgaggcgatcagcaccatcccgctggaagccatcaacagcttcctgctgagtaaccgcatcgtcgacaacgtggccgaattcgaggctgcgccctacatcgtcgccggcaatgccgagcgcgtcatcagcggcgccggcgatcgcgtctacggccgcggcaacttccaggacgacatcaaggtttacggcatcttccggcagggcaagacctatgtggatcccgagacccaggagttcctgggcattaatgccgatgatgtgggcactgccgaactgctggacatggaaggcgacatcgccaccatgatgcttacccgggtcacccaggaagcacgccttggcgaccgtatgttccccagcgaagagcgtgcggtgaactccaccttcatgcccagcgagcctaaaggcgaagtcaacggcgtgatcctcgacgtcccgcgtggcgtcacccagatcggccagttcgacgtggtaaccctgaacaagggcgcgcgtgacgggctgagcgttggcaacgtgctggcggtgtacaagaccggcgaaaccgtacgcgatcgcgtgaccggcgagcgggtcaagatccccgatgagcgctcgggcctgctgatggtcttccgtacgtacgacaagctcagctatggcttggtcttgcaggctacgcgctcgctgtcggtgatggataaggtgcgtaatccctgagtttcccaagccccgccgacgcggggctttttttctgctgataccaccgcatggatgcggtgcgacgagacaaggatgctctcccatgcccgcgatttcccctgccgaactggaagcccgtctgcgcctgcatttgctgccggagctcggtccgcggcgtctgcataagctgctcagcgccttccccgatgcctcctccgcactcagtgcgccggcggccgcctggcgtgcgctggggctgccggccagctgtgccgaaccccgacgcagcccggcgatacgcgaacgcgccgccgccgcgctgagttggttggagcagcccggtcatcacgtgctgatgtgggacgcccccgattaccccgcgctgctggcggacctaccggatgcgccgccgctgctgttcgtcgaaggcgatcccagcctgctggagcggccacaactggccatggtcggcagtcgtcgagcctcgcgtccgggactggacaacgccacggcctttgcgcggagcctcgcgggcggcggtttcgtaatcaccagtggtctggccctcggcatcgatggcgcggcccaccagggagcattggacgtgggcggccaaacgatcgccgtgctgggtaccggtctgcaacggctctacccgcgccggcatatcggtctggccgggcgcatcgtcgacggtggcggcgcgctggtctcggaattgccgctggactgtgcgccgcacgcctccaattttcctcgccgcaaccgcatcatcagcgggctctcgctcggcgtgctggtggtcgaggccagtccctcgagtggttcgctgatcaccgcccggctggccgccgagcaaggccgcgaggtctatgccatccccggatcgatccatcaccccggtgcacgcggctgccaccaattgatccgtcagggcgcggcgctggtcgagagcgtcgacgacatcctccaggccctccggggttggcagcagacgaccgcgcatggccagccgcagtcgcagccggagcgaccggcacatgcactgctcgatcaactgattgccgggtcgatgaccagcgagaccctcgccggagcggtggcacaaccgctggcacaggtactggcggaactgaccgagctggaaatcgaggggctggtcgcctgtgaaaacggactctgggtcgcacggaccggctgagcgtggctgtgcggcggcatgcgcttgggtacactgcgccgatcagtctcagcgggggtgcgaatgatcggtaactggcgtgtgcagcaggcggcgcgggtggtcaggagtggtggcgtcatcgcctatccgaccgaagcggtctggggactgggttgcgacccttgggacagcgacgcggtgcaccgcttgctggcgttgaaggaacggccagtggagaagggcctgattctcgtggccgattgcatcgagcaattcgattttctgctggaagacctgcccgaacgttggctggaccgcctggcgggcacctggccaggcccgaacacctggctggtgccgcaccgtcagcggttgcctggctggatcaccggcaagcacgacagcgtggccctgcgggtcagcgatcatccgctggtagcgcggctctgtgcgctgaccgggccgctggtctccacctcggcgaaccccgccggccgcccttcggcgcgttcacgtttgcgtgtcgagcagtatttccccggccagctcgacgccgtgctcggcgggcgcctgggtggtcggcgcaatcccagcactatccgcgacctgcgaagcggcgaagtgataagggcgagctagtcggcagccggaggcgggaagccagaaggagacactggcgcgcaccaggcaactgctccttcagcttccagcgtcccactgcggctacggcagcaggatcgtcgacccggtggtctggcccgcagccagcgtccgctgcgcctcggccgcctcggccagcggatagcgctggccgatctcgaccttgatcttgccgctggcgatcatctcgaacagttcggcggccatcgcctgcaggcgctcggcggtatcggcatagccggcgagggtcggccgggtgacatacaacgaacccttctgcgccagcaccccgaggttcaccccggtgaccgcccctgaggcattaccgaaactgaccaacaggccgcgcggcgcgacgcaatccagcgatatttcccagctgctcttgcccaccgagtcatagaccaccgggcatttcttaccatcggtgagctccagcacacgctgcaccacgtcttcacgggtgcggtcgatggttgcccaggcgcccagcgctttggcccgctcggctttttccggcgagccgacgaccccgatgagtttcgcgccgatggccttggcccattggcaggcgatcgagccgacgccgccggccgcggcatggaacagcacggtttcgcccgcctgcaaggtgtgggtctgacgcaaaaggtactgcgtggtcaggcccttgagcatcaccgcggcggcctgctcgtagctgatggcgtccggcagcttcaccagatgccgcgccggcagtgtgtggtgttggccataggcgcccagtgggccggtgccataggcgacgcgatcgccaacctgcaaaccctcgacgccctcgccaaccgcctcgacttcccctgcgccttcggtgcccaggccggacggcaggctcggcggcacatagagcccgccgcggaaataggtatcgatgaaattcaggccgatggcgtggttacgtacccggacctcgccggcccccggcgccgtgacaggcacatccacctgctcgagaacctcgggaccaccgtgctggctgaactggatgcgctgcgacatatcgactcctgggcaaatgcaaaggagcctatccaacgcttcccggacgcgtccgtcaattggctgggtgatatgcttgccgacccttttgttgaaacacggccaggccagccaacgtggccgggccgtgcggttattgccaaggtgatttcgtgaacgagcgtaccgaagccgtcaaagcctacctgctcgacctgcaggaccgtatctgcgccgctcttgaagccgaagacggcggcgcccgcttcgtcgaagacgcctggacccgcccagccggtggtggtggccggacccgggtgatcgagaacggcgcgctgatcgaaaagggcggtgtgaacttctcgcatgtccatggcagcggtctgcccccttcggccagcgcgcaccgcccggagctggccggtcgtggcttcgaggcgctcggcgtgtcgctggtaatccacccggaaaacccctacgtgccaacctcccatgccaatgtgcggttcttcatcgccgaaaaggagggcgaggagccggtgtggtggttcggcggcggtttcgacctgacgccctattacggcaacgaggaagactgcatccactggcaccgcgtggcccgcgacgcctgtgcacccttcggcgcagacgtctacccgcgctacaaggaatggtgcgaccgctatttccacatcaagcaccgcaacgaaccgcgcggcgtcggcggtctgttcttcgacgacctcaacgagtgggacttcgataccagcttcgccttcatgcgtgccgtcggggatgcctatatcgaggcctacctgcctatcgtgcagaagcgcaaagccaccccgttcggcgagcgtgagcgggaattccaggagctgcgacgcggccgttacgtggaatacaacctggtctacgaccgcgggaccctgttcgggctgcagtccggcggacgcaccgaatcgatcctgatgtcgctgccgccgctggtgcgttggggctacgacaagcatcccgagcccggcagcccggaagcgcggctgaccgaatactttttgcaggaccgcgattggctggcccagcagccatgacccggcagccataaccgcgcgcccgataacgcccctgcttcagacgagaacatccatggatcgctacgccgtattcggcaaccccatcgcccacagcaagtctccgcagattcaccgcctgttcgccgaacagaccggccagtcgctcagctatgagccgctgttggcgccgctcgacgatttcgccgggtttgcccgtgggtttttcgagaccggactgggcgccaatgtcaccgtgccgttcaaagagcacgcctgtcgcctggccgatcagctgagcgaacgcgcgcgccgtgccggtgcggtcaacaccctgaagaagcgcgaagacggcacgctgctgggcgacaacaccgacggcgtgggcctggtgcgcgatctgctggataacgccggcgtggtgctgcaaggcaagcgtatcctgctgctgggcgccggcggtgcggtacgcggtgtgctcgagccgttgctggcgcagcggccagctgcgctggtcattgccaaccgcacgctgggcaaggctgaacagttggccggcgagttcgccgagctgggcccggtgagcgcgagcgccttcgagcagttgcaaggcccgttcgatgtgatcatcaacggcacctcggccagcctcggcggtgagctaccgccgcttgccgacggcctgatccgctcgggtgcaagcttctgctacgacatgatgtatggcgcagagccgacgcccttctgccagtgggcctccgaccttggtgcgcagacccgagatggcctcggcatgctggtcgagcaagccgcggcggccttcgagttgtggcgtggcgtgcggccggcctcggcacctgtgctggcgcagctgcgccagcaactggtcggctgaggggcgctcagacgcggaagtggatctgctggtgcagatgctgcggcgtttccaactcgtcgatcatgccggcggcgacgcggcgaagctgcacacggcggtcgtcgcccggcaaaccttcgagattggcaaagtcttcgatcgacaggtcttcgccgtcggtttcggcatccaccagggtccacttcaacggatgcgcggcgatccgctgcaacgcagcggcaaccgtcggctcctcgccatgggcgctgaagtcagccaccagcagcaggcgttcgacgtcgaccttcggcaagccggacaacagggcgtcgaccgcctggtagaaatcatgtggctgtgcggcctcggcgtcacccgaggcggtaggcaccgagcggctgtcgaacaggcagatcaccgcgtccatgccggcgacgctctgcgacacgctgatggcgtcgaacaggtcgcccgtcttggcgcgcagccccgggcgaacggtcatcgagttgaggtcgtcgaccagggccaccgcctcgtgctggcggctcagcagctcgcagagcaaggcgttgcccaggctggaatgcgccccgtacagggcgaacttgaggcgcggcgtctcggcgttgagcatggcgtcagcgacgggtgaccagatagccaatcagcgccacggcgccggccgccagcgccacggtgctcagcggatgctcgcgtacgcattccttggccatacggctggcgtcgcgaccccgcttggacaggtcacggcagtgtgaatcccagtcggcgtcgtgccacagcgattcggcgcgcgagcgcagcgaatcgaggcggtgacgcgatccttgggtcgcgtcgtgcttaaggtcgtcgagcgccgtcatcaggttgtggatttcgcgttcaatctcgtcgcgtgtggtgggtttgcggctgaagaagcgggacatggctggttctcccctctgaatgtgctggtttggaccccgtgaacggctgaaggtgcagccacacggcaagcggtctggtaggcagcggacccacaacagtcgcccggggttcccgtccgtcgggacgattggtccagcggcgcggcgccgccgatagcaaaggaggcgcccgtggcagggtctgcgcgggttacgggtcagcgaggccgtggatcttcttctacactcagacggcgttcgacacgcaagcgcccggcgggccgggtcggcccggggagacgagccgaacggcgcgatcaagccgctgcggcacaccgcgaaattaagctgcacggggccttatcttcggcctgggtttacctaataatgcgcgccgcgtccgtcggcttcggcgcttctttttcactgccaattcatcggtgttcattttgaaaattcgtcaaacgatccttggtctcctgtttgcctgcggcagcgtcgtcctgcccctctccgtcaccgctgccccggcgagctccgcgcaccaggagctggcctccggcagcgccctgctggtcgacctgaagaccaacgaggtgctgtattcgagcaaccccgacctggtggtaccgatcgcctcggtgaccaagctgatgaccgcgatggtcgcgctcgacgccaagctgccgctcgacgagcaattgccggtcaccattcgcgatgcgcgggagatgcagggcgtgttttcacgggtgcgcatcggcagcgaaatcagccggcgggagatgctcctgttggcgctgatgtcgtcggaaaaccgcgctgcggcaagcctcgcgcaccactatccgggcggttacagcgcattcatccaggccatgaacgccaaggccaaggcgctgggcatgacccacacgcgctatgtcgaacccaccgggctgtcggtgcagaacgtgtccagcgccaacgacctggtcaagctgctcaaggccagccaggcctatccgctgatcgagcagttcagcaccacccacgagaagaccgtcgccttccacaagcccaactacacgctgggctttcgcaacaccaacgcgctggtgcgcaagcctgactggaacattcaggtgaccaagaccggcttcaccaacgccgccggtcactgcctggtgatgcgcaccatgatgaacaagcgccccgtggcgttcgtggtgctcgatgccttcggcaagtacacgcacatggccgacgccagtcgcctgaagaagtggatggagaccggcaaggtgaccccggtcgccccggccgcgctggcctacaagcagcagaagatggccgagcggcgcctggccgctcgatccggcggcgcgacgacggtcatcgccggcgctcgctgaaacgccagagtccgctggcagcgccgtgcgcaggccgcacggcgcaaacccctgcggctcggccttcacgcagccaacggatacggccgccgccgctcttacgcgtatcgatacgcgcctcgatgcaacgatgccggtgcagctgactcaaacgactacattctccctcagcgcaacgggattcgaacgtcgttatgagcacgccagacaacacctacatcgagtggctggaaaaccagtccatgctaaacgccgcccgccagcgggcccggctctatgcaggccaggcgcggctctggcagcgtccctatgcccaggcgcggccacgcgatgccagtgccatcgcctcggtgtggttcaccgcctacccggccgccatcatcacgccagaaggcggctcggtgctgcaggcgctgggtgatgaccggctctggagtgcactctccgagctgggcgtgcagggcatccacaacggcccgatgaagcgctccggcgggctgcgcgggcgcgacttcacgccgaccatcgacggcaacttcgaccgcatcagcttcgacatcgaccccaacctcggcaccgaggccgagatgctgcagctcagccgcatggccgccgcgcacaatgcggtcgtcatcgacgacatcgtgccggcgcacaccggcaagggcgccgactttcggcttgccgagatggcctacggcgactatccgggcctctaccacatggtcgagatcaacgaggaagactggccgctgctgccggacgtgcccaaaggccgcgactcggtgaacctctcgccgatggtggtcgaccagctcaaggacaagcactacatcgtcggccagctgcaacgggtgatcttcttcgagcccggcatcaaggacaccgactggagcgccaccggcgtgatcaccggcgtcgacggcaagcgccggcgctgggtctatttgcattacttcaaggaaggccagccgtcactgaactggctggacccgacctttgccgcccagcaactgatcatcggcgacgccctgcatgccatcgatgtctccggcgcgcgggtgctgcgcctggacgccaacggcttcctcggcgtcgagcgccgcgccgagggtaccgcctggtccgaggggcatccgctgtcggtgaccggcaaccagctgatcgccagcaccatccgcaaggctggtggcttcagcttccaggagctgaacctgaccatcgacgacatcgccgcgatgtcccacggcggcgccgacctgtcctacgacttcatcacccgaccggcctatcaccacgccctgctcaccggcgataccgagttcctcaggctgatgctgcgcgaggtgcacgccttcggcatcgacccggcctcgctgatccacgccatgcagaaccacgacgagctgaccctcgagctggtgcacttctggaccctgcacgcctacgaccattaccactaccacggccagacgttgcccggcggcattctccgtgaacacattcgcgaggaaatgtacgagcggctgaccggcgagcacgcgccctacaacctcaagttcgtcaccaacggcgtgtcctgcaccacggtcagcgtgatcaccgcggcgctgggcattcgtgacctgaacgccatcggcccggccgagatcgaacagatccagcggctgcatatcctgctggtcatgttcaacgccatgcagcccggcgtattcgccctctccggctgggacctggtcggtgccctgccgctggaagccgagcaggtcgagcacctgatgggcgacggcgacacccgttggctgcaccgtggcgcctacgacctggccgacctggcgccggaagccgaagtctccagcgaaggcctgcccaaggcgcgctcgctctacggcagcctggtcgatcagctgcagaacgtcggctccttcgcctgccagctcaagcgcatcctcagcgtgcgccgcgcctacgacatcgccgccagcaagcagatcatgatccccgacgtgcagactccgggtctgctggtcatggttcatgaactgccggctggcaaaggcgtgcagatcaccgcgctcaacttcagcgctgagaccatcagcgagacgctcacgctgcccggcatcgcgcccggcccggtggtggacatcatccacgaaagcgtcgaaggcgatctgaccgagaacggcgaaatgaccttcaacctcgatccctacgaaggcctggccctgcgtgtggtgagcgccgcgtcgccggtgctgtgagcccgtcggacccgcgccggccttttcgggcttggcgcggcggcgacggcgcactaccgtgtggggcgattccccgaacgataatgcggccagcggcctcgcgccggctggccccgaacaggagcaactcatgactgcggaaaacatgcgccacatcgaacatcgcccaggcggcggcgccgagtgtctgcgagtggccgaggggccggtgcccgagccgggcccgcaggatgtgctggtgcgtgtcgcctacgccggcatcaaccgcccggacgtgttccagcgctccggcagctaccccccgcccccggatgcctcgccgctgctgggcctggagatcgccggcgagatcgtcgcgctgggtgccgaggtcagtggctgggcggtgggcgatcaggtctgcgcgctgacgcctggcggcggctacgccgagtattgcgtggcgcccgccgaacattgcctgccggtgccggccgggttgtccttgatcgaggccgccgccctgccggaaaactacttcaccgtctggagcaacgtcttcgaccgcggtcgcctgcaacgaggcgagaccttcctggtacacggcggctccagcggcatcggcctgaccgcgatccagctggccaagcagttcggtgcccgcgtgctgaccaccgtcggcaatgccgagaaggccgaggcctgccgccgtgcaggtgccgaccgggtgatccactaccacgaggaagatttcgtcgaggtggtcgccgagttcacagagggcaacggcgctgacgtcatcctcgacatggtcggtggcgactacattccacgcaacgtgaagtccctggccatcgaaggccggctggtgcagatcgcctttctcaagggcagccgggtcgaactggacacctcgccgatcatgcgcaagcgcctgaccttcaccggctcgacgctgcgcccgcgcagccgtgccgacaaggccgccatcgccgccgcgctgcgcgagcaggtctggccgttgctggagcagggtcgttgccatccggtgatccatgcgaccttcccgctggccgaggcggccgaagcgcaccggttgatggagagcagccagcacatcggcaagatcatgctcgatctcgcgccctaaaggcgccgcccgaaccaccgggaggtcgcgccttctgcaaatgcggcgatgcgtctgtgggagccccgaccgcggggcgaagctttgctttgagcgggcatagagaccgcatcggccgcgaggtcgcgcttacagcaaaattaacaaggcggcggccccgggacatttgcctggcgcgcggcgctggctatagtgcgcgccgggcggccgcaacggtcgccccgcccgtccctcgccatgagagccaccgtgcccacgcccacccgcctccgtgttctgcgcgccctcgtcgccgggctcgctgccctgcccgtcatcgccctggcgcaggccctgtgcagcgccgatcagcagccgctgtgcctgaatcgctgcacctgcctgcccgccccggttccgccagcgagcctgcagagcgaggcgctctaccagcgtctgcaagggttggcggcggccgggctggaggcctggattcgccagtcgcgcgaccagctggccctgcagccgagccagccggtgccgttgcaggtgcgctcgcaactggagccgtattacgacctggccgtgctggaaaccgcgcgctatcgcgtcggtgacgacaacgtcctgaccactgccggtgcgctgctgcgcaaccccgacatcgccgccgtcacgctgatcgacctgatcgtgttccgcaacgaggccgatgccgagcacaacgtcgccctctgggcccacgaactcaagcacgtcgagcaatatttgcagtggggcgtcggcgagttcgcccgacgctacacgcaggactaccagcaggtcgaacggcccggctacgccatggagctgcggatcgaacgcgagctgggccagcgtgccgcggggccgacggcgccctagcggctgctcatcgcgtcgccggtcgcgcaggcagggatcggctggtggccgctccggtccgcgtttctccgagtcctccggtcgggcttttgtcggctcgtcggccgatgctggaaccatccgccgcttccccgcctctgctctatacaggctgtcaccaacatcgaaccgagccgaagcggcgccgtcacgcgcccggctcgccagacgaggatcaagcacatgagcgacgaacagcgcatacgcgaccgggcctacgaaatctgggaagccaagggccgtcccgagggccaggaggccgaacactgggcccaggcccgcgacgaggtcgagttctacaaggagggcgacgccaccgccggcagcgtcgagagcagcgtcgccattcccatgcctgcgacggggtccaatgccgacacagagccggatcgcgacaactgatcgcgccgccaggcgcgccagcacttgcgctgctggcgcgctctggcagccatgcccgacaaccttccgaagctgatgctgcctcgagccgccccaattacaggctcctgacttcccgatgacgtacgcactcgactatcaggccatattcgaagccaatcccaacctgcacctgatcctggcgccggataaggatttcaccgttctggccgcgaacgacgcgaggctgcgcgccacctatacacgccgagagcagagcgtgggccgcccggttttcgaggtgtttcgcaagaatccggatgaccctgacgagttcggcaccagcgtgctgcgcgcctctctggaacgcgttctgcgcagccgcagccccgacgagatggccattacccgctacgacattccgcgtccggcctcggaaggcggcggcttcgaggtgcgctactggagcccggtcaacgtcccggtactcggcgccgacggcaacgtgcgctacatcatccaccaggtccaggacgtgaccgacgaggtgcagcagcctgatgcgggcatgctcagccacctcaacgagcgctttcgcgccgccctactggcctcgggcaccggcaccttcaactgggcgctgcgtgacggcagcctgcacttcgacagtgccttggaacagattttcggcctggcccatggcgtccgtgtcgccaacctcgagggcttcgtcgcccaggtccatctcgaggaccgagagcgggtgcgccaggcgtttgagcagtatgccgagggtgaggatttcgccatcgagttccgcctggcccgcgccggtaccggggacaaatggctggcctgcaaggccaaggccttctgcgatgccgagggcaccctcgcctacgtcgctggcgcctgcaccgacatcaccgcacgcaagcaggccgaagaatcgctgcgtatcagcgagaaccgcctgcgccagctcaatgaacagctcgaagcgcgggtggcgactgaagtgcgtgagcgcagccgtaccgaagacgccctgcgccaagcccagaaaatggaagccgtcggccagctcaccggcggcatcgcccacgatttcaataacctgctcaccggcatcgtcggcagcctggacctcatgcagcgccgccacgcccgcggcgagcaggacctggatcgctacatcaacgccgcggtcacctcggcccagcgtgccgcggcgctgacccaacggttgctggccttctcgcgccgacaaacccttcacctcaagccggtcgacgtcaaccagctggtggcgtccctggaagatctgctgcaccgcaccaccggcgaaaacatcacgctggagacccggctcagcgccggcctgctgcccgcctgcatggatgccaatcagctggaaagcgcggtgatcaatctggtcatcaacgcccgcgacgccatgccccacggcgggcgtatcaccgtgtcgaccgcctccttcgtcatgggcaaccggcccgatccggccaagcgcggcctgaccgagggcgaatacaccctgctcagcgtgaccgacaccggcacgggcatgacgccggaagtaatcgcgcgcgccttcgagcccttcttcaccaccaaacccatcggccagggcaccgggctcgggctttccatggtctatggcttcatcaagcaggccaagggctacgtacaggtcgaatccgagccgggccgtggcagccgtgtctgcctctacctgccggtccagcatggcgaagcggtcacgccggtccccgaaagcgagccggtgctcaacggcgcgggcgaaactatcctggtggtcgaggacgagccggtggtccgctccctcgtcgtcgaagtgctcaacgacctcggctaccagacaatcgaagccggcgacgccaccgaagccctgcccagcctcgaggatggccagcgcatcgacctgctcatcaccgacgtcggcctgcccggcatgaatggccggcaactggcagacgtcgcccgccagcaccgccccagcctcaaagtcctgttcgccaccggctacgccgaaagcgccacggcgaaggatttcctcggcaagggcatggccgtcatcaccaaacccttcgccatcgaagctttcgccagcaaggtccgcgaaatgctcggcccgcaggccggctgaaacccggcgccttgcgtttggagtagtcaggcgagtcgtaaccgggcacagccctgaaaagctgtggccgggacgggccagatacgtctggcaaacccgtcccttccctgcgcccctcccttgcggtgcgacacctggatgcgccggatgggacgcgattcacatgccgctggtccgctacttgctcgctaatagccatcagccactggctgggtaattacttcccagaaacagactattcacagagacaggtaggttctatgaaacgtgtaatgacatggatgctcgcgttttcactgccttgcgccgcaagcctgcaggcggccgagtccacgcaatgcgaggtggtgcggctggcagatgtcggctggaccgacatcaccatgaccacagcggtcacccgccttctgctcggcgaactgggttatcggacccaggtgtcgcggctgtcgctcccggaaacctacgccgcgctggcagatgaaaagatcgacgtattcctcggcaactggatgcccgcgcaggccgcgcttgcccagccgcatctggatgccgggcggatcgagaagctgcaaaccaacctgccggtcgtgcgctataccctggccgtgctggagcctgcctaccaggcagggctgcatgatttcgccgacatccagcgcttcaacaaagagctgggcgggaagatctacgggctcgagcgcggcaatggcggtaacaagatggtgcagagcatgatcgacggcaacgtgttcggcctgcagggcttcaccctggtggaatcgaacgagaacgaaatgctcaatcatgtcgagctggcccagcgtttgggcaaaccggcggtattcctgggctgggagccgcacccgatgaacgaacgccttcgcatggcctacctgtccggtggtgacgcttatttcggccccaacaacggcgcggcacaggtcaacaccgtcgcccgcggtggcttctcgaaagactgccagaacctgacgcggctatttaccaacatgaccttcaccatcgcgtcagtcagcggactgatggctgcggtacaagaacccaataccaatcgccgccgggtcgccaagcaatggatcgaagacaaccctgacaccgtcgccacctggctcaagggtgtcagccatcgtgagggcggagcggcgatagccggagtacgttcggctgcaaccaactaagcagagactggcggcaggccgtcgcgccgagacgctctatcaggcgcccggccgcatcaatgcggtggtcgccgtggttgcggaatagcctgttaccttttgtatccagcgggcatacacaggcagcatatcgcctcgctagcgctggtggagctggataaccggccgccagcgctagctgacattgcccacgcccgtcgtgattgctagacctcgcttgcagcaggtcggtggccagcgctcattgtcagcaccgattaagccgcccggcttcgacaccgtagtcgtcaatagcaagcaacagggccgtcgtcttgtccagcggtgcccacccagggcctgccgttgaactcagcgaaaccctttatcggataaccctgcaaaaactactgattaagcctttcgaaccctttacctggcacatcgccatcggtaacgtgccagagcgcgccaggatctgcgcgcgcaaacttcgccgctccggcttaagcccggcggccagcacaacgggcatccgcccacaccaaggacaggtagcgatggcccaatgcttcttcgaattattcccaggttgggacgcaagcaaaaacagcgtccccatcgccttcctcgaacgtccaggcccgccgtcgcgccttacccgaactgattgcccgcgaagccattggcgcggatacgccgtggtgcataaccagaaagacgggcgccactcagcgcacgacgaaaagaatgttatccaccacgcccgttcggggtgttatgcaccaattggtgtctaattatagttagccctacttaacacgtactaagaaggtggctatggataagaaaaaacaacatgatcttcatgatttcatgcggcagattagcgtagagatgtctgcagagtacgaccgtattcagaagcgagctactgaagatccagggactgcgggtgatcaaggcgaggagaactgggcagagcttctcagagattggctccctcgaagctacgaagtggttacaaaaggccgcatcatcagccaagaaggggatacaagtccgcagattgatgtgctggtattaaagggctcttatccgaaaaaaatgcttaataagaagctctatcttgcagcgggagtagctgctgcatttgagtgcaagacaaccctgaaggcgtcacatattgctgatgctatgagtacaagcgtgaaaattaaaagcttctttagggatcgttctggcacaccatatatggagctgcattcgccgatcatatatgggcttctggcccactcccattcatggaaaggggagagttctaccccggaagagaatatcggggaaaaactcattgagtcggattctacccatgtccaccatccgaggcaccagttagacatcctatgtgttgcagacttggcaacttggacctcgtcagcaatgacttacataggaccaagtcaaattcccgattggaaagaaatggcttcgacttacggccctgatggttctgcaacgagtgtctatgtagggcactcgtatacaagtgatcagcaagttgaccagttcaccccgattggggtcctcatatcgtatctttcacaaaaaatggcttgggaagactccacatttcgcgaccttgctgattactaccggatcaccaacatagctggctcaggtagtggatacatgagaaagtggcccgcttccatttactcggacgagatccgtgcgcgtgttgtagcagggagactctcgaacggaaaagcttgggacgaatggagtattcattttccatgagggctaacaagcggttagagtcgttcgcttcgctctctgggacgggcttagagcccgcccctcaaccaaacgttatacagcctctccagaattatggatatgccagatgaaaagagctctatttctattttttattatctcttgccaagtctcagcgagtcaggaaacactaagtattgagcccttagcaagggccaacataaactgcgcagcattctatacagccgcacaaataattgttaagccagaagccaagaaagagtatgaatcaaagatggctacgcattactcattatcacaccaacttactacatcatacgagttactggcggcaacgttgaactctgaaattcaaagacaagctactgaagttatgtctctcaaagatcgagagcgagtggtaaattacatatcaagcaactccatcaagtgcacaacaattgagatcaactctatcggagtaatgcggcagaattcagccaagcaacatatgagtcaagaataagagcaaactttaattgtggccatagtacgccgcatgacgattcgctcgatatcacagcgttataacaatcagttcaaatcgctcgcttcgctcactgggacaggctaaagcccgccccttaaccaaacgttagccatactttatgacagctcgcagattttcgtttagcaataaaaagcttcgtggcataccacgtcgtttacgcgcactcgcgcgctggaaaaagtcgttttcaggctattttccaagccagctaacaccagaggaaaagtactggaactacaaaatccctgtgtatcgaaatcttgttgagggcaagcaaactaccaagagcatacaagcattttgcgcacagcaacttatagatgccgcacaccagatatacaaagccaaaccccaagacgctgagcattctagagtcacatgcgttatttcacttccctgcatgttctcaagtgagctgtgtatttatacgaatgaagaatatttcaaagagcacacaaccgaacaaactggacgcttcgggaaaattgaaataatccaagggaaaagtcttgctcaagaatttgggctagaactaccggaggagtttaatgaaattggagttttgcgtactgacgaagatgatgatggaaatccatatatttctgagcaatggtattttggggaagtccatcagtacggctaacgagtggttcaaatcgttcgcttcgctcactgggacgggctaaagcccgccccttaaccaaacgttagagcgcttatgtgggaaatcgcgggtgataagcaactggcttcgtattttgagggcgcgaacatctggcgcacgcgctggaagaattcatctgaggtggtgagcgtaccgtcgcatgatggcagcgttgccgagctccagatatggtctgctgagattgggcaaaaagctaaattgttcgcggcctcagaggtgtcaaatggagtgtgggtgtttgctttgcccctgctctaacaagtggttcaagctgttcgcttcgctcactgggacgggctaaagcccgccccttagccaaacgttagaaaccacggagggatacatgccagagaacatcgaccaatttaacgactattgcgcaaagatcctctctcatctatacgacaaatttccttccccaacagcaatacagacccatatcctagtcggcggtgaaatagatgaatacgaacttaaggtatgcccaaaaactacctttggctctgacacggttcgctggctacgcaatgaaggttttattgtggcagagggcggaaattttgggacttaccatggttgttaccttacagccaaaggcctttcggcactaaatgccacccccgagtcactggctccaggtgaaacagtaattgcaaaactcaaaaaaggcttagccactggatcatcagaagtaaccaagagcgctataggtgcatttgttacatctgtcatgagtggtgttttataacaatgcgctcaaagcgctcacttcgttcgctgggaccggcgaagccggccccttagcttaagcgttaggcctcacagaaaggtcggagaaaataaaatgccattaccactcattccaatcatctccgcgcttgctgccggaggaactctggtaccgcatgccgctggaggaatgatagttacatccgcagctgggtatgtcgcggggacatatttgagcactgcagctatcggagggctgttggcagcagcctctactgtacttggcgctggcgctctgtatctgtccggcgctgcaagtagcattattggtagtgctggaatatttggaacaaccgtcggagcgtcgggcatcacaggcgcccttatgtcggtcggtattatttccgccacgcccatctgggtgccattcgcggttggtggcgccgccgccagtggtgctgctgggctgggttatggtggttacaaagttttcaaacttaaacagaaaatccaaaaaacagcagaaggccaagaagctcaattcacagaaaccgaggcgaagatgatcgaaaaaatcatcaaacgcttgggtaaaaagagtcagagtggcgaaacctaacaattggttcaagtcactcgctttgctcgttcgggacggctaaagccggccccttaaccaaacgttatagccaatgaaattgccgccaccatgacgatactgacaaaatttgatgcagcagagcgccagcttctgcaggccattcgcttgtttttcagagaggaagacgcaatttcaatacacacactatctgaagctgcatcacaaatctgtgtgacattggaaatgaaacaggcattaaaagcatgtttcgcgacagcgaccgaattcgcgaagacaaaaagaaagaatttttttcgtacctttttaaatcaagaaacttcttcaagcacgccgacaaagacaaagatgatactcacgagtttaaaaatgaatttaatgagttctcacttatcgactctgtaaatctgtacagtgcgctcaaaaaaaattggacacccgaaacacttgtgttcgacgtttggttctgccttcatcgccctaacctgttaatcccaaacaccgaatactcaaacctaatctccaaaattaaatcggatcgaatattcccttccaccaatgagaaagccaagttctacgaggttatcgagcagcttcgcagtggtaaaagcacagcgttaaacttaacccttgcgttcgggttataacaatgcgcttaactgccgctcactttgttcgctggacgcccaaaagctgcgcttttggccgcccgttagcttaatcgttatgcactcagggttcgagagagatgatagatagtacgaatctttacgaagtagttaaggaatttgagattcttcctggagcgatagaaaacgtttctacacaggcgtttcaagctgtgtacggctcccctgaggctgctctggccaagggtatcgtctatttattcctttcagctcagcccattccacggttgatcggagagagcagaattatctatgtcggccaaacgaaaggcagctttaaaagccgttacttccagtactcaagccttcatgcgtcttccaaagcaaataaactcaagttcgaagcaatcattaaagagtacggcccaataactatagcggtctgtccttttgagcggttcgggagttcccttttggaggctgaagggcagttgctatggtggtacttccagaatcactgcgagtatccgcccgtcaactacaccaagacgaaggtcaggaacgatgcggtacaagcataacaatcgtgtcaaaggcgacgctcgtacctcgcgcgctttacgcgggcattaacttttaaggaggctcaatgccagggatgccagcatttttgaggaaaaggggacagatttattttctctggtactgcagttgcacctagcgccgcgccccctttctctttaaacacgaggtcacatcgcatgagtcattccttctccatacccccgcgaaatttcgcaattgcacgcttagagccaaacgccgacctgccgagcgcggtattggcatcgccgggctttttgtccatcacccggacggcggatgaactgtcgatcgtctgcgctgaggacgtcgcggtcgggttcgctcgggtggatagggcttggcgcgcgatcaaggtgcaggggccgtttgcttttgatcaaacgggggtgctggcgtccttcttagacccgctcgcggtggctgccatcggtatttttgcggtgagcaccttcgataccgattacatcctggtcaagtcggctaatctcgaaggcgcggtggcggcgttgaagggcgcgggccaccgactcctggtctgatacagaaagctcaccaatcactatagggacatagcatggataaccaatacgctccgccatcagcgaagctggtaactaccgaaaatacctccggcatggggcgcgacgctgagattccggaaggcgtgaaggggtggagctggggcgcctttatgttcaattggatttgggcgttgagtaatcgcacgtggatagggctgtttgcactgtttccctatcttggttttctcatggcagtggcgcttggaatcaagggccgggagtgggcttggaggaataagaagtgggagagcgttgagcacttccaacgcgtgcaaaggcgatggtcactctggagtcttctcatcgttggcgttgcgatagtgggcatcctcgcggccattgctattcctgcctaccaggactacgtgcaacgtgcatcgggcggctgacagctgaaaagaggagggggcaggtctactttcttggcggtcgccatcttcaataaacggatctgttccgcttccgtcgtctttccatgcggccgcgttatgtctgctcccggcttggtgctgattgttcttcagagcgcgacgcccgcgatcagcgcgatattgctgcaaggccggcactccccgtacgtatctgcatgcgagccttaacgcacgcggccttgagttcgtcatggctcaccagctggcgcttacccagttcgcctgccgcgtgcagcgcttcgattgcctcaagcccacgggcgccacctccaggtttcgggccagccgaaagaaaaagcacagatttgtttaccaatcagtggctagcttcataacagcgtgtcacgttctacggcgtagcccttaatccaaccaggtcagcacccatgcagctaacgacactgctcgtcccaacctacacacatatgctcaaaacgctctcgggctggctgaagaaggcccacgcccagctaccggaagccgaggcgcaggcgctgttatcggcgcgcttggcgcccgatatgtatccgctgtccacgcaggttcgctttgcttgtgtgcaggcgcgagaggccgtgtgccgtctgagaggagagtcgctgccagctgccattaacgagctgttgaatgagggccgacaggctgtcaaacaccccggatcgcttgcagaggcttatgcccgtatcgatgagacggtcacgttactcgacggcctcgcagccgatgcgctggatgcgaaggcagacaagccaatcgcccacgaactgccaaacgggatgatttttgacctgagcgcggagcaatacgcccgtgactggacgctggcgcagttctatttccacgtcatgaccgcctattcgatattgcgtaatcaggggatcaatctcggcaaggccgattacgtggcgcacatgctgccttatctgcgtccggaatcgattccaaaggggtagccgggtagggtgggttgtagcccaccagagcggttcggccatggagggttggcgggctgaagcccagcctacggcgttgcctggggcgacgcgaaacggaaatggaagcagatttatttttttggccactccggccgcttatcgctctcaatcaaattgcacactgcggcacgacactccggcatcaatccagccatgttccgctcagcttcaacagcgttcttatggctcacccgttcggcacgaccttggaaggcgtattgctgaagaagatgttgcgccagtccgggcgccattgagggatgctcagggtaaagccctgggtgcgcttgtcgaagtcgatccaggtcacgcccagggtttggctgtcctcgcttggccgcatgtccactgagcgcgtggtaaagagtgggctgcgatataccttcgaccgatctgcacggtcgacgatgcgcaaatacgacaggcctccgccaggagctaacaggccctttaccggcacgctttcgatcaaatgcccaccttgcgggctgacttgcgaaaccgacggcggcgcgctcagcgcatcgctcaggctccagccaaagagcagggcgagcgcggcgagaaggctgcatacagcgagaatggctttgttcatgtcagcgtttcggcagggtgatggcgggcgtgccaggtggcaagggttcgcgtagcagatcggaatacacgcggaagtctccgcctcgtttgtatctggcccggtaatcggcgaaatgactgttcagcacaagcatgtagcgtttgcgctgctcgcagggctaaggttagattgtgcgacgactggctccgtgctcgacatgctgtggcctcaaccaacgaagatttcggtttgtggggcgaactcgacggacacggtttcggccgcgtagcctgccacacgtttggtcttgccgtcctcgtcggtaacgccttcgatgaccttgccggaggccgtcttcagcttgtaggggcggttggccaaaggcaggccggtatcgctatcgctgagcacgaaatgctcgtctaactggttgggtagcggcgctggcgcactgaaggacgccgggctcaccgacgagccgaccaggatattgccggagccagtcacgacgctgccgccatgcgtcgtggggctgccgaggaaggcaactggcttgccgttgaccaagatagtggcttcgccttctgatatcgcgccgccacagctactggcgtcaccgactcaggcagcaggtaggttattgaacaacacgtcgggctaaccaaccgctatcgggttggaaccgtggccggggatggggcaggagtgggtgtcggataagcgagcagcgggcttggccatacgagttcctttcgtatctgagtgaagggccaaaccctaacaagtctgggggcgttcatcgacttcgcgatcccaaggaatccgacctgttaacgtttttgctttacaagggctgtccggatcgcaccgctccagctgcagccgtctgccgtatcatgcgcagcccatttacgttcatcgatcccatgaccatcctcgaactcatcgcctccgccctcggcgtcctttccgtctggctcacggtgcggcagaacccgctgtgctggcccatcgggttggtgatggtgtcgctttatgggtggtttttcttcgaggtgcggttgtattcgcaggtgctgctcaacggcgtctttgccgccatgcaggtctatggctggtggcagtggacacggggctgcggcagcgaaggagggcggccagtagtgggcgcgacggcaatggagataggcgccgggatggtggtggcggcggttggtagcgtcgggctgggcctgatgatggcccataccgaggcggcttatcccgggccggatgcggcgctgaccgccttcagcctgctcgcgcaactgtggatggcgctcaagcgctggcagtgctgggtgttgtggatcgtggtcgacacgctctatgtcggcttcttcgtctttcaggactactggctcaccgcgggactgtatgggttgttcaccctgctggcggtgatggggttgcgcgaatggcgacaggcgaggctggaggtacaacaggcgtagtcgaccgccgatcatgcttccgctggtccaggctgggttggctgtcggcgaaatcgacgaggcgggaaacgctgcccggccgatggcgtccaaagatcgccatctggcggagcctttgcgtaggatgggatccccgcaggcgctccgtcgtatcgacagtcgaacgcatgcagccccatcttgaaacgtcccgaccgactcgattgccggatgcgccactgcctgatccaaccggctgtagcgttgcgcagccgcctccattcgccaaagcagacctcagctcatgttgttccgccgcttcgaaaacctcatcgacgtcttcaagcccagcccggacgtcgcgccaccggccggcatgctgcgcttctatgcgcattacctgaagcaggtctggccgctgatgaccgccgtgctggtggtcggcttctttgcggcggtgatcgaggtggcgctgttcagttttcttggccggttgatcgacatggctcaggcgacccgtgatgccgggacgttcttcgccgagcaccgcaacgaactgctgtggatggcgctggtggcgctggtcatccggcccttcgtgttcggcctgcacaacctgctgacgcatcaggcgatcaacccggggctgaccaacctgatccgctggcagaaccaccgctatgtgctcaagcagagcctgaacttcttccagaacgatttcgccgggcgcatcgcccagcgcgtgatgcagaccggcccgtcactgcgtgattcggccatgcaggtgatcgatgcgctctggcatgtggtggtctatgccggcagcgcgctgtatctgttcgccgccgccgacctgcggctgatcgtgccgttggcgctgtggatcgtcggctacagcgctgcgctctggtacttcgtgccgcgcattcgggcacgctcggccgctgcctccgcggcgcgctcgaaggtcatgggccgggtggtcgacggctacagcaacgtcgccacgctcaagctgttcgcccattcgcgggaggaggaaagctacgcccgtgaagccatgcaagagttgctcggcaagttccgcctgcagtcgcgcatcatcaccagcctggatttcctcatcacctgcatgaacggcctgctgattgtcggtaccggcgcgctggcgctgtggctgtggagcgaggcgctgatcagcaccggcgccatcgccctggcgctgggcctggtgatccgcatcaacaacatgtccgagtggatcatgtgggtggtcaacggcatcttcgaaaacgtcggcaccgtgcaggacggcatgcagaccatcgtccagccgcgccacgtactcgaccgcgaaggcgccaggccgctcaaggtggagcagggcggcgtgcgcttcgaggacgtgcatttccattacggcaaaaagggcggggtgatcagcgggctcagcatcgacatccgcccgggcgagaaaatcggcctggtcggaccgtccggcgcgggcaagtcgacgctggtcaacctgctgctgcggctgtatgacctggagagcgggcgcatcctcatcgatgggcagaacatcgccgaggtcagccaggaaagcctgcgcgccaacatcggcatggttacccaggacacctcgttgctgcaccgttcgatccgcgacaacctgcgctacggcaagccggacgccagcgatgacgagctctgggcggcagcgcgaaaggcgcgggcggacgacttcatcgccaccctcgacgacagccagggtgggcatggcttcgaggccaaggtcggcgagcggggcgtgaagctctccggtggccagcgccagcgcatcgccatcgcccgcgtactgctcaaggacgccccgattctggtgctcgacgaagccacctcggcgctggattcggaagtcgaagcggcgatacaggaaagcctcgacaccctgatggaaggcaagacggtgatcgccatcgctcaccggctgtcgaccatcgcgcgcatggatcgcctggtggtgatcgaccagggtcgggtcatcgagaccggcacccatgccgaactgatcgagcgcggcggcctttatgcgcgcctgtggcagcaccagacgggcggattcgtcggtgtcgattgaacgaccgctagggccgataacagggcttcattcatgaacagtgcaattgcccatgcggctcggtttcgtttcgtccttgcgaccgcgcgtcggcaggcaagcaggacgccccgttgaaggtgctggtgctcaccggcgccgaatcgaccggcaaaagctggttggccgcacgcttgcagcaacgcttcggcgggttggtggtcggcgagtacgtccggcatttcatcgacagcgaacagcgcgatacctgcctggccgacattcccgccatcgcccgtggccaactggcctgggaagacgccgcgcgccgccaacgaccggagctgctgatcctcgatacgcatctgctgagcaacatgctctggagccagacgctgttcggcaactgcccggcatggctggaggacgaactgctcacgcgccgttacgacctccatctgctgctctcgccggacggtgccgaatggcatgcggacggccagcgttgccaaccggacgccgccgagcgatgggcttttcacgaagcctgccgaagctggctccagcgtcatcggcagccgttcgtagaaattgctggagactgggcccgccgcgagcagcaggctgttgcagaggttcaggcgttgttgacgccatagatcgctcggcacgaaacgcgaacagataacagccggcgtgcggcgtacagcggtggaacggtgaggcgttatccgcccggcggtagggtggatgtcgctgttcacatccaccgctggcgccgacggtgagcggaattttcaagcccgcgatatccaccgggacgtgcgaagaatgcgatggatatcgcttcgctcaacgctatcccacggccggggtctactgttccaagcggcggtatggccgcctttcgataaggggacgcgcgtggacagtcgagggtttgtgtgggcgcatttcaagctcaatgccgagcagcgcctgcgggggttcaacttcttcgtggtgctggcgatcttcgccgacggcggtgtgctggccgctctggagcgcggcttctcgcccgggctgctgatgttgctgggggccttcacggttttgctggccatggtgttctggctcgtcgatgcgcgcagccgccagctgttgcaactgaccatcacggcgctcaaggaaatcgagtcggaatttccggtcagctaccagctgttcgccaacgatgcgcaggggcaaaaccccgtcatcagctataccttcgccattcgcgcgctgttgttggcgcagatgggcttcggctttggcgtgatcgcctacggcttctaccactggtgatggcgcaccgcggtttgctgcagcgttctcaccctttccatcctgttgcacggcgcgctggagcccgggcaggcgcgctgctagagtgccgccgcttgcccactatcggctgacaggaagtctgcccagccgccgcacaggatgctcccatgaaaaaactcgcagtcgccgttgccgtacccctggcccttatcggaaccgccactttctacaccggcacccaggtcgaatcgctcgctcgcgatgctgtcgaccaagccaacgtcaagctgcgcgagatgggcgttggcgccggtgcggaggtcagcctgaagctggttagcttcgaccgtggcctgctgtccagctcggcgcgctatcagatcgacgtcgaagtgcctgacgacgagggcagcagccagcagtattcgatcctgctgcaggatcacctggagcacggcccgttcccgctttcgcgcttggcccgtggccaactgatgccggtcgccgcccagagccatgcccagctcgagcggagccctctgaccaaaaagctgttcgacgccgcctcgggtgaaatcccgttggtgggcgacaccactatcggctatgacggccgccaatacggcgagctgcgttcggccgctttcaagctcgaagacgaggagggctcggttcgcttctcgtccagcacgatcaatttcgaagcggcgaaggacgccaccgcggtgcgcctggacggcgaactgccggaactcgacatgaacctgcagaacaacgccaccggccagccggtgcgcatcagtctgcgcggccttggcctgagcgtggacaatcacgaggatgccaatggcttcgcccagggaccgtcagccatcaccctcaagcgcatggagatccagaccggggaggcgcctgccgtgatcgtccagaacgcatcgttcgacgcggcgctggccgagggtgagcgtggcctcgacctgtcggccggctaccgtgtcggtcaggtggacgcccaaggccagaccttccacaaccttgcgctggtgttcggcctgcgcaatctcgaggccagcaaactcaaggcgttgatcgatcgctacaaggaagtgctcgacagcggccccacgccgcaggagtcgctcgccagcatgaccgctgcccagcagcaggaactgcaggcgctggggctgcagctgctcgagcacaagccgacattggccctcgatgagttcggtttcgagaccgcgcacggtgcggcgcgcctgtccgtcgtgctcgatctgcagagcccgagtgaagatgccttcacccccgatgcgatgatcaccagcatgctcgcatcgctcaaagccgaagccggtatcgacaaggcgctggtgcgtgacctggtcggcctcgtcgcgcagagccggcaggacggcgggcagcttgaccctgttgcgctgaagcaggagaccgacgccaccaccgacctcttcagcggcatggcgctggactcgggctggtcccgcctggaaggcgagcgcctggtcagctccctgcactacgccgacaaccgggtgaacttcaacggccgcgaaatgagcatgcaggagttcatcggctttgccttcggttcggcgcagggcgcgggtctgctcggtcagtaagcgcggacgggcatgagaaaggcgaccttcggatcgccttttttcattcagcttcgtcccaggttcaatcgacgcgctggattcgctcttcgatgctgccactgaacggctgcggcaatgcttcgatgtagtcgaccagcgcgttgatgaccgctggttggtggttggcgataggcgacgtgcggcttgctcttcttaacgtaccgaacagaggccgaacgctcatgggcagcaccggtccatgcgctgaggcggcttgagcgcatcggcaacatcgccttgcaacgcttttgctattgttgcggccacccgcgaggtcggaaacgcttcggcgaacatccgcactcaatacgctgggatggccgaaggcctgacctacaaccctataaggaaccacctttgctccgcagtgcagtgcgccgaccggctcgtatcattccgctcgcctttctcgccgcgaccctgctgggcacggtcctgttgtcgctgccggcggcaacggccgggccgggccatgcgccgccgctgacggcgttgtttactgccgtgtcggccgtttgcgtgacgggtctcatcgtgcaggacaccgcgacctactggtccttcttcggccagtgcgtgatcctggcgctgtttcaggtcggcggcctgggcatcatgagcggcgcgaccttgctcggcttgctggtcaagcgacgcctgcagctcagccgtcgtctcattgcgcagcacgaaacgcattctctgggcctcggtgacgtgacgggcatcctgcgcctgatcctcatggtcaccgtgggcgttgagatcgtcgtcacgggaatcctggcgatccaactgcatgtcgcttatggcgagccctggacgcaggcgctatggaatgggctgttccacgccgtctcggctttcaacaacgccggtttttcgacctactcggatagcctgatggggtttgcgacggacccgatcgtactggcgccgatcatgctcgcgctgatcatcggcggcctgggtttcccggtgctctacgagtttcggcgcgaccagcgcggcaagccgtggacgatccatacccgcattaccctctggggctcggcggtgctgctggtgggaggcaccgtggcgattctcggctacgaatggagcaacccgcacacgttgggcggcatgacgctgggcgacaaactgctgtcggggctctttcactcggcggtggcgcgaacggcggggttcaacagcctggacgtcgggcaattcgagacgcagacgctggccgtacactactttctgatgttcgtcggtggcggcagtgcgggcactgctggcggcatcaaggtgacgacctttttcctgctgttctttttcatctgggccgagatccgcggcaacgccgataccgtagcgttccgccgccgtatctcctacgaaacgcaacgtcaggcgctgaccgtactgtttctcggctcgctcaccgtggccatcggcaccatgctgttgctcagcgtgacgcacttcgaactcgaggacgtactgttcgaggccatctcggccttcgccacggtcggcctgtcgaccggcatcaccggggatctgccgccggccggccaattggtgattatcgcgctgatgttcatcggccgggtcggcaccatcaccctggcgacggccctcgcgctgcgcagcgtgaccaaacactatcgctacccggaggagcgccccattgttggctaatctgttaggcaagacattcgagaacgacagcgtcgccgtcatcggcctcgggcgcttcggttcggcagtggccgagtcgctgacatcgctgggtcatgaggtgctgggcatcgacaacgacagccagcgggtgcagcaatgggtggatcgtctgacccatgtcgcccaggcggatacgaccgatatccgcgccctgcagcaactcggcctggatcagtttccacacgtggtcgtgagtatcggcagcgatctggaggccagcgtactgaccgtgctcgcgctgcagcaactgggcgtagctgacatctgggccaaggcgctgagcaagcgccatgggcttattctggagcgtaccggcgcgcaccatgtcgtctatcccgagacatcgatgggcgagcgtgtggcacacctggtgaccggcaagatgttcgaattcatcgaattcgacgatggctttgcgatcgcctcggcgtgcgcaccgcgggcgatcctgggccagacactcgccgactccgaggtacacacgcgctacggggtgaccattatcggggtgaagcgcccgcgcgccgatttcatctacgccaagccggacacactgatccaccccggcgacatcctcatcgtcgccggtgagaccaagcgggtggaaaagtttgccgcggtaacggcctgacgcggccttgcggcgagatcgggtatcgcctggcaacaggcgacatgcgtagcctgatggatagcagatctggacgccaggttccgtcacaaacaggctctggggcacggtaggactgcgcatccttccgcctgacgactgcccgtccctccggctgaacgtcttcgtcccgtacccggtcgttatagataaccactgggaggttgacgatgacgatatccagcaatctgttttggggcgcgttggcgcttggtctggtaacgggcatgcgcagcacgctggcgccggccatgaccagccgtgcgctggccgcacgtgacgacatcgatgatgccgacgagcccgcgcgtacgctggcctcgcaccgtgcgcagcaggttctgttaccgatggcagcggcggaactgctgggcgacaagatgccctttgcgccggatcgcaccattgtcccgtcgatgatgttccgtgcgctgtcgggtggcgtgaccgcggcggcgctggcgagcatgcgccgtgagcccttgctgctgccggcactgatcggcgccaccgcagcgctggtgtcatcgaagatcgggctcggcctgcgcaagccttatcagccgcaaccgctgctcaacgcggcgctggggctggccgaggacggtctggcattgaccatcggcaatgccggcttgcggcgggcgctgggttagcggctcctacgggttgagtatgcgttcgccgcggggtcgcggctcccgctggctaggccctgtcggcggtgcggttctggctttggctttggctctgtgggaggccgccctcggggcgaagctttggcgcgcgcgcaggcctgcggcctgcattcgccgcggggttgcggctcccactggttgggtccccgcggcggtgttgtgttagcgaccctcagctgggccgctgaatcacgcagacgcgatcggtgcacatcccggcctcgcgcgtgccgacgccggaggctacttccttgccaagcgcatcggtgctgctgtcggcggcttcggcgccggtgacgttgttggtcgccagcgtacccgggtaatcggtgccggcgcgcttggcgctgctaccgacttcgtagcgaccggtgtcgacggtgccggtcctgtcgtggtcggtcgggtgcgcttcgtccgtcgggccggcaccggccgcgtggctgaatcggtcgccgctggacggggtttgcccggtcgtggcccgcgaggtggtggtggtcgtcccgctgaaatgcttgtccaggtgactgtcgccacccgtggcgccggcataagggctggtcggaccggcgtagccaggcgtcgcgctatcgccgccgcgctcgttgacgttcagggcgccgttgtattccagagcatcgcgtgccttgaccagctcgtcgtcatcgcgcgcatcgaccgcgatcaccgtggcgccccggcgaaccgcctcgggataggccgtggcatggtgacgatgcgcttcatgcggctggtggccgaacagggatttgaagaagtgggcgactttggactcgtgatgcgtggggtcgaccgtgccgtcggcggtggagtaaggctcatcgtagccatggatttccgcgctgtcggcgcccaccatatgaatctgctcgcgggcgatgcccctcgacatcaggtcgccgtaggtgcgactggcgtcggttggcgtcgcgaacgctgctaccagtgtgtgtctcatggttcacctcgcgttgtgtagacaactgggttatccgagcactgcccttggacacagagctgatgaccacggtcgctgtaaccatggcagctcagccgctcgtcaagaacagcgctcatgattattgggtctggcgggccggtcatagttcagaaaataagcggtagcagggcgcagcaggagcggagcattgccaacgtgcttctcgtgagcggctttcgcggtcaagaccgctcccacaggttccgctcccgctcgcacggatacggcgtcggtacgggaactgtgctttgtgagtgggctgcaagaagaagccgaggcagacccaagcggtcgtcgctgcgcggcttttcgtgggagcggtcttgaccgcgaatgaagtgccgcccggattacgggttcgttttcactcaaatgaagtgaggcccggactacgagtccgtttccactcaagcgttataaagctgcgaggatttctgctcagtccggcgtcgacgctcgcgcggcgtggccccaattcgcggtcaagaccgctcccacaggttccgctcccgctcctacaggtctggtgtcgtacagcttcggtacgggagctgtgctttgtgagagggctgcaagacgacgccgtggcagacacaagaggtcgtcgtcgctgggcttttcgtgggagcggtcttgaccgcgaatgaagtgcggcgcggatcacgagtccgttcttcactcaaccggcaacgggctgcgaggattcctacttggtcgaccgtagacatgttcgcggtcaagcccactcccacaacgctaacgccgtggcggcgaggccgctagcgcgcggcgtgcctcgttgggtgagcgtctgaggtcaatccaggtcagctgcgctgtggcgctcgggagcctgctccgattcgtcgccccaggtgcggttgaccttgcgcccgcggatcacggcggggcgttcggccacttccgcggcccagcgttggacgtgcttgtaatcctgcacggaaaggaattcaccagcctcgtacagctcgccacgggccagcacgccgtaccagggccagatggccatgtcggcgatggtgtaggcgtcgccggctatgtagcggttctcggccagttggcgatccagcacatcgagctggcgcttgacctccatcgcgtagcggttgatcgggtactcgtacttctctggcgcgtaggcatagaaatgcccgaaaccgccgccgaggaagggcgccgagcccatctgccagaacagccagttcagcgtttcggtgcgcgcgcgggtttcggtcggcaggaacgcgccgaatttttccgcgagatagaccagaatcgaaccggattcgaacacccgcagcggctcgccgtcgacgctatggtcggccagggctggaatcttggagttcgggttgatctcgacgaagccgctgccgaactggtcgccgtcgccgatcttgatcagccaggcgtcgtattccgcgccgctgtggcctagcgcgagcagctcttcgagcatgatcgagaccttcacgccgttgggcgtggccagagagtagagctgcagcggatgcttgccgaccggcagcgccttctcctcgcgcgcgccggcggtgggcgcgttgatgctggcgaacttgccgcctgagggtgcgtcgtgggtccagactttcggcggtacgtaaggggtatcaggcatggcaatctcctcgcgtgggttccgggatgtgcagggcatgctacgcgctcatgtggcgcggtcgaaatcgagccgattgatattggtcatcgataggtgatggtttgtttggccttgcaggcctggtggagcggcttgccgctggcgcaaggtaccgatgcagagcaaccggtcgagccgtgcaacattagccgtcagtctccgcggctgagcgataggcgcggcgtgattggcatacctgttcgtgatgggcatcggcccattgaaccaacgcctgcatgggcaccagaaacccccgacccagatcggtcagccggtattccacgcgagggggtacttcagcgtagatcgtccgttgtacgaacccatccatctccagccgcttgagcgtgcgtgaaagcatctgcttggagatatcgccgatctctcggctgagttcattgaagcgcagcgtgcgctgggccagtgattcgagcaccagaaagctccactgatcaccgatgcgatcaagcacatcgcggatcggacaagggtggtcgaaggcggcgttaacgccagcagcgtgctgcatatgacggtctccgttgtcgtggccaggtcactgcagcgtgaccaggtaccaccagcctaacttcttgtggagcgaggcggtgcaccgtagcatcggtctctccaaaggtctacaaaacatacctagtccaccaaacagatcatcggggctcgtcatgtctcatatcgcactgattggcgcttccggctcagccggctcgcgcatcctcaaagaactcaccgatcgtggccatagcgtcacggcgatcgcgcgccacccagaacgcatcgctgcgcttgccggtgtcacggcggtcaaaggcgacgcccaggatccggagggcctggcgtcggttctgcgtggccacgatgcagtcgtcagcgcggtcaactttacctcgtccgagccgcacaccctcatcgaggcggtacgcgcctctggcgtaaagcgctatctggtcgtcggcggtgccggtagcctggaagtcgcgccgggtcagcgcgttatcgacctgcctgatttccctgaggcctacaaagcagaagcctcccgcggcgcggccttcctcgagcagctcaagcaggaaacggagctggaatggacctttctatccccctcggccgagttcgttcccggcgagcggacgggccaattccgccttggcaaagacgcgctgctcagcaacgagcacggcagccgcatctctttcgaagactacgccgtggcgctggtcgatgagatcgagcgcccggcacgcgtccgccagcgctttaccgttggctactgaggaggatgggcatgcttcgcactgtcgtgatgacagcggtactgcttgctgccgcgtcgaccgcaaccttcgccagctctaccgcgcgggacctcaccgccgaagaagccaatcgggcgctggtcatcgagttctatgatcagttcttcaacaaccatcaggtcgaacaggccgcgcgcgtggtggctgatgactacaagcagcacaacccggacgtgccggacgggaaggcaccgttcgtgggctacttcaccggctacttcaaggacaacccgcaatcacgcgcccgtatcgtgagaagtgcgaccgatggcgatctggtctacctgcacgtgcactcgacgactggcccacaggacctcggtcaggcggtggtggacatcttccgggtcgagaacggcatcatcgtcgagcattgggatgtgatccaagaggtgcccgccaaggcggccaacgacaacacgatgttctaaatgccccgccgccgctcttgatcccagcacgcagcagtccgcgtgtctggagcgcttaggatcaagctcaccatggacgccagtgaccggctaatacaaaaaagccgctgcccggataaacgaggcagcggctttcggtgcggcgttctagaacatcaaccgcgtgcgctgcgcaccccggcactgatttcgcgacacagccccagcacaccctcgacggcctgttcggacgtttcggcgttggcgatctggtcgatcagggccgagcccaccaccacgccctcggccaggtgggcgatggccgcggcttgttccggtgtgcggatgccaaagccgatggcgacgggcagatcggtatggcgcttcaaccgcgccacggcttcttcgacgtgttccagggtggcggaaccggcaccggtcacgccggccaccgagacgtaatagacgaagcccgagctgccgttgagcacgaccggcaggcgcttgtcgtcggtggtcggggtggtcaggcgaatgaagtcgatgcccgcggcctgggccgggtcgcagaggtcttcgttatgttccggtggcagatcgaccacgatcaggccgtcgacgccggcgtccaccgcctcggcgaggaatcgctcgacgcccatcttgtggatggggttgaagtagcccatcagcaccagcggcgtggtctggttgtcctggcggaattcgcgaaccatctgcagcgtcttggccaggtcctgcttggcggccagggcgcggatgttggccagctggatcgccgggccgtcggccatcgggtcggtgaagggcatgcccagttcgatcacgtcggcaccggcggccggcaggcccttgagaatctgcagcgaggtggcgtagtccggatcgccggcggtgatgaaggtcaccagtgcggcgcggttctgttgtttcagctcgtcgaagcgcgtctgcaggcggctcatatatgttcttcctgttcgtcgtagtggtgcatgacggtctgcatgtccttgtcgccgcggccggagaggttgaccaccatcaggtgatccttcggcagggtcggcgcgcgtttgaagacttcggccagcgcgtgggcgctctccagggccgggatgatgccttccaggcggcagcacttgtggaaggcggcgagcgcttccttgtcggtgatcgaggtgtactcgacgcggccgatgtcgtgcaaccaggcgtgctcggggccgatgccggggtagtcgaggccggcggaaatagagtgggcgtcgatgatctgaccgtcttcgttctgcagcaggaaggtgcggttgccgtgcagcacgccgggtacgccgccgttgaggctggccgcgtgctggccggtctcgatgccgtggccggcggcctcgacaccgatgatggcgacgctctggtcatcgaggaacggatggaacaagcccatggcgttggagccgccgccgatgcaggcgaccagcgagtcgggcaggcgaccttcctgggcttgcagctggtcgcgggtttccttgccgatgacggcctggaagtcgcggaccatggccgggtaggggtgcgggccggcgacggtgccgatcaggtagaaggtgttatggacgttggtcacccagtcgcgcagggcttcgttcatcgcgtccttcagggtgccggtgccggcggtcaccgggatgacttcggcgcccagcagcttcatgcggaagacgttggcctgctggcggtcgatgtcggtggtgcccatgtagatcacgcactgcatgccgaagcgcgcggccacggtggcggtggccacgccgtgcatgccggcgccggtctcggcgatgatgcgctgcttgcccatgcgcttggccaagaggatctggccgatgcagttgttgatcttgtgcgcgccggtgtgattgagctcctcgcgcttcaagtagattttcgcgccgccacagaactcggtcaggcgttcggcgaaataaagcggggagggacggccgacgtagtcgcgctggaagtaggcgagctccttggcgaattcagggtcctgcttggctttttcgtattcggcggccagctcgtggatgagcggcatcagggtttcggcgacgtactggccgccaaagtggccgaacaggcccttggcgtcagggccgttgcgcaatgaggtcatgtcgggctccagttgaggttcaaagcggcagcatgtttggtgggagtggccttggccacgaatgtttccaacgatcttcgcggtcaagaccgctcccacagtggccagatggcacgtctgcaatgggcgcaggttacggctgctaacgctcctggaaaagcgataagattgccgcaacctgtcaggaattatcacagatgagccaggaccttcctccgctgaacgccttgcgcgccttcgaagcggcggcccgcttgcagagcgtgagccaagcggcgatcgaactcagcgttacccacggtgctgtcagccggcagattcgcctgctggaagaacacctcggcgtggcgctgttcagcaaggaaggccgtggcgtaaaactcactgatgcgggcgtgcggctgcgcgatgcggcgggcgatgccttcgagcggctgcggggaacctgtgccgaactgcgccagcagaccgccgatgcgccgttcgtgctcggctgccccggcagcctgctggcgcgttggttcattccgcggctcgaccggcttaaccgcgaattgccggacctgcatttgcagctatcggccagcgaaggtgagctggacccgcgccgcgccgggctggatgccacgctctggtttgccgagccgccttggccggcagacatgcaggtccatgaactggccgtcgagcgcatcggaccggtgctgagcccgcatcatccgcgcttcgccacgctgagtcaggcgcggccggaagagttgcttggtgaaccactgctgtataccgcttcacgtccgcaagcctggccggcctgggcgttgggcaacggcctcgacccggcccgcctggagatggggcagggcttcgagcacctgtactttctgttggaggcagccctggcgggactcggtgtcgccattgcgccccagcagctggtcgccgacgacctgcgtcaggggcgccttctagcgccctggggattcgtcgagacgcgcgcgcggctggcactgtgggttccggcgcggcgcgctgatcgacgtgccgcgatgctggcggactggttgcgtcggcagctggtttgacgggtgctgagcatcacaatcaggctgtcgccagccgttcaaatggcgctatcgagcgataggctgaagcgaggccccgcccagccgcgctggcgtgcaagccgcaacggtaaacgcggacgaccttcagccatcagatgagtctggcggcctgatgcgtacatcgcccgcgccattgcttttgccgaccaatggcgcgtcgtttcgtccggcgccgctaaaacgctaccgaccttgccgatacattcgccgataccccgttcggggaatgcctggcgatggcgccggctatctgcagtcgttcaaggagaacagtgatggtcatgagtcggcgtgccggtctttttctgtttgcgttgctggctaccggcgcggagcaggtcgcggcaaaacccaaccccacggtggaggcttcgctcaaggcgggcagacctttcgtccagggcgaggtgctggtgcagttcaagtccggcgtatcggacctggcgacgggggccgcgctgaccaaacagggcgccaaggccgcacaaaaactgctcgacaaggcggcccgcaaagacgccaagggtgacctggtccgcgccaagctgggcaaggggcagaaggtcaacgctgcactgattgcccggctcgctgaggatccatcggtggagttcgtcgaacccaactggatctaccgcacccaggtcaccaaccccaacgatccaggcctcggcatgctctggggcttgcagggcgcgaccacctcgccggcccagccctacggcagcggcgcgctggcggcctggaacgccggcgccttgtgttccaaaaaggtgtatgtggggatcgtcgacgagggcgtgatggcgacccatggcgacctgcgcgccaacgtgtggatcaacccgggcgagggcagccgggccgatcgcctggacaacgacggcaacggcctggtcgacgacattctcggctgggacttcgccgccaacgacgccagcatcttcgatgggccggccgacgatcacggcacccacgtggccggaaccattgcggcggtggcgaacaacgctgccggcgtgttcggcgtctgcccaacggccaagtacatcaccgccaagtttctcggcgtcaatggcggcaccacggtggatgcggtgaaggccatcaactacctgacgcaactgaagctcgcgaagaagatcaacctggtcgccaccaataactcctggggtggcggtgggtattcgcaggcgctgtatgacgccatccgcgcagccggcaatgccaacatcctgttcattgccgcggccggcaacgacgggctcaacctcgataccacgcccagctatccggccagctacaacctgcccaacgtgatcgcggtggcggccatcgatcaaaacggccaacgtgcggatttctccaactacggcgtcaacagcgtgcatatcgccgcgcccggtgtcgatatcctctcgacggtgccgaccgcgactcgcactgcgggttacgcctacatgagcgggacctccatggcgacgcctcatgtgaccggtgcggcggcgctctacgcctcgttgaatccctgcgccaccagcgcgcagatccgcgaggcgctgctgcgactggcggtgcgtgatccgcagctcaccggtgtggtgcagcagaatcgtcggctggacctgtcgaagatccgagcagagctgacctgcaccgcgccctagcacggcgcagcgctggcctgcttagctggccagcgcggtctcggccgttttgccggctttggccggagtcgtttctgccgcgtacccctgcgggttgcggctctgccagcgccaggcgtcagtgagcatcgtcagcaggtccttttccgcctcccagcccagctcttcgcgggccttggtcgggtccgaccagcactgggcgatgtcgcccgggcggcgcgctcggaacatatgcggcagcggccgaccgatgacttcctcgaatgcggtgatcatctggcgtaccgagtagccacggccggtaccgaggttccacgtggaaacaccgtgaacccgctcgagccgctccagcgccttgaggtgccccttggccaggtcgactacatggatgtaatcgcgcacccccgtgccatccggcgtcgggtagtccgctccgtatacgttcaactggggccgacgccccacggcgacttgcagcatgtagggcagcaggttgttggggatgccgttggggtcttcaccgatcaggccggactcatgagcgccgatcgggttgaagtagcgcagcagggcgatcgaccagcgcgggtcggactcggccagccccttgagcacgttctcggccatcagcttggactggccatagggattcgtcggcaaaccggtcgggcagttctcggtgatcggcatccgcggggaatcgccatagacggtcgccgacgagctgaacaccagcttgaagatgccggcctcggccatcgcctggcacagcgcgatgctgccgctgacattggtctcgtaatagcgcagtggctcgcgcacgctttcgccgacggccttgagcccggcgaagtgcagcaccgcagttaccggataggaggcgaagagcgcattgagcagcgagcgattgcgcacgtcgcccttgatgaactgggcctggcggccggcgagggattcgacccgatccaacgcgatcttggaactgttacaaagattgtccagcaccaatacttcgtggcccgccaggagcagctccagcacggcgtgcgacccgatgtaacccgctccaccagttaccagaatcatgtgtatacctcgcataccgaatttattcgacgcgcacggggatacgcggctggccgtatgagcgcggccgctgcatgcatctccagggttgggttcggcaaaaaacgggcggtgctgctgcgcagtcacgcgggccgatgccggggtaaatcaggcgtcctgaaatagggacgggggaagctgcgagcaagttccaacgaagcgacgggcaaccgatgaccgaccgcaaacggcggcaacagggaaccttggctcgtgcgccgtcgtccatagccggcaggcagcgcttgcgtgctggcatttttctgctaccgagcgccacccggttttgctttgcgcgggctgcgcaggctgatgcgatgcggcagaacggaactctgaagggcatcgccacccattacgaggtttccatgagctgggccggtccctaccaatacgaaattggcaaatcccccgacaaacaagcgacgccaccggaagtcatcttcgatgaacaggtgccgaccttgctgtgcctctcccacctgcgctggagcttcgtttaccaacgcccgcagcatctgatgtcgcgattcgcgcgcgatttcaacgtgctgtttttcgaagagccgatccccaccgaggacgcccagccatggctggaagtgcggcccgaggaagatggcgttcaggtattgattccgcgcctgccgcagggctgcgagggcgagacggcattgcgcatccagcgcgatctgctcgacggctacctggacaagctcggcgtcaaggagctgatgctctggtactacacgccaatggcgctgggttatgccggacacttgaagcccaagctcaccgtttacgactgcatggacgaactctccgcgtttcgcggcgcgccgccggagctggtgcagcgcgagcgcgaactgctcgagcgcgccgacctggtcttcaccggcggctacagcatttgggaagccaagcgcgagctgcatgacaacgccttcgcctttcccagcagcgtcgacgtggcgcacttcgccgaggcgcggcggacccaggccgaccccaatgaccaggccgagatcccgcatccgcgcctgggcttctatggcgtgatcgacgagcgcttcgatatcgagctggtggcccgtgttgccgagcagcgtccggactggcaattcgtgctggttggcccggtggtgaagatcgaccccgccgacctgccgcagcgcgacaacatccactatctgggcagcaagacctacgacgagttgccccgctacctgtccggctgggaagtggcgatcatgcccttcgcgatgaacgagtcgacgcgtttcatcagccccaccaagacgccagagtacctcgccggtggctgcccggtggtatccacgccgatcaaggacgtggtgcgcacctatggcgataccgagatcgtgtacatcgccgacagtccccaggcgttcatcgaggcggtggacaaggccctggccgatggcgaggaccgcgaccgtttgttgaagaccgctgacgagattctcggcgacatgtcctgggaccacacctgggcgctgatgaaggagaagatgcaatgcgcgatgtaagcctgcgagacagcaaccccgactacgcgggcggcggcgccagcgttggcccgtccagcggtcggcggggcttcgactacctgatcgtcggtgccggtttcgccggcagcgtactggccgagcgcctggccgccggcctgaacaagcgcgtgctggtggtcgaccggcgtccgcacatcggcggcaacgcctacgatcattacgacgaagccggcgtgctgatccaccgctacgggccgcacatctttcacaccaatgcccagcgcatcgtcgattacctgtcgcgcttcaccgaatggcggccctacgagcatcgcgtgctggcgcaggtggacggccagcaagtgccgatcccgatcaacatgaccacgctgaacaagctctacggcctgaacatgaccaccgagcaggaagcggcggatttcctcgccggccgcgccgagccggtggcggacatccagaccagtgaagacgtggtcatcaacggcatcggccgcgagctgtatcagaagttcttccgcggctacacccgcaagcagtggggactggacccctcgcagctggacaagtcggtcacctcgcgcatcccaacgcgcaccaacaccgacgaccgctacttcaccgacaccttccagcagatgcccaagtacgggtacaccaagatgttcgagaagatgctggcgcacccgaacatcaaggtcatgatcaacaccgactaccgtgagattcgcgacgagattcagcatgaccacctgatcttctgcgggccgatcgacgagtacttcgagtaccgcttcggcaagctgccgtaccgctcattgaagttcgagcacaagcagctcgatcaggagcagttccaggcggtcggcacggtcaactaccccagcgaatgcgtgccctatacgcgcatcagcgagtacaagcacctcaccgggcaagtgcacccgaagaccagcatcacctacgaatacccctcggccgagggcgacccctattacccgatcccgcgcccggaaaacgccgagctgtacaagcgctaccagaagctggcggacgagacgccgggcgtcaccttcgtcggccgcctcggcacctacaagtactacaacatggatcaggtggtggggcaggcgctggcgctgtacaagcgcatcgaggaggccgagcgcggcccggcgccgggcgaaagcggccgaacacagccaatcgctggctgaacaagccccctgaggcgagacctgaagatgcatcagccctcgttgttcaagagtttcttcatgggcgggttcgaatgctcgaaccaccgccgcagcgacggccggcggctcgatctgctggccgccaccggacacgaccgctgggccgcgcacgattacgcggtgctgcatcggcatgggctgcacagcgtgcgcgacggtctgcgctggcatctgatcgagcaggcgccgggccggtacgactggtcgagcttcctgccgatgctgcaggcggcgcagcgccagggcacccaggtgatctgggacctgtgccactacggttggccggacgacatcgacatctggcgcccgcagttcgtcgagcgcttcgcccgttacgcggcggcggcggcgcagctggtcagggacgaaaccgataccgtgcccttctatgcgccgctcaatgaaatctcgttctgggcctgggccggcggtgacgaggcgtatttcaacccgatggcgcgcggtcgcggtttcgagctcaagcatcaattggtgcgcgccaccatcgccgcgatgcaggcgattcgcgaggtcgagccgcgggcgcgcttcgtccaggtcgacccggccatacatgtggtttcgcccaacgaccggccggggccgcagcgcgacgccgaacgttttcgccaggcgcagttcgaggcctgggacatgctctgcggcgaggcctggcccggcctcggcggcgcgccggaatacctcgacgtgctaggcgtcaactactactccgacaaccagtggtaccacggtgatggccgcactatcgagcgcgacaatccggactatcgccccttcaagggcatcctcacggagatctggcagcgctacaaacgcccgttgctgattgccgaaaccggcgctgaaggcgacgtgcgtggcgactggctgcgctacgtcagcgagcaggccgggttggccatgcagcgtggggtgccggtcgagggcatctgcctgtatccggtgctggactatcccggctggaccgacgaccggcactgcccggtaggcttgttgggtttcccggatgaaaacggcaatcgccgcgtgcatgagggcctcgccgacgaattgcgcctgcaacagcagcgattcaatcagctcaacagccacttgccgctcgccgaagcgctgacatgaacgctccggcccaggcgcccaaggcgaaaccgcacatggtgccgttgccgagccggccggtggctttcctttggcattacatctgcgcacggccctggcacttcggcggcctgctggcgctgatcgtcggcgccgccggctgcgccgtggcggtgcagtacgggatgaagctgctggtggactccatggcgcaaggcggcgcggaccgcgccggtgccaacgtctggtttccgttggggttgtttatcggattgatcgtcatcgagaacgtcttctggcgtttgggcggctggctgggttgccgcacggtggtggccagcgtggtggatatacgcgtcgacctgttcaaacacctgaccgggcatccgatgcgctatttcaccgagcatttcgccggctcgctgggcaatcgcatttcggcactgggtcaggctgccggggcgatctatggcggcctggcgtggaagatcgtgccgcccatcgtcgacttcatcggtgccgtggtggtactgctcaccgtcgatgtgcgcatggccgtggcgctgatcctgttcgttgccatcgttgccgcgctgatcaccggcttcggcattcgcggccgcgccaagcatcagcgcttcgccgcgcagtcggcgcgggtcggcggcgagctggtggatgcggtgtccaacgtctggaccatcaaggccttctccgcgcgcgaccgcgaggccgaacggctggcccaggaaatcggctacgaagcgcgcgcccaacgccgcagctggatgtacctggaaaaggcgcgggtgatgcacgatatctgcctgtcggtgatggccggcggcatgctgatctgggcgatcaacctgtggatcgccggctcggtaaccgccggcgacgtggtgctggtcagcgcgctgacgttccgcatcctgcatggctcgcgcgacctggccctggcactggtggacgccacgcagcagatcggcgccatcgacgacaccctgcgcatcatcgtccagccacacggcctggaggacagcgacacgcaactgttgctcgccgagggcgacatcaccttcgacgatgtcggcttcggctatccggggcgtggcgccgttttcaacaagctcgacctgcacatcccggccgggcagaaggttggcgtggtgggttcgtccggggccggcaagtcgaccctgatcaacctgatccagcgcctggatgacgtgcagagcggacgcatcctgatcgacggccaggacatccgcagcgtcagtcaggacagcctgcgcgaaaagattgccgtggtaccgcaggaaaccgcgctattcaaccgcagcatccgcgagaacatccgctacggccgccccgatgcgaccgacgaggaggtagttgaggccgcgcgcaatgccttctgcgatggctttatccgcgagctgccgcagggctacgacaccctggtcggcgagcgcggggtgatgctttccggtggccagcgccagcggctgggcatcgcccgggcgttcctgaaaaacgcgccgatcctgatcctcgacgaggccacctcggcactggacacccagtccgaagccgaaatccaggtcgcgctcaacgacctggtgcacaaccgcaccgtggtggcggtggcgcatcggctgtcgaccctgtcgagtttcgaccggatcatcgtgctgcgtgacggccgcatcgtcgaggacggcccgccgcacgagctgcgtagccgtggcggcgagttcgacgccctgtggcgcatgcaggccgaaggcttcaagcagcgccccgatccggccccatgaaacggatcgcggtgacctcgcgcagcctgcgcgcgctgggctacgaccccgacgaccaggtgctggaggtggaatttcacaacggctcggtctaccgctacgagcaggtcccggccgaggtggtgcaggcgctgctggaggccgattcgatgggccgttatttcaatcaggtgttcaagccgcagcactaccgctaccagcgcatcggataacccgcccgcgtgtgtttaaaagctcgcggtcgagaccgctcctacagaagcccagcccggcgccgtccctcaccgtgggagcggtcttgaccgcgaatgccggctgcaagccggcctcatgaaacgtggcaccgggtggtccgccgggcagcttgtgtcagtgtggttttgaaagctcgcggtcgagaccgctcctacaaagcccagtccgccgcgattgcttcccgtaggagcggtcttgaccgcgattgccggctgcaagccggcctcatgaaacgtggcaccggatgggttcaccggacagcttgtcggtgtggttttaaaagctcacggtcgagatcgttcccacgaaagcccagcccggcgccatcgttcactgtgggagcggtcttggccgcgattgccggctgcaagccggcttcatgaagcgtggcaccggctgggaccggacagcttgtgtcggtgtggttttaaaagctcgcggtcgagaccgctcctacaaaggcgcagcccgccgccatcgttcaccgtgggagcggtcttgaccgcgattgtcggctgcaagccggcctcatgaaacgtggtaccggatgggttcactggacagcttgtcggtgtgaatttaaaagctcgcggtcgagaccgctcctacaaaagcgcagcccggcgccgtcgttcaccgtgggggcggtcttgaccgcgattgccggctgcaagccggcctcatgaaacgtggcaccgggtggttcgccgggcagcttgtgtcggtgtggttttaaaagctcgcggtcgagaccgctcctacaaaagcccagcccgccgcatagttcaccgtgggagcggtcttgaccgcgattgccggctgcaagccggcctcatgaaaggtggcaccggatgggttcaccggacagcttgtcggtgtggttttgaaagctcgcggtcgagaccgctcctacagaagcccagcccggcgccgtcgctcaccgtgggagcggtcttgaccgcgattgccggctgcaagccggcctcatgaaaggtggcactggctgggtccgccgggcagcttgtgtcggtgtggttttgaaagctcgcggtcaagaccgctcctacaaaagcccagcccgccgcatagctcaccgtgggagcggtcttgaccgcgaatgctggcgcaagccggcgctcttgcacagggcagtctgctcctgtctgtcgcccgtgcctgattgagcgtctcgctgaacttccgacccgctgtatgggcctcagttagacaggacgcgtcactaccgagcggaggctccctcagatcgctaaaggggatatctaatgtcggatcaccacacctacaagaagattgaaatcgtcggctcttcgcgcactagcgtggacgaggcgattcagaacggaatcgccgaagctagccggacactgcgcaacgtcgaatggttcgaagtcggcgaaatccgcggccatgtcgaaaatggcaaggtcggtcattatcaggtcaccatgaaggtcggcttccgtctcgccgagagctgatcgacgccattggccgcgtagccggtggttcactcgcctggcgctgcgccgtcaaggcggggaggtcggtgtctgaccgcggctacgctcgtaatagcgcagcagcggttgtgtgctgaggccgtggaacaggatgctcagcgccaccaccggaatcaccagccggatgacctgctcggcctcttccggtagcaggccgtgggtcaccgcatagctcaggtagtagaggctgccgatgccgcgaatgccgaaccagccgacggtcatcagctgggcgcgatccaggtagcgtcggggcatcagcagccatacgctcaacggccggatcagtacgaacagcgccagcgccaggggcactgcgcgccagtcccagtgcaccgacaccagcacgccgagcatggtgaccagcaatacctcgaggctgcgttccagctgtccgccaaacgtcaggatgtcgcccatcattacccccgcagccaccttgggttcggcgatgcggtcgctctccagcggcaactcacggggcgtcatgccgccttcgaccacatgcggaaccgcatgggcgatcagctcttcggatggcgtctcggatcgcctggccaccgagacctcggcgcgccgcaggccgagcccggcggcgaacaccgcgagaaagccccaggcgccgatcagctcggcgccgacataggccagcgcgatcagggccagcgccagcgagtcgttgggtgacatcgaggtatcggcgtggcggctgcgtaaaaaaatcgccagcttgccgatcagcttgcccagcaggtagccgaacagcagccccgccggaacggcccagaccagcctatgcaacgcccaatcgccgacccagcccagcgccaagttgtcctgctcgatcagcaacaggccgaacaccacgaagggaaaggccgtgccgtcattgaaccccgcttcgccggacaggccatagcgcacgtgatcgctgtcgcgcgagttgttgacctgcaccaggctggccagcaccggatcggtaggcgccaggatcgcgccggtcagcaccgccagcccccagttcagccccaacaggtagtggcagaacagcgcgacgcctgcgatacaggccagcatcaccgggccggccaggacgtaggtgctgcgccacgccggatggcccagcggcatgcgcagtttcaggccgctgacgaacagcgagaccagcaccaccacttcggtgaggtgctccatccagccggcgatcagcaggaagtccatctcccacaggccgatgccgagctttccgatcagcagtccgaagccgagatagatcagtgaggtggtgaccggcagccagcgcagataggccgatgccagggcgaggatcaacagcaggatgccaagcacggccatccattcgagaaaattcatgcagtcttccgcaacaagcgtgacgcgctgaaatgcgcatggctgatgattcgatagggatgctgcgacggggttcagccgcgttcgtcgagcgggagcaggtaggggcggtgcgttttctgtaggagacccgacccggggcgaagctgttagggcttggcaggcctgcgtcctgcgtcgccgcggggcgcgcctcccacaatgggggcggcatgcactgcttttttgtgagagccccgccctcggggcgaagcttttcgggcaccgggctggcgtcattcggcgcgagggcgcacctcccacaatgagggggcgtacgctgttttttgtgggaggcccgacccggggcgaagcttttcgggcaccgggctggggccattcgccgcgagggcgcgcctcccgcaatgggggcggcgtgcactgcttttttttgtgggagccccgccctcggggcgaagcttttggggcaccgggctggggccattcggcgcgagggcgcgcctcacacaatgggggcggcgcgcactgcttttttgtgggaggcccgacccggggcgaagctgttagggcttggcgggcctgtggcccgcatccgctgcgggcttgcttcctactgaaagcggctcagcgcagcccggcgagaatctcgaaggcgtggtggcggtcggcggtttcgtagaaatcgcaggtgaagatcagctcgtcggcctgggtctgctccagaaggatctccagccgcgcgcggattttctccggcccgccgatcagtgccatgccgaggaagttgccgacggcgtcctgttcgtgcggcagccatttgccctgcatgctcggcaccggtggcaccagcaccaggctctggccgcggatcagcgcgaggatgcgctggtaagccgtggtcgccaggtattcggcctgttcgtcggtgtcggcggtcatcagcggcacgccgagcatcacgtagggcttgtccagtacctccgaagggcggaagttctcgcggtacaggcgaatcgcctcatgcacgtaacgcggtgcgaaatgcgaggcgaaggcgtaaggcaggcccttggccgcggccagctgagcgctgaacaggctggagccgagcagccagatcggcacgttgctgccgactccgggcatggcgatcacccgctgattgggctgacgcggaccgagcagccgctgcaattcctcgacatcggccggaaagtcatcggcactgcccatgcggtcgcggcgcagcgcgtgggcggtgaactgatctgcccccggcgcgcggccgagacccagctcgatgcgcccgggatagagcgcgtccagcgtgccgaactgctcggcaatcaccagcggcgcatggttgggcagcatcaccccgccggcgcccaggcgaatccgcgaggtgccggcggccagatagccgatcagcaccgaggtggcggcgctggcgatgccatccatgttgtggtgttcggcaacccagaagcgctcgaagccgagtttttcgacatgctgggccagtgccagggaattgcgcagggcgaggccggcatcaccgtcatcgcgaactggcgccaggtcgagggtggaaaagcgggtgtgttcgatacgggacatcgtctacctctatgctgacggggagtcgcagcgcgactcaatagcagtgttcggcttcggcgcgcgccaggacgttgcgttgttcgtcgtacagccagccctgcggggtgaaacccagcgagcgcgcctggaacaggtagcgtcggccgggctggaaatcgtcatagcggatgaccatggtacagcgcaggtattgggtttcgccgaactcgcccagtccgccactgctgatttcgaattcatagcgcgcttcgagttcatgcgcgccgggaccgacctggaaatagcgaccgtcgggggtgcgtttgtcgtccagccgatcggacatgaagatatcgctgggttgggcgctcaggtccacccaggccatgtcggcttggggggcaggcagcgggccggcgcaggcggtcaggccgagcaccaggaacatcgggaatgtcgggcgcatgatgaatcctccggggcgcatccgcgcgtgcggtcgcgctaggcattgagcctgagccagatgcggctctatttcaacgactgcgccgcggcacaacggttcaccagaggttcagcgcgtggcgatgcccccgcagccgcgctcggtggccttggccagcagctggtcgtgctggtcgtagagccgcgcccaggggcggaagccgtaaccgccggcgaccaggcggtagcgcgcgcctgcatcgaagctgtcgtattccagggtcaggcggcagtcgcgttcgagggcttcgctgtcgcggccgacgtcggctgcgcccacttcgaagcggtagcgcatgccgagctgatggctgccgggcgtgacctggaaatagcgatggtcatccaggggccgctggtccactgccacggccttcagggtggtttcatcgcgtggggccagctcgatccaggcctggttcgggtccggctggggcatccacagggcgcagccgccgaaggtggacagtgcgagagcaaggaacaggattcgcatggattgttctccgaccgctggctggacggtctggctgcaagagcgcgttgccattgatgattgggtaggcttcgccgtcgttgtacgctcagcgcaccgacccgttgggtcatgcatgcgggtaagcgatttgttggtgtcgaagctgaaaaccgcccttgtcgacaagcacagccggctctgggttccgctgctgcttgccgttggtctgaatggttgcagcacctactacggtcagttggcggtcggtcagctggagctgctgcgccagcgcgaacccatcgcggcgatcatcgacagcgcgcaaaccgagccacgggtgcgccaacgcctggcccgcgcgctgcaagccagacgcttcgccagtgccgctttgggattgccggataacggcagctataaggtctatgccgatatccagcggccctacgtggtgtggaacctgttcgccaccgaagcgtattccgtggcaccgctgaagcactgttttccgatcgccggttgtgtggcctatcgcgggtattaccagccgggacgtgcacggggtgaggaggcgcggctccagaccaagggctacgacaccctggtgaccggcgtgcaggcctactcgacccttggctggttcgacgatccgctgctcagctcgatgctgcgttggggcgatgagcggctggccgggctgatctttcacgagctggcgcatcagcgcctgtatgtgcctggcgacacggccttcaacgagtcctatgcatccttcgtcgagcgcgaggggctgcgccagtggcgcgacagccagggcctgccgccgcccgaccagatcgggcagcgacgctatgccgagttcagccagctgatgctcgatacccgcgaacggctggccgagctgtacgcctccgatctcagcgaatcggccatgcgggccgccaagacggccgagttcatgcgcctgcgccaggcctatcgccatttgcgcgacgatcgctggaagggcgacggccgcttcgatcgctggatggcccggccgctgaacaatgcgagcctggtgcccttcggcctctacgaccgctgggtgccggcgttcgctgcgctgttcgagcaggtcgatggggattggcagcgtttccatgcgcgagtcgagtccctgggacgcatgcctgccgacgagcgggcgcaggtgctcgaagcgcttcgctaaggatccggccgcttcgttcaaagccaatcgtggcgaggcgttgcagcaattctcggactgttcgatggcgtcctgatcgcagaggttggctgcaccgctcatcgtcttcctgcgttttcgagccaaacgccatggaattgttttccctctgctcccgtccattttttagaccgtcagcccagctgacccgtgattcggccgtacaccccaagtacgcctacctaaaaaaagccgtgacaacggaggctccatgaacaacctatccggcatcctcgacaacaaaggcacgccgctcgaaaaacagacgttcacctggaaggagatggcgggcaagccgatcagcaagctcgacgacgacgcctttacccgcgtacggatcatcctgatgaacgggatcgaaaccgacgccctgcgcctcaagcacggcatcgcccgcatcaccggccagctgcgcggcccgctcgccgagatccgtcgcgtcgagcagcaccaggcgaccatggtcaactggctgatctccgccgaccattcccctctggaaacgactgtcgcttacgagcaggtcgccatcgaggtcaccgccgccgtcgcccagaccgagcccgacccctaccaggcgcagacctatcgctatggcctgctggaggatttcgatcacctgtatcgctactcggcgatgctcgaccgcctcgaaggcaaggatgccaacaacatcctgcagggctacaccgacatcgtgccgggccggcagacctccgagcatcatcgccatccggacaacgacctgcgcgaaagctacgagaaagagcaggccgcactgatcaccaagatccacgcggcgatgatcaccgcagccgagtttcagacccacgactactacatgaacatcggcccgctgttcgccgatccgctggcccgtcagctgtacgccgaaatcgcctcggtcgaagagcagcacgtgacccagtacggctcgctggccgacccgcaggaatccttcatggagaagtggctggtgcacgaggcgatggaagtctatgcctacgccagctgcgccgagcaggaaaccaacccgcgcatcaaggccatgtgggagcgcttcctcgattacgaattgggccatctgaccgtcgcctgcgagcatttcaagaacatcgaacgccgtgatccggcggagatactcggcggtccgctgccgaaaatgatcgagttcaagagccagcgggaattcgtccgtcaggtgctggcggcggaggtcaacctgcgctccagcggcacccagtacgtcgacaagagcgaggagccgcaaaactccctcgactaccgcgcccagctcaactccgaaggcatcgcgtcgaacatcgtatcggccggttaccaatgggcgccgggcggcgaactcatgaagatgcgcaaggtttcttgaggagaacaggacatggcaaattcagcaaagctgggcaccaacttcactggcgtacagatgtcgccgaaggacaccaaaagcctgctcgaggcggtcaacgatatccatccggatgtaccgggcgactccaaaggcatgatgctggagcgcacggcccgtgccgaagaagccgatcgtatcggttcggtaccggtgcccggctccgccaaagggatgctcaaatcgaccttcgacatggcgctgggcaagagccctgaactgctggtcgacaagctcggcgagcggttggcattcgagcgcagcggcgtacgcatgtacgacgccatgatcgccaaggcaaaggccaacagcatggctgattccgatttgatcggcgtgctgcagcacatccgcgacgaagagttcgagcacatgaacatggtcgccgaagccatcgagaccctgggcgccgacccgaccgcgcagaccccttgcgccgacatcgtcggggtcaagtcgctcggcgtgatgcaggtgctcaccgatccgcgaaccaacatcgcccaaggcatcaacgccttgttgaccctcgaactcgaggacaatgccgcctgggaactgttgatcgaactggccgaagccggtggccatccccggatcgccaagggcttccacaaagccaaggaacaggaagatgaccacctcatcaagatcaagacgctgctgcgtcgcgatctgattgcgcagatcaaatagatacgcgtgtgcttcatccttttacgcgccttcgggcgcgtttttttttgggcgatatctggcgggggctgcggtggtttgcaggccgaatgcagaagctcgcggtcaaggccgctcccacgggtccgggcggcgcggctgttttttgtgggagcggtctcgaccgcgatgttcctcagccaagatgccgatcagcctctggcggcggtgcagaacctgcggggccgggcacggcgggcctgaagcaaaagctcgcggtcaagaccgctcccacggtccgggtggcgcggctgttttttgtgggagcggtctcgaccgcggtgttcttggccgaaatgccgatgggcctttggcggcggtgcagaacctgcggggccgggctctgcgggcctgaatcaaaagctcgcggtcaagaccgctcccacgggtccgggtggcgcggttgcttttgtaggagcggtctcgaccgcaatgtttctaggccgaaatgttgatcagcttttttgcggtggtgcagaacctgcggagccgggctctgcgggcctcaatcaaaagctcgcggtcaagaccgctcccacgggtccgggcggcgcggctgttttttgtgggagcggtctcgaccgcgagctcttcaaagccagatggcatcccacaagggatagtcgcccaatcgggccaccaatccggccctgagcggattggcaaccacataacgggcgaccgcctgcacatcttcctcctgacgcaacgcccggtcgtgataacccgcttgccagaggggacccgagctactacgccgacggttgatgtcccgcgcgctgttggtttttacccggcgcatcagctcatcgagcgagctgtcgcccagctcgatcagccagtggaagtgatcaggcattagcacccaggccaatgactgtacccagccgtccagctgtgccgacttgagttcggcgactacaagtctgccgattgcgaagtctctgaacacggggtggcggtcggatgtggctgtggtgagcagatagaggttgccacgctgcgagtggcgtcccctgcgtaagcggttcgactggtacatggcaatcctttgccgagcttggaataggtgccggctagctgaccaaactgcgtccttcgcggtcaagaccgctcccacgggtccgggtggcgcggctgtttttttgtgggagcggtctcgaccgcgaaaaggcttcaggaagcgtcgtggttgaagatagcgtgaggacttttgacaggtaggtcggcccgactgagcagtaaagctcgcggtcaagaccgctcccacgggtccgggtggcggggctgttttttcgtgggagcggtctcgaccgcgaaaaggcttcaggaagcgccgtggttgaagattcgcgtgaggatttttgacaggcaggtcggcccgactgagcagcaaaaactcgcggtcaagaccgctcccacaggttggtggcgcggctgctttttgtgggagcggtcttgaccgcgaatgggtgcgcacggccgcctcgttcaacgcgccactgcgatggccgttgcgggcttgaagaacaaggtttcgccgcgtatcaggtcggtcaggctgtggtgatcatgggcgacttccgcttcgatgggctgcggctgaccggcgactctgagagtcacgcgggtgacggcgccaagcggacggatgtcacgcacttcagccggttggagatcggccgcggcgccacgtgacagatggatctcgtgcgggcggaaaaggatctgctgcccgccgacctgcaactggttggcgtcgcccaggaagtgatagacgaaatcgctggccggttgacggtagacctcggccggcgagccgatctgttcgatcacgcccttgttcatcaccacgatgcgatcggccacttccatcgcttcttcctgatcgtgggtgacgaataccgaggtcaggtgcacctcttcgtgcagccgtgccagccagcggcgcagttccttgcgcaccttggcgtccagcgcgccgaagggttcatcgagcagcagcaccttgggttccaccgccagtgcacgggccagggcgatgcgttgccgttggccgccggaaagctggtcgggatagcgctcggcaagccagtcgagctggaccagctcgagcaattcatgaaccttctgcttgatccggctttcagtgggccgctcgcgccgcggcttcatccgcaggccgaaggcaacgttgtcgaacaccgtcatgtggcggaacagcgcgtagtgctggaacacgaagccgacgttgcgatcgcgtacatcacgcccggaaacgtcctcgccatgaaacacgatgcgcccagtattcggcgtttccagcccggcgatgatgcgcagcagggtggtcttgccgcagccggaggggccgagcagggcgaccagctcgccgctggtgatgttcaggttgatgtcgttcagggctttgaactggtcgaactgcttgctgacgtggctcacttcgatggacatgattcactcctcgccggcggcggctttgaggcgttgaaggcgggactcgctccactgcttgagcagcaggatcagcagcgccagcagcaacaacaggctggccacgctgaaggcggcgacgtggttgtattcgttgtagagaatctcgacatgcagcggcagggtgttggtgtagccgcggatatgcccggaaaccaccgacaccgcaccgaactcgcccatcgctcgcgcggtgcagagcaccacgccgtagatcaggccccagcggatgttgggcagggtcacgtgccagaacatctgccagccgttggcgccgagcagccgcgccgcttcttcctcctgcgtgccctgttcctgcattagcgggatcagctcgcgggcgacgaagggcacggtgacgaacaccgtggccagaacgatgccgggcaaggcgaagatgatctggatgtcgcgctcgcccagccattcgccaaaaaagccctgggcgccgaacagcagcacgtaaatcaggccagcgatcaccggcgagaccgagaagggcaggtcgatcagcgtcaccagcaggcttttgccggtgaattcgtatttgctgacgcaccaggccgcggccacgccgaagaccaggttgagtggcacggaaatgccgactgctagcagggtcagtttcagcgcggcgagggcatcggcctcgaagatcgcgccgaagaaggtgccgaggccgagcttcaacgcctcacccagcaccaccagcaacggcagcagcaggaacagcgtgaacgtcagccagccggcgaggatcagcagtcgccgcgccagcggattgccttggcgtgtcttgccggccagcgggacggtaacggaggtggtcgtcatctcagccatgggtaattctccgttgcagcaggttgatcgccagcagcagcacgaaggacaccagcagcatcagcacgccgatggccgtggcgccgtggtagtcgtactggtcgagcttgaccatgatcagcagtggcaggatctcggttttcatcggcatgttgccggcgatgaatatcaccgagccgtattcgccgacaccgcgggcgaaggccagggaaaaccccgtcagccaggccggcagcagcgccggtagcagcacgtggtgggcgatctgcaacggtttggcacccaggcaagcggccgcttcctccacttcgcgggggatgtcggccaataccggctgcagggtgcggactacgaagggcagggtgacgaacgtcagcgccaaggtaatgcccagcggggtgtaggcgatcttcaggcccagttcggccgccagtcggccgatcattccgttcggtgcgtacaaggcggtcagggcgatgcccgccacggcggtgggcaaggcgaagggcaggtcgatcatcgcttcgatgatcttgcggccggcaaagcggtagcgcaccagcacccaggccagtagcgaaccgatcacgccgttgatcagcgcggcgacgaaggcggtgccgaagctcagcttcagcgccgcgaccacgcgcggcgccgtgatgatcgcccagaactcggcccagctcagctgcgctgcatggacgaacagggcacccagtgggatcagcaccaacaggctgaggtacaccagggtgtaacccagcgtcagcccgaagccgggtatgacgggggaggtacgggtcatggaaacctcgatagaaacaggcgggaggctggaaagctggaggctggaccaagagcttgggattcgctgctcgtccagcccttggcctccagcctcaagcggctttaatgcgcttggtagatctggtcgaaaatgccaccatcattgaagaacttaggctgcgcgctcttccagccgccgaagtcgtcgtcgatggtcaccagcttcagcgccggaaattgctcggcgaactcggcggccaccgcctggttgcgggggcgatagaagtgcttggcggcaatgcgctggccctcgtcgctgtagaggtagttcaggtaggcctcggcgacttcacgggtgcctttgcgctccacgttcttgtcgacgaccgccaccgggggctcggcgagaatcgatagcgaaggcgcgacgatttccagggcatcgccgccttcttccttgagcgccaggaaggcttcgttttcccaggccagcaagacgtcaccaatctggttgttgacgaaggtgatggtcgagccacgcgcgccggtatccagcaccggaacctgcttgtagagctgagcaacgtattccttggctttctcctcgctgccgtactcctgctgggcccaggcccaggcggccaggaagttccaacgtgcgccgccggaggtcttcgggttcggggtgatcacttccacgccgggtttgatcaggtcgccccagtccttgatgcccttggggttgcccttgcggacgaggaagacgatggtcgaggtgtagggtgtgctggcgtccggcagacggctctgccagtcggccgggatcagtttgccgatccggtgcagctcgtcgatgtcgccggccaaggccagcgtcaccacgtcggcgcgcaggccgtcgatgaccgcgcgggcctgcttgcccgagcccccatgggattgctgaatgcgcagcggctcatggccttgcgcctgccagtgcttgttgaaggcggcattgaaatcgacgtagagctcgcgtgtcggatcgtaagacacgttgagcaattcgccggcggcaaaagcctgaccgacgacaagggtgctggccagaacggccagaatggattttctgatagacatggaggctccttctcgcatccgtgcggacgcgttgcgtgctgcttatgagttctgggtagggcggtggcgtcagctacgcattcggcagcgacagcggtgcagcagaagggcggtctgggttggcgtgtacatgtttgggctttcctggcgtaggttcatgtcacgccctccggttgtccggtcggggtggggtttgggtcaggcctgcttgccggatggctgcagacgaaatttctctttgcgctcgatctgcacgacctggccgttatgcagggtgatctccaccgagccgaacttgaggtcctgcaacgcgctgcggatctcgcgcaggatgcctgcgtcgtcctgagcgtctagcgtacgagacgtgttagtcattcttgtttcctctgcaggtgctgccacacaggggcgcgacggctcgaaccggggtgaggcgatcatagggggcgcgtgttattcattaaaataatgtttaagaacatttatatgctttttaggcctaagcgaattaaacacttatctcgtgcttgctcgtttaaaaaagaataagcacagaatttcttattcttttgtggtcgaacacgtcttggctagcctgatcccctcttgaggcattgccggagcggcagctatgaccagcgagaccattcactacctcatcgtgccgggctggcagggttcgcctgagcagcattggcagagccattggcaacgtacgttgcccaacaccacgcgcgtcgagcagcgtgactggctgatgccgcagcgtcaggcatgggttgctgaactcgagcgcagcgttgcaatggtggcgggaccggtggtgttgatcgcccatagcctgggctgcgccactgtggctcactgggctgccagcgcatcacctgagcagttatcgcgcgtacgcggcgccttgctggtggcaccggcggatgtggagcgtcgcggctgccccgagccgttgcgcaactttgcaccgctacccgtcgcgcccctgccgttccccagtctgctgctgggttcggacaacgatgcggcggccagcccgcagcgagcggccacgcttggccggcagtggggtagtcaggtcaccatccttcaaggtgcggggcatatcaacgtgaagtccgggcactaccagtgggaacaggggtttgcatttctgtaccgtctgcaagcgctgatcgagcaacaggcccggcggcgtgcctgacggctcgaagcgtcggcgcgcctggcgaggctctgaatgatctccggtggtgttcccgatgcctcgttgctgaccttcgctgatgccgagcgcagcccactgagcatccgtgccaaggcgctggtgttcttcgatccgcgatcgcgtcggttgcgtgacgaaatcgagcagttggcggtccagcggcaacccttgttgatcgtgggtgaaaccggaaccggcaaggagctgctcgcccgccacgcccatgactgcagcgaacgggaagggttgttcgttccggtgagttgcagcgcgatcagcaccatccgaggcgatgtcgaactgttcggctacacggccggaacagcgcgcgcgagcgccgcgagccgtgctggctggtttggctcggccaacggcggcacgctatatctggatgaaatctgcgacttgccgctaggcctgcagggtgcgctgctaagtgccatggaaacgggcgaagtgctgcgtgccggcgcgcgtcaaccgacacccgtggacgtaaggctgatcgcggccaccagcgtcgatctccatttggcgacagaggccggcaagttcgatgcggggctgtatcgctacttgcgcgatggtcgagtcgagctaccgccgttgcgcgagcgggtgggcgatatcctgccgatggccgaatatttccttggcgttcatgcccagcgcttggggctagcgccgccgcagatcagtgtcatcgcgcagcggttgctggagcactacgcctggccaggcaatacccgtgagctggagaacgccattcatttcgccctgctgatcagccgcggcaagaccctgctgcccactcatttcaatctgcccgaacccttggctcacctggaatcggagctgttccgactgaagtctgctttggaccgaacgcagctgctcgccctgcagcgtctgctacagcgcgtcgatgcggaactcgctttggcgttgcgctagttcatcgagccctgccccgaccgttatgaaattgactttcaaaatgcccgacctccatcgcggcagcgagacggtcatgtctcggtgagctcgaaaatgcatggcatatcgttattctaaaaatgtatttaaatttatttttttatatcgctacagttttgccatgcgtacctgccgaccaatcggcgcgccgcacttgatgtcgggcttcagcccgtccccaaagtgatgcgccgattggcgcttctgcatggagtttcttctatgtcggcttatgcacagacccaccttgcgccttattccagccagaccttcgaggtgcgccccttcgatgcgccgctcggcgccgaggtcctcaacctcgacctttcccaaccgctgaacgacgaggacttcgctcgtgtgcaccgggcgcacctggaccatggcctgctggtgttccgtgatcagcgcattacaccgcagcagcagattgcgttcagccgccggttcggcccgctgcagattcatgtactcaaacaattcctgctgtctggtcaccctgaaatcttcatcatttccaacattgtcgagaacggtcagccgatcggcttggcggatgctggcaaatactggcattcggacctttcctacaaggagctgccaagcctgggctccatgttgctggcccaggagctgcccgaggaaggcggagacacgttgttcgccagccagcagctggcgtatgaaaccctgcctgctcatctgcgtcaggccgttgaaggcaggcgcgcggtgcattcctataccgcgcgctatcgcgacgaagtgttcagcggggtgcgtcgcccgacgctgacggccgctcagttggccgaggtgcaggcggtggagcaccccatggtgcgtatccacccggaaacgggccgcaaagggttgttcgtcaatgagaacttcacgacccacattctcggcattcccgaagacgagagccggcagatcctcgccgagctgttcgcacacagcgcgcgtcccgagttcatctaccggcaccagtggcagccccacgacatggtgttctgggacaaccgtgcactgatccacctggccaccggctgcccctcgcaccagcgccgccacatgcaccggaccaccattcagggcagcgcgccgctctgagtcgccccctctttcgctgatttttgaatggagcctcgttatgacgccaggcaagcgcttttccttcgtgccccgtttcggccgactcgccaccggtattgggctgagcctcagcctgctggcgggttctctggccgctccgcaagtggcttgggccgaggggcggattcgtatcgctgaacagttcggcatcgtttatctgctgctcaatgtcgtgcgcgatcaacaactgatcgagaagcacggcaaggccgccgggctcgacattgaggtcgactggcagcaattgtccggcggttcggcggtcaatgatgcgttgttgtccggggccatcgacgttgccggtgcaggcatcggcccgctgctgaccgtatgggatcgcactcacggccgacagaacgtcaagggtgtggcctcgctgggtaatttcccttactacttgctgagcaacaacccgagcgtcaagactatcgccgatttcaccgagaaggaccgcatcgcggtaccggccgtgggcgtttcggtgcagtcgcgttttctccagtacgccgcggccaggcaatggggcgatgaccagtacgcccgtctggacaagttcaccctggccttgccgcacccggatgcgacggccgcgctgaaagctggcggcacggagctgacggggcacttctccaacccgccgttccagaaccaggcgctggaaagccctgccgtgcatgtggtgctcgacacctacgaactgctcgggccgaactcgccgacggtgctctacgccacagagaaattccgcgaggagaatccgaagacctacaaggctttcgttgcggcgctgtccgaggcggcaggttttgcccagcgggacaaggctgcggcagccgacacctatattcgcgtgaccggagcgaaaatcagccgcgaggcattgctgaagatcatcgacaacgagcggttcgagttcagcgtcacgcccaccaatacctatccgctggcagagttcctccatcgcgtcggtgccatcgagcacaaaccgacctcatggcaggactacttcttcgaagacgccgcgattggccaagggagctgacggatgaataaccctatgcaaggctatgcagcccgcctccatgaccgcgccgcgttcgataccgtcctcgaagtcgaccgggtcagcctggaataccgcactgctcagcgcgtggtgcgggccacccatgaggtcagcttcgaaatcgaccgcgccgaccgctttgtcttgctcggcccgtccggctgcggcaaatccaccttgctcaaggccgtggccggcttcatcgagccggttggagggcgcattctgctcgacgggcaggcggtgcgcggaccgggccccgaccgtatcgtggtgttccaggagttcgatcaattaccgccctggaagacggtcaggcagaacgtcatgtttccgctgctcgcctctcgcactgttggccggcgcgaagccgagcaacgggcgctgcattatctggacaaggtcggcctggcggccttcgccgatgcctatccgcacacgctttccggcgggatgaaggcgcgagtcgcgatcgcacgggcgttggcgatgcagccgaggattctgctgatggacgagcccttcgccgccctggacgccttgacgcgccgcaagatgcagcaagagctgatcgatctttgggacgacgtgcgtttcaccctcctgttcgtcacccactccatcgaagaggcgctggtggtcggcaaccgcatcctgctgctgtcgccgcatcccgggcgtgtgcgggcggaaatcgacagccacgcgttcggcctgcacagcctcggtggtgcaacgttccagcaggctgcccaacgtatccaccggctgttgttcgacgagacggatgcagtccatccgcaggcacaggccaggccccggcccgttccatcgcaggcgcgcgcgtcatgagcatttcacccgtgcggcgcagggaatacgaagtccggctgccaccgctacccgaactgcggctcgagcgcgagttgccgctcggccagcgtctctggcagcagggctggctgcgcaaatcgctgatcctgctggtgctcgcgctgatctgggagctggccgcccgataccagggcaacgacctgctgctgcccggcttcctgcagacggcgagcgccttcgtcgagggtctcggcagcggcgaactgccgcagaaaatagccatctcgctggcggtactgctcaagggctacgtgattggcatcggcctggcctttgtactgaccactttggcagtctcgacccagttcgggcgtgacctgctcggcaccctgacgtcgatgttcaacccgttgccggctatcgccctgctgccgttggcgttgctgtggttcggcctgggggagaacagcctgatcttcgtgctggtgcattcggtgctctgggcgctgacgctcaatacctactccggatttctcggtgtgtccgataccctgcgcatggctgggcgcaactatggcctcaaaggactgcgcttcgtgttgttgattctcgtcccggcagcgctgccttcgatccttgccggtctgaagatcggctgggccttcgcctggcgcacgctgatcgccgccgaactggtgttcggtgcttcaagcggcaagggcgggctgggctggtacattttccagaaccgcaacgaactctataccgacaaggtgttcgccggcctcgcggccgtgatcctcattggcctgctggtggagaacctggttttcgccagcctggagcgtgtcacggtgaagcgctggggcatgcagcggtaggagcagcggcgcggatcgcgctgctgcttcatccggtcggccgtcgggggacggccccgattcgcgccctgcgcgaagggtttcgacgtgatctggcacgggcgacaccacggggttcgttacactctgtccccacgccccgccttcacgagttgttacatgcccagctccgcgccctccgatgctctttcgaccctgccacctgtgctggttggtccgatccttcggcggctcgagaccgatcgcctggtgctctggctggtgggcagcgagtcgctgtcgttgcgtctggaagtgcaccccgacggcgagccgctgcgatcgttgaagttgggcggcgatacctgccgcagactgcgaatcggtacttcggtttggttgcacctgattgatcttcacttggatacgccgctgcccgtcgaccggttgatcgagtacgacctgctgatcagccatcaggggacggagcaaggcatcgccgtttgggcgccgcacctgattcatcaaggattccagcgcccggccttcgtcgtgcgctcgcgctacgacgatctgctgcatggctcctgtcgcaagccgcaccacgcttcggcagacggattagtcaccgtcgattccctggtcgcccagacccgccgggcccccgaacactggcccgccgcgctgctgatgaccggcgaccagatctatgccgacgacgtcgccgggccgaccctggtagccattcacggattgatccgccggctcggtttgtatggcgagtgtctggaaggtgcagtcgtcaccgacagtgatgagctgatggcgcattcggccacctactaccggcgcgagcagttgctgccggcgttcaagtccaacgaggcgctgcgcgagcgcttcttcggcggcgtggaaaagccggtgttcaccacgtccagcgcacataaccatctggtctcgctgggcgaggtgttggccatgtacctgctggtctggtcgccgataccctggcagctgatcgagcttcagccgccagcgctggacggcgaactggctgatcgctgggcgcgtgagctacgtgctatcgatgacttccgggcaggcttgccgcaggttgcgcgtgcactggcgcacctgccgtcactgatgatcttcgatgatcacgacatcaccgacgactggaacctcagcgctcgctgggaacagactgcttacggccatccattttcccgccgcatcatcggcaacgcactgctcggctatctgctgtgccaggcgtggggcaacgatccggatgcctgcgtcaccttactggatggcgtcgaggcgctatttgccagcggcgaagctggacggctggattgcacgctgcacgatggtgtggtcgatgagctactgcagcgcggcgactggggctacgtgttccccagcgagccggcgctcgtagtgctcgacacgcgcacccggcgctggcgcagcgagcgcaatctgaatcggccgtcgggcttgatggattgggaggcgctcactgatttccagcaggaactgctcgaccatcgttcggtggtcatcgtctcgccggcaccgatgttcggcgtcaagctgatcgaggtcgtgcagcgcgtgttcagctgggccgggctgtcgctgctggtcgacgccgaaaactggatggcccatcgcggcgcggcgcaggtcatgctcaacatctttcggcatacccgcacgccgggcaactacgtgatcctctccggcgacgtgcattactcgtttgcctatgaagtgcacattcgtggccgtgccgaaggcccacggctatggcaggtcaccagcagcggcgtgaagaacgagtttccgccgcgcctgctcgacctgttcgaccggctcaatcgctggctgtattcgccgcgctcgccgttgaactggttcaccaagcgccgccgggtgcgggtccaaccgtggctgccgagccgcagccggtccggcgagcgcctgtggaacggtgcgggcatcggtcgtgtgcgactggatgccgaggggcggccgtcgcgtgtcgaacagatcaatgccgatgggtcaccgccggtgagcttcgcccccgagcgcgacccggcgccctaggcgaacgccgcgcgcagccccggcagcgtggcgtagtaatacgccggcgagtgcgccatcagctcggcatggctgccaaagccgtaacccaccgctgccgctttcagcccgttgctgtgcgcgccgatcaggtcgtgcttgcgatcgccaatcatcagcgtctgttctggatcgagcccttgttcggcgatcacatgggcgatcagctcgaccttgttggtgcgggtgccgtccagctcgctgccatagatcagcttgaagtggtggtcgaaggcgaaatgccgcgcgatttcgcgggcgaaaaccgagggtttcgacgtcgctacatagagcgtccggccttgtccgcgcaggtgttcgagcatctccagcacgccgtcgaacagcaggttttcgtacagcccgaccgttttgaagcgctcgcggtaatggccgactgcttcccatgcccgcgcctcatcgaagccatagaactccatgaacgcctgtagcagcggtgggccgataaagggctcgagcttgcgaaggtccggctcgtcgataccgagcttggccagcgcatgctgaatcgagcgggtgatgccttcgcgcgggtcggtgagggtgccgtcgaggtcgaagaggatggtggaatggtgcatgggagaagcggccggtagcgggtggccgtcaattgtcccttacccctcggcgcgagggcaaatgaggcgcgccgagcggtgcggcacctgtcaaagctcgcgatgcatgatgtagcagtccaccaggccaagggtccgatggcggtaagcgcgcggcaaagtgccgatgatctggaacccgtgcttttgccatagcgtcacagcaaccgtattactggcgaccacgctgttgaattgcatggcctggaagctgagctcacgagctgtctgaagagagtggttgcatagtcggcctgcgacgccctggcctcgagccgcagaggcgaccatgtagccgcagttgcatacatggtcgcttgggcctgccgcgttcggtttgaggtagtagctacccaggatctggccgtcctgctccgcaacataggtcgccgtgggtagctcgacccaaagccgccaagccgcgtctcggtccatctccgggtcgaaggcataggtttcctgcgcctggaccacctcgcggataatcggccagacctgatcgaagtcggcttctgtaatggggcgaatgttcattccgtagttctcatgtgcgttgatcagtcggcacagccctcggccaggtgctggttcttcagcttcacgtagttgccggccgtgtagctgaaaaagctgcgctctttctcggttagttgccgggcctgcttagctgggctgccgacgtagagatagccactttgcagcgtcttgccgggcggtaccaggctgccggcgccgatgatgacttcgtcctcgactaccgcgccgtccatcacgatggaacccatgcccaccaggatgcgattgccgagagtgcagccgtgcagggtgaccttgtggccgacggtgacttcgtcgccgatggtcagcgggaagccgtccgggttgaatgggccggcgtgggtgatgtgcagcacgctgccgtcctggatgctggtgcgtgcgccgatgcggatgcggtgcatgtcgccgcggatcacggtcagtggccagacggagctgtcctcgccgatctcgatgtcgccgatgagcacggcgctggggtcgacgaagacgcgttcgccaagtaccggcgtgtggccttggaaggttcggatgctcatgggttgttcctttagcacgtgaaaggatggccggtcactggtagacccggccttcgacggcattgctgccggggcggaagaattcgcctggcgttgcgccgaattgctcgcgaaacgcagcgataaaggctgaaagtgaatcgtagccgcagcccagcgccacatcggtgacgcgctcgccgcgctccagcgccggcagcgcgctgagtagtcgaaggcgctgacgccaggcacgaaaggtcagcccggtttcacggagaaacagccggctcagggtccgctccgagacgcccagcgtgcggctccagtcggccaggccttcctgcgactccggctgcgcctgcaggcttttgcatagccgatgcaggcgtggctcggccggcagtggcaacaccagttcgacctccggcgcgcagctcagctggtccagcagtacctgcaccagtcggccttccgcgccgtcttcggcataggcttcgggcagggtgctgaaatgccggatcagctcgcgcaacagcgggctgacctgcagcacacggcagtgctcggacgcctcgccggccacggcctgatcgatgtagaggctgcgaatgcaggtgtccggcgcgcagaaaacctgatgcgtcacgcccgctgggatccataccgcgcgcagcggtggcgcgatgaagcggccactgtcggtgcgtacttcgagtacgccttcgaccgcgtgggatagctgcacccaggggtggctgtggcggtagccgagcttgaggttgggcggcgagtcgagctggccgtagaccggcctcggcaacgtcttgagctcgccgaggcgggtaatcagcgcggcttcttgtccgattggcgacatttcatgcccgcttggcgttagtcggaaggtgccgcccacgttaaggtcgatccctgttgcccgcaagccccaaggaacccttcatggccaagctccgaatcctcttcgacaacttcaccctggccctgctcgccgtggttgccatcgccaccctgttcccctgcgaagggcgcggcgcggtgttcttcgaatggctgacggccgccgccatcgcgctgctgttcttcatgcacggcgccaagctgtctcgcgaggcgatcctcgccggtgccggccactggcgtctgcacctgctggtctttgcctgcactttcgtcatgtttccgctgctcgggctggtcctcaagccggtgctgaccccgatggtgggcaacgatctttacctgggcatcctctatctctgtgcattgcccgcgacggtgcagtcggccattgccttcacctcgttggcgcgcggtaacgtgccggcggcgatctgtagcgccgcggcgtccagcctgatcggcatcttcctcacgcccttgctggtgctgctgttgatgggggtcgaaggggacagcggctcgacgctggattccatcggcaagatcgtgctgcaactgctggtgcccttcgtcgccgggcaggtcgcccgccgctggatcggcgcttgggtgacgcgcaacaagacctggctgaaaaccgtggaccagagttccatcctgctggtggtctacaccgcgttcagtggcgctgtggtcgaagggctctggcagctagtgccgcttggcaacctgcttggactggtcgtggcctgctgcctgttgctggccatcgtgctgtggctgacgagcatgctggccaaggtattcggcttcaatctggaagaccgcatcaccatcctcttcgccggttcgaagaagagcctggcgaccggcgtgcccatggcgcaggtgctgtttgccaccagcgcggtcggcatgatcatcctgccgttgatgctcttccatcagatccaactgatggtctgcacggtgctcgcccagcgctatgcgcggcggcccgagctgcctgtggaatcgcctgcggcttcgtagaagccacttgtctgtgctccggcaagcggccgttgcgacgggtacgagccagcttgccggcgatccgccgtggcggtacgcaacgctgccggaacggcatacacgtgatcgcgagcgaaaggctgtgccgcgggaacccgcgctgcaggaaaccgtcgcaataagagcgactcgccgagtgggggcgggttcgcttttcaccgttacgcagtgcatccgggattgcacaagctcagcggattcatcatgcatagcgccacgctatcgagccgtttgctggctgcgcggccgggcaattgtctttaacatgctcggctgatcactttatttcagaaggggcaaacgccgtgaccgataccaatccgctgcttcgggatttcgacctgccgccctactcagagattcgccccgagcatgtcgagccggcggtggacaccatcctgggtgacaaccgcgtcgccttgcaggaactgctcagccgcccggccgagagcctcgactggtcgaccctggtggtcggcctggacgagatgaacgagcgcctcagtcgcgcctggggcccggtcagccacctcaatgcggtgcgcaacaacccggaattgcgcagtgcctacgaggcctgcctgcccaaactgtccgcctacgccaccgagctcgggcagaaccccgatctgttcgccgcctaccaggcgttgtcgctgagccccgaagcagacggcttcgacgtggcgcagacgaccatcctcgaacacgcgttgcgtgacttccggctgtccggtatcgatctgccaccggccgaacagcagcgtttcggcgcgatccgcatgaagctcgccgagctgggcagcaccttttccaatcagctcctcgatgccacccaggcgtggaccaaacacgtcaccgacgaaagcctgctggccggcatcactgattcggccaaggcgcagatggccgaagcggccaaggccaaggaactcgatggctggctgatcagcctggaatttcccagctactacgccgtgatgacctatgccgacaatcgtgcgctgcgcgaggaggtatacgtcgcttactccacccgcgcctccgatcaagggccgaacgccggccagttcgacaacggcccggtaatggaacagatcctcgacctgcgtcaggagctggcccagttgctgggcttcggcagctacgccgagctgtcgctggcgaccaagatggccgaaagcaccgatcaggtactgggcttcctgcgtgatctggctacgcgcagcaagccgttcgccgagcgcgacctgaaggagctgcgcgccttcgccgccgagcagggcatcagcgacctgcagagctgggacgtcaactacttcggcgaaaagctgcgccaggcgcgctacagcctgaatcaggaagagctgcgtgcttacttcccgatcgataaggtcctggccgggctgttcgccatcgtcaaacgtctctacggcatcgagattcacgagctggaggcgttcgacagctggcatccggatgtccgcctgttcgagatccgcgaaaaaggcgagcacgtcgggcgtttcttcttcgacctctatgcacggccgaacaagcgcggcggcgcctggatggacggcgcccgcgacaagcgccgcacctgcctcggtacgctgcagacgccggtggccaacctggtctgcaacttcaccccgccggtgggcgagcgcccggcgctgctgacccatgatgaagtcaccacgctgttccacgagttcggccatggcttgcaccacctgctgacccaggtcgagcacgccggcgcgtcgggcatcaatggggtggcctgggatgcggtcgaattgccgagtcagttcatggagaactggtgctgggagccggaaggccttgcgttgatctccggtcattaccagaccggcgagcgactgccgcaggacaagctggaccagatgctggcggcgaagaatttccagtccggcctgatgatggtgcgccagctggagttctcgctgttcgacttcgaactgcacgccacccacggcgacggccgcagcgtgctcgaggtgctcgaaggcatccgcgatgaggtctcggtgatgcgtccgccggccagcaaccgcttccccaacagctttgcgcacatcttctccggcggttacgcggcggggtattacagctacaagtgggccgaggtgctgtcttccgatgccttctcgcgtttcgaggaagagggcgtgttcaaccctgacaccggtcgtgccttccgcgaggcgatcctggcgcgcggcggttcgcaggagccgatggtgctgttcgtcgacttccgcggccgtgagccgtccaccgatgcgctgctgcgccacctgggcctgaccgaggaggtcgcatgagcgacgaaccgaaagtgaccaccaaacgcttcatcgccggcgccgtgtgcccggcatgcagcgccacggacagcatcaagatgtgggacgtcgacggcgtgccgcatcgcgagtgcgtcgaatgcggctacgccgacacgctcaacgctcaggggcaatcagtgccctctgagctgggtacgcgggtcaaccaggccaagccgaaagccgccgatccgcaggtgcaggcggtgcagtttttccccaatccgaagctgaagaaaaaaaccgactgatccgagggaggctcgccatgtggcatctcacctgtggcgacctcgccgcggacagcgtccggccgctgctggctgacggcagtgaggtccgcgtgctacgcgatgacctggccgtcggcccgctcgccgatatcgacatcccgccgtgtgcggcgcggctggccttttgggaggcgctgtggccggcagccatgacgccgcggccggatttcaccggcatcgtgggtgatgcgttgtggctgaaggagttgtctggccagccgcgaccggtaaccgtctggcatggcgacagcgcttccgagcagctgatgctggcgcgggtggcggcggcgctggagcgatcttcgctgcccttctatgaagttgcctgcggcaccggtgacagccgggtcggcacgcgcatggcggtgtccatgcatacgcccgaagcactggtagcactcgaccagccgcggcctgtcgagcccgccagggtcgccacgctcgccagccagtggcgcaccgccgtggcggacaacgcagcgatacggcgttggctcgacggtcgtttcgtcggtgaggattatcggcgaatcgaccgcgagctcaccgaggcctgcggtgacgaggagatgccattatcccgagccatggccgaggtcatgggccgctgcgacggctttttcgcgacggatatgtttctttactggcgcgcccgggagctggcgcagcgcggtgtgctgcgcctgtccgacgaccacgacgctggctacgcaacggttcaggtacgccacgcctcggattgagccggcatcgctgcgccaggccgcgatcaacacccggcggcggcttagccggcgatcttctcgccgaccagtgccgcacgcggtgcgcgcgcgaagcgctgcttgagtctcatcgccggggattcgatcaggtgccaggacaggatcgccaacagcagcgtcggcacgaggctgatcacggtcagctggaacacgccgatttcagggccgagcaggtagaccacgagctgctggaacggaaaggcgtaaatgtacatgccgtaggagaagtcgccgtgcttgccgaaccgggaaatcagcggaattggggcataggcgaggtagatcaccagatagggcagcgcgaccacgtaaacgtaggggcctgcggcggtatggaaggtcaggcccagcgccgcgaccaggaccgccgcgatccagccgcgccagggcagggcgtcgcgatagagaaagagcgcggagccggtgtagtacagcaagcccagcttgacgatgttgttgatgaagaacgactcgatcccgagcatcttcaatatccagaaatgtcccagggcgaggccggcgatcggcaggaagatcagccgacgattcagcaggccgatcagccccatcatcatcacaccgagatacatcagcacttccagcggcagcgtccacaatgagccgttcaccacgttcggatagatgttctgggtgaacacgcccggcagttcgaagcgcgtgacgagcaggatgttctgcagataggtccaggtgacggaggacgagaggtagctggtcatgctccggtcggtcactagcggtccgatgacgaaggcagaaagcagcaccgccaaaatcaaggccgggaacacgcgcaacgcgcgcttgatgagaaagctcttcgcgctgctgctattgatccaggaggaggtgatcaggtaaccgctgatcacgaagaagatcgcgacggccatctcgccgccattctcgtagccggtcagcagctcgatgggttcatcgggtcggcgcccggtcagcggatagctgtgaacgaggaggaccatcgttgctgcgaagaatcgcagaaaatcgaagttgttttcgtgagcgagcggtgcgcctggctgggcgggcatcttcacctccttgtcgataccgggacggattacagccgtgagccagcttgggcacaaacgggtggcgataattccctggccgttggtttttttccgaccgtcggcgtggagatgttcggctggttgctcgatactgtatgcatgaacagtattcggaggcatcaatgcgcgctcccatcaccacgccgcggggacgcggcaccgcgatcaatccggacaaccgcttcgccccgacgcgcagtgaagcctatgacgatggctgggagcaggacgtgccgcagacccgggcaaccgaggtgcggatcgagacggcgaaaaccgtgcttacgcgcaaccagtcgccggatgtcggcttcgatcgttcggtcaatccctatcgtggttgcgagcacggctgcatctactgctttgctcggcccagccacgcctactgggacctgtcgccagggatcgatttcgaaacgcggctgatcgccaagaccaacctcgccgagcgcctcgagcaggagctgagcaaacccggctacgtgccgcagcccatcgccctgggcgtcaacaccgatgcatatcagccactggagcgcgagcaacggttgacgcgccaggcgctggagatcctgctgcgcttcaagcatccggtgcacatcatcaccaagggatcgctggtgttgcgcgatctcgatttgctggtgccgctggccgagcagaagctggtcagcgtctcggtcagcctgacgacgctggacgacgagctcaaacgcatcatggagccgcgggcggcatcgccctcggcgcggctgcgagtcttgcgcagcctgcacgacgcgggtgtgccagtcagcgtgatgtgcgcgccgatgatcccgatgatcaacgacatggagctcgagcgcatgctggaggccgcccgtgaagccggagcgcggtctgccggctacgtgctgttgcggctgccacatgaggtggccacgctgttcgacgagtggctgcaggagcattttccgcagcgcgccgcccacgtcatgagcctggtgcgccagtcgcgcggcggcaaggactacgacagccgcttcggcagccgcatgcgcggtgagggccagtttgcccagctgctcgcgcaacgcttccagctggcctgcaagcgcctcggttacaaccggcgagaccagaattatggcctcgattgcacccgcttcgcgccacctggtcagcaaatgaccctgttgtagtagctgagcgcggcttcgctggaaaaagctcgcggtcaagaccgctcctacaagcggtgctgcggacggccttaagtgcaagcacccaagccactgtgggagcggtctcgaccgcgaaggcgtctgtcgtgggtgactgaatttctgaacgtggcttcgctggaaaagctcgcggtcaagaccgctcctacaagagcggtgccgcggacggtcttaagtgcaagcaccaagcttccatgggagcgatgccgcgcatggccataagtgcagcaccagccccgtgggagcggtcttgaccgcgaatggctcggctgcgtcattgatcgcagacctggcgggtgcttcggttcgcttctaacgcgatgagaatcgtttgctagggcagagccgccgaaagcctgtcgggcgggtccaggcttgggggcaggacaggcacaagggcgacgccacagggcggctcgccggaactctacgccgcgcttcgcgcaccaacccaggtatcgctgaggcgtcggatggccggcgccctgtgcaaggtggaggcctcttggactggatcgatctgctgcaatggccggcaacggtggtcacggtattggctgcctggttgatcggctcgttgaagccgcgtcggcgtacggtgggattctgctgttttctgctgagcaatctgctctgggtgatctggggttggcatgccgaagcatgggcgttgatcgcgctgcaggtgtgtctggcgctgatgaacatccgtggcgtgaagaagaacgaccagccagcacaggctcaagccagcgcctgagccgtgaaattgccaggtttggatcgctgtctatactccgttcgtaagcgtaccgattgaatccgactgcgcgtgcaaagcgaggcctggcaaccagtagttggggggagccggaccggagcgtggtcaggccgtgagcgcgagcgtttgctcgacgctgcgaccagacgagcggtcggcgggataacaagaaccataaggggaacccgcaatgtcgcgacatccacgagtctggatggggattgggctgtggtcgctgtttgcgcaggcccaggcggcctgggatgtgaacatgcgatccggtgtgaccgatgtcagtcgctccgtattcgatctgcacatgaccattttctggatctgcgtgatcatcggcgtgctggtgttcgcggtcatgttctggtcgatgttcgcgcaccgccgctccaagcggctcgagtctgcgcatttccatgagaacaccaaggtcgaagtgctctggaccatcatcccgttgctgatcctggtcggcatggcgataccggccacccgcacgctgatccacatctacgatgcctccgaatcggatgtggatatccaggtcaccggctaccaatggaagtggcactacaagtacctgggcgaggatgtcgagttcttcagcaacctgaccacgccgcgcgacgaaatcaacaaccttgcgcccaagggcgagcactacctcctcgaagtggaccagccgctggtcatcccggcaggcgccaaggtgcgctttctggtcaccgcggcggacgtcatccattcctggtgggtgccggatctggcggtgaagaaggatgccatccccggcttcatcaacgaatcctggacccgcgtcgagcggcccggcatctaccgcgggcagtgcaccgagctgtgcggcaaggatcacggcttcatgccgatcgtggtggaggtcaagtccgccgaagactatgccgcctggctgggcgagaaaaaggccgaagccgccaagctggcagagctgaccagcaaggaatggacggtggacgagctcgttgcccgcggcgagaaggtctacctgaccaactgcgcctcctgtcaccagcccaccggcatggggctaccgccgatgttcccggcgctcaagggctcgccgatcgccaccggcgatgccgaaaatcacctcagcgtggtcgtccatggccggccgggcacagcgatgccggccttcggcccgcagttgtcggaagtcgacctggccgccgtggtgacctacgagcgcaacgcgtggggcaacgacaagggcgacatggttacgccgaaagacgtgctcgatttcaaacaggccgaagaagccagtcaataaggggtaggcagcgatgagtgcagtgatcgacgatcatgggcatgccgggcatgaccatcaccacggcccggccaagggactctcgcgctggctgctgaccaccaaccataaggacatcggttcgatgtacctatggttcagcttctgcgccttcctattgggcggttcgatggccatggtcatccgcgccgagttgttccagccgggtctgcagatcgtgcagccggaattcttcaaccagatgaccaccatgcatggcctgatcatggtcttcggcgcggtgatgccagccttcgtcggactggccaactggatgattccgctgatgatcggcgcgccggacatggccctgccgcggatgaacaacttcagcttctggctgctacccgccgcgttcgggctgctggtctcgaccctgttcatggagggcggcggtcccaacttcggctggaccttctatgcgccgctgtcgaccacctatgcgccggagagcgtgacctacttcattttcgcgatccacctgatgggcatcagctcgatcatgggcgccatcaatgtcatcgccaccgtgctcaacctgcgagcaccgggcatgaccctgatgaaaatgccgctgttcgtctggacctggctaatcaccgcgttcctgctcatcgcggtgatgccggtgctggcgggcgtggtgaccatgatgctgatggacatccacttcggcacgagcttcttcagcgcggcgggcggcggggatccggtgctgttccagcacgtgttctggttcttcggccaccccgaggtctacatcatgatcctgccggcgttcggcgcggtcagctcgatcatcccggcgttctcgcgcaagccgctgttcggctacacctcgatggtctacgccaccggggccatcgcctttctctcgttcatcgtctggtcgcaccacatgtttaccgtcggcatcccggtgaccggcgagctgtttttcatgtacgcgaccatgctcatcgccgtgccgaccggggtgaaggtgttcaactgggtctcgaccatgtggcgtggctcgctgaccttcgaggcgccgatgctgttcgcggtcgcctttgtcatcctgttctccatcggcggcttttccgggctgatgctggccattgccccggctgacttccagtaccacgacacctacttcgtggtggcgcatttccactacgtgctggtgcccggcgcgatcttcggcatctttgcctcggcctatttctggctgcccaagtggaccgggcacatgtatgacgagacgctggccaagctgcatttctggatgagtttcatcggcatgaacatggcgttcttccccatgcacttcgtggggctggccggcatgccgcggcgtatccccgactacaacctgatgttcgccaacttcaacatggtctcgagcatcggcgccttcatgttcggtgcgactcagctgttgttcctcttcatcgtcatcaaatgcatccgcggcggtccggcggctcccgccaaaccgtgggacggcgccgagggcctggaatggagcgtgccgtcgccagccccctatcacaccttcagcgtgccgccgacgatggatgagctgcatgaacaccgcaccggcccgaaacatgattaggcgagcggcggctggaagcgggaggttggacgacgtgtggcttcggtcgcgcacgcttgggtcaccagcggagcaaccggctcttcgcggtcaagaccgctcccacgagagtggggcactggtgggagcggtctcgtccgcgagcttttcgacggcaagccagccgacacaccgagggctgctgaatgaacaccgagctgcctctcaccaagcaagcccgccggctgctgtttgcggctcttcgcggtcaagaccgctcccacgagagcggggcactggtgggagcggtctcgaccgcgagcttttcgacggagcgtcagccagcacaccgagggctgctgaatgaacattgagctgcctctcaccaagcaagcccgccggctgctgtttgtggctcttcgcggtcaagaccgctcccacaaaagcgggagcggggcaccggtgggagcggtctcgaccgcgagcttttcgacggcaagtcagccagcacaccgagggctgctgaatgaacactgaattgcctctggtcaagcaagcccgccacccgctgtttgtggctcttcgcggtcaagaccgctcccacaaaagcgggagcggggcagcagtgggagcggtctcgaccgcgagctttcgacggcgcgtcagccagcacaccgagggctgctgaatgaacactgaattgcctctggccaagctgattcgccgactgttgctgctggtggtggtgatgttcgccttcggcttcgccctggtgccgctctacgacgtgatgtgcaaggccttcggcatcaacggcaagaccgccggcgcctacgagggcacacaggtgaccgatgacgcccgtgaagtgcgggtgcagtttctggccaccaacgcctcaggtatgacctgggagttccatccgctggccgatcagctcagcgtgaacccgggcgccactcaggagatgcgcttcgtcgccttcaaccccaccgaccatccgatgaccgcgcaggcggtgccgagcatttcgccatccaaggcggcggcctatttccacaagaccgagtgcttctgctttacccagcaggtgctgcaacccggcgagcgcatcgaaatgccggtgcgcttcattgtcgatcgtgatttgcccgcagaagtgcgtcacctgacgctcgcttacaccctgttcgacatcacgtctcgtcagcctccggtcgccgttgttcaggcgcccggggcggcgggcaaggagagtctgcaatgagccaaccgacccccgcgtacgagaagtactatgttcccgctcaaagcaagtggccgatcgtcgggaccgtggcgctgctgaccactgtctacgggctgggtacctggttcaacgatctcaaggccgaccgcgccgaatcccacgggccgctgatcttcttcctcggggccttgctgatcgcctacatgatgttcggctggttcggtgcggtggtgcgtgaaggccgtgcgggactctacagccaccagatggatcgctcgttccgctggggtatgagctggttcatcttttccgaggtgatgttctttctggctttcttcggcgtgctgttctatgtccgttactgggtcgggccctggctcgacggcgaaggcgacaagggcgtcagtgcgatgctctggccgaacttcgagttcagctggccgctgctgaacaacccggaccccaagctctaccctgcacctgaagggaccatcagcccatggggcctgccgctgatcaacaccatcctgctggtcagctccagtttcgtcctgacttgggcgcaccatgcgctgcgcaagggccaccgcaagcagctcaagctggggctggggatcaccgtgctgctgggcgccacgttcctcagcttgcagatcgaagagtacatccatgcctacaccgagctggggttgacgctcggttcggggatctacggcgcgaccttcttcatgctcaccgggtttcacggggcgcatgtgaccatcggcgcgatcatcctgacggtcatgctggtgcgcagcttccgtggtcatttcacgcctgaccagcacttcggtttcgaggcggcggcctggtactggcacttcgtcgatgtggtctggatcggcctgttcattttcgtctacgtgctctagggcgggtgcaagccggcgatgcggtgccggcgcctcgttcgatgcgcctgcggctcaaccgaaccccggtcgcagttgaccggaatagaaaccccaggcgatcagggcgaccgtcaaggcggtgagggagacgcgaacgaaaagggcggtgagcacgcgagatctgcggccctcgtccttgaccaggaagaacagaccactgaacagactgaccagcgtggccactaacaatagaacaatcgccgccttgagcatgagcgggtccgccttaacaggtgaactgggggaagtggggtgcagtatagccagccgtatcgatacgccgcgggacgtgacatgagcggcttcaagccaggcctgctgcccacgcttgtggtgctgtgcctgcttccgttgctggtctggctgggattctggcagctggagcgcgccgatcagaaacgcaacatgctgaaccggcaggccgcccgtgaagtcgccgcaccggtggcaccagggcagatcgagaagcttgaggacccggcctatgcgcgggtctatctacaagggagcttcgacgccgcgcacagttttctgctcgatagccgcacccgtgatggccgggtcggcgtggagctgttgcagccgttccgggacgaacccagcggccgctgggtgctgatcaatcgcggttggttgccctggccggatcgacgagtcccgccgaaattcgatacgcccgatagaccgctgaaactggctgcatgggtttatgcgccgtccggcaagccgttcttgctcaacgagcgcatggccgagggctggccaagattgctcaatcacgtcgatgtcgaagcactctggcaattgctcggacgtgatggcgtcgcatacgagctgcgactggagccgggcccggcggcgtaccgggcggactggccgatcaccaccatgcagccgcagcagcatctgggctacgcggtgcagtggtttgcgctggcagcggcgctgctggcgttgttcatctacttcggcgtgcatcaggcacgagggggcaagcagtgaccgctatgaatccgacttttactcctgcacaaccccaacgtcgccgcggccggctgcaattgctgctgatcctggccgtggtgatcggccccatgttactggcgacggcgatgtatcggttcggcttctggatacctgaaagccgtacctaccacggcgctctggtggccaccggccaggaccgcacgacgctcggcataaccctgccggctaccgccgaaccgcgctgggaactgctggttacggcaccgcaagcgtgcgccgaagactgccagcagctggtctacctggcgcgacagatcaatatcggcctggcacgcgaagccggccgtgccggccatgcgctggcgaccgggcaggcgctgagcgccgactacgatcagcgcctgcagcgcgaataccctcagctgcagcgttatgcgctggaccctgccgcttatgcgagcaacccggaggcgcccggcggcgcacaactgtggatcatcgatccgcacggcaatctggtgctgcgttacgacgccaaggccaatggcaaggcgatcctcgatgacctcaagcacctgttgaaaatctcccagatcggctgactaaggcactcggccgcctcgctgaagtctcaacgaggtcgcccaaggagacccagatggcaaaacccggatatcgtcttgccctcgtcgccacgctgttggccgtcgtggtggtgctgctcggtgcctatacgcggctgacccacgccggcctcggctgcccggattggcccggttgctatggctttctagcggtacccatgagcgagcaggcacagagcctggcggcgctgcgcttcccggatgcaccggtcgaggtgcacaaaggctggaacgagatggtgcatcgctacttcgccggcgcgctggggctggtgattctcgcactcgccgtgcaggcgctgcggcggcatgcgcagccgggccagccgatcaagctgccgttgctgctgctcgccgtggtcattacccaggcggcgttcggcatgtggacggtgaccctgcaactctggccccaggtggtgaccgcgcacctgctgggcggcttcaccaccttgagcctgctgtttctgctaactctgcgcttgtcagggcaccgcccggccgtccggctcataccggcccggatcagatcgctggcgctgctcggtctgctggtggtgatcgcccaggtcgcgctgggcggttgggtcagcagcaactacgccgcagtggcctgtaccgacttccccacctgccacggcgagtggtggcccgagatggatttcgccaacgcattcaacctgacccaccacgacatcggccccaactacctcggcggcatgctttttggcgaagcgcgtaccgccatccatttcactcaccggctcggcgcactgaccgtgacgatgctgctgctggtgctgagcggccaactctggcgcaacgggatgccacgccttgccgggctgctgttggccgcactggcgctacaggtcgggctgggtatcagcaatgtcctgctcaatctgccgttggcggtcgccgtcgcgcacaacggcggcggcgctttgttgctactggtaatggtgctgatcaactaccgcgtgcatacgagccgcgaggctgccgccgcgcccgcgcctcgggcacatccgactccagacacgataggcgggctcgacctgcctcgcgcttgaccacaaggagaaccccatggcgactcttctcagcgaacgcggtacgcacgccagctggcgcgactatctcgagctgaccaagccgaaggtggtgctgctgatgctcatcacatcactggtcggcatgtttctcgccacgcgtgcgggtgtgccctggaccgtgctggtgttcggcaacctcggcatcgccctttgtgccggcggtgctgcggcggtcaatcacgtcgtcgaccggcgcatcgactcggtgatggcacgcacccacaagcggccactggccgaagggcgggtgtcgccggccgccgccttgctcttcgcgttgcttctggcgctcgccggaatgggcctgctgctgaccttcaccaacgctctggctgcctggctcacgctggcctcattgatcggctacgcggtgatctacaccggctttctcaagcgcgccacgccgcagaatatcgtcatcggcggcctcgccggtgccgcgccgccactgctcggctgggtggcggtgactggccaggtgaccgccgagccgttgctgctggtgctgatcatcttcgcctggacgcccccgcacttctgggcgctggcgattcaccgcaaggcggaatacgccaaggtcaacgtgccaatgctgccggtgacccacggcgagcactacaccaaggtgcatattctgctctacacggcgatgctgctggcggtgagtgtcatgccattcgccattcacatgagcggtccgctgtacctcgccgcggccgtgttactgggcgcacgcttcctgttctgggcgctggtactctaccgcgacagccgaccgcatgcggccatcaagacattcaaattcagcatctggtacctgttcgcgctgttcatcgcgctgctggttgatcattatctgctgctcaatatctagggccgcttgcctagacgcgctcgctggccagacgcagccaatataggaaccccatgacccgcatccagaaaaccgtcttcatcctcgtcgcgctggtcgcgttggtcatcggcctgacggtttacagggtgctcaataccgaacgtcaactcgacacggccgagctgctcgatgcggggatcgtcatgcttccccagggccgtgacatgcccgacgtcagcttgaccaatcaggacggcgaagcggtttcgatggagcagctcgaagggcgctggaacctgctgttcttcggctataccttctgccccgatatctgcccggccactctcgcggaactgcgtcagctacggggcaagctgccggaagaggtaaaccagcggctacagccgatcctggtcagcgtcgaccccgagcgcgacacgcccgagcaactgaaaaagtatctggattatttcggcgccggcttcatcggcctgaccgggccactggacgatatccagacgctcgccaacgcggcgggcgtgccgttcattccgggcgatacctcgaagaaggactacaccgtcgatcatggcgcgaacctcgcgctgatcggcccggacggccgtttgcgtggcttcatccgcgcaccgatgcgcaccgagaagctggccgaacagctgtcagcggtgctgctcagcgagggcgggcgttaggagcacggttgcgtgaggagagtttggagccgaccgaacgatgccggcaagagcgcgctgctgggccctctgcggagaactcgcggtcaccggtcgagcagtccgcttaaccgagtctgtcaaaatccgtctttcaggcgtattgacgttccgggcgcctcgttatatcggctagtttttcagctttttggttttgctccagcccacgccattgtgcaaccaattcaggcaggtcatgacggtgaatcaggtcgccgaatacatcgttagccgtcagaattttgcccgcctcgttcagcagccgatgtttcgcgcgttccagggcatttcgctgctgtctgccaagcgagcgcgccagggcgatgcctgcatcgtacatctggcggagctccaaatcggatttgttatagaagcgggaatcgtgacgcactctcacagcccggcgaaactccatgaaacctcgcggttgccaactggccagctcggcttcggccagttggatcagcttgtcaatgtcgtggatttcactgggcgtaaacaagacaccttcccgctcctcaatgcttgcattccagcgcagcagcgtggtgagcatggcacggctgtagccactatccgaggagtgctctgcgccggcgaacgcctgtccaatgatggacattcgctttggcatatcgccttgtagatcaatggcacctgcataacgcgcgcaagcctgttcgtcgatcaaggcgcagtcgggttgccatagtatggatacttcgctaccgccgccgggcttgcggggtacgaagtggcgttgttgaccatggtgttcgtaagggtcgccctgcaaattgagcaacccgcccaggagcagcgccacacccagcaagggagagctgaaaagcaccacggtaccggcgctgaccatcttccactcggcatccagccaggcgaagggcatggcagggatagggtcgttgtgattgacaaggcggtgatgggcaagcccctgggcactttgtacaaaggcgcggtcgccagcacggggggcgccgaaggtgtagagctggatatcatgcgaccagtttgttcgcagccattctgctaacagcagtgcaacggcgcccccgagactatggccacaaatgatcagggtttgctcgcccgtatagaacgcgtccagatagcgctcgaagaattcctttgcggcttggaacgagtcataaaatcctcggtgggcttggcctgagccttcagcgaaagggacctggcgcgcgtccagatctcgcaatatgtcttggtttcccagtgtgccccgcaccgaaatgagcatgagcttgtcgttgtgggtgataaaggcctgggtgtccgtatcttcatcatagagaaagtgcacgtcttcgggattgacccagcctttagccgcctcagcctgatagcgagttgggtcataaggcatgatctccaaccttttggaataaggcacctcttcgtacagtaggtgatagcgggcgctatcgaacgctgtagctttttccaagcgggccaattgctcgcgcagcacatgcccaatgctcccttcacggttgtacggtggcgggctggaagcatacgcatcagtaggctgctttggctcgccgaagggtgcatacacgaaggtgctgatgacggccaaatggtaggcattgatcgcacaaaaggccttgtcgcgcgacagcagcgggctgtaggcccggagtgctttgatttccaatatctgatgacagttgggtctcagcgcgacgccggtgcattccgaagctaacccggcgttgtgcttgagcatgacggagggcttgggctgccaggcgggatcagggtcgggtaagtggcccttggccttgaccagatcgctgacctccactcgcataaaccgggcggcctccagtccggcgcgctcttctgccagataggtgcgaccatcagatcgacgggggccggacggagattgctctgcggcgatctgcaagttggtaagaggtatcttgaaggaatctctgatgatcagttcctcgtaccatgactctaggccaccgctatccagcccgggtagctcaagtactgcagggccgcagtagatgtccctaataattgccagtccttcgctgtctagcgttccctgatattgttgcccctgactgtcgtgcagcacataggccagtttggcgtaaggtttgccgtcgccatgttcgtcaaccaaccgaaagcttatccagtctgttcgttgggggcaggccagcgttgttgggttgcccttttttcccatgtcattcatccctgatcattccttgcagttgggataaacggtgcattcctgaccgttcattttgaaggtttggaacaacggtggtgtttggcaacgctgccagccttctttcggtaagcatggcttccagccttctggaaatctgagccatgtatcgtctctgtagggcctttcctttggattggcctgaatatccagccgaaccgtcttgccctgcaactcgtcgcgcaccaagtgtgcgcccgcatctttgcagctcagaagcttgctgacttgccccttccgtgagtgcgccttgcttagctgaaacagccatgtacattcagctgtcttgctcaggcgtccatcgggctcgaaggcgggtgcgccctgaggcaaagtgtcgaccagcaccagcccgccgttgtcataggtgcgttgccaatccttttcgccgtagcggccatgaatgtacagcccgacacgggccagctgcatctcgcaaaggccatcgcggtagctgacgggaatgttgaagcgatactgctgcggcgcgtcctgaaagccactctcgaatgagcgtgcctggctgcgacccttacatccgttagccacgccgtaatgcgcctgggctcgcatggagaagttggtgggtagctgcccttcgaaagtaaagctgtcagctgtgagcgaggccaatgaggcgcaggcgctcagtgctgtcgcgagcatgataagaccgaatagccggccaagggcggttcgcatccctgatcattccttgcagttgggataaacggtgcattcctgaccgttcattttgaaagtctggaataccggtggggtctggcaacgtatccacccaccttctttcggcaagcatggtttccacccttgaggaagtcgtatccaggtgtcgtcgtagtagggtctttcctttggattggcctgaatatccagccgaaccgtcttgcccggcaattcgtcgcgcaccaagtgtgcgcccgcatctttgcagctcagaagcttgctgacttgccccttccgtgagtgcgccttgcttagctgaaacagccatgtacattcagctgtcttgctcaggcgtccatcgggctcgaaggcgggtgcgccctgaggcaaagtgtcgaccagcaccagcccgccgttgtcataggtgcgttgccagtccttttcgccgtagcggccatgaatgtacagcccgacacgggccagctgcatctcgcaaaggccatcgcggtagctgacgggaatcttgaagcgatactgctgcggcgcgtcctgaaagccactctcgaatgagcgtgcctggctgcgacccttacatccgttagccacgccgtaatgcgcctgggctcgcatggagaagttggggggtagctgcccttcgaaagtaaagctgtcagctgtgagcgaggccactgaactgcaggcgctaagtgccgttgcgagaagggaaaggccgaatggccgagcgaggatatgtcgcatcctgtgttactccctacagctggacggttggatgtcgaagcgatagggctgtttggtgctcttggtggcgaggtaaatcggtgtcacgtcagcttccgcgtgcatgtcggttccatccatggagataaatcgcgactacagactgacgtactagccaggcgacctcaacagcggggggaccgcgacatgaaacaattcactgaaattctgcccgttcggtactggctgctttgattggcggtgagcagcccataaaaaaccccgcacagagcgtcgcacagggcggggttctaagggcgacagctgacttgtaattagaacgccggaactacggcgcccttgtatttctcgttgatgaattgcttcacctcttcgctatgcagcgcttcgatcagcttttgcatggcatcgctgtccttgttgtccggacgggccaccaggatgttcacgtagggcgagtcgctgccttcgatgaacagggcgtcttcggtggggttgagcttggcttccagcgcgtagttggtgttgatcagcgccaggtcgacctgggtcagcacgcgcggcagggtcgcggcttccagctcacggagcttgatgtgcttcgggttctcggcgatgtccttcggcgtcgcggtaatgccggcgccgcccttgagggtgatcacaccggccttttgcagcagcagcagcgcgcggccgccgttggtggcgtcattgggaatcaccacggtcgcgccatcgggcagctcgtccagcgacttgtacttgctcgaataggcaccgaagggctcgatgtggacgcccgctacgctgaccagctcggtgcccttgcccttgttgaactcgtccaggtacggctggtgctggaagaagttggcgttcaggcgcttttcggccacctggatgttcggttgcacgtagtcggtgaagaccttgaccttcagatcgacgccctgctcggcgagctggggtttgacgaattcgaggatctcggcgtgcgggacggccgtggcggcaacgttcagctcgtcggcggcctgggccgagaaagccgcgacggcggcgaaggcggctagcagttttttcatggacagctccttatcgatgcggcgagtcgatcgccgatatctgttgtgcggccccgcgtacgaaaagggccagacgattacttacgggaaaaatgcgttaccagtttgtcaccgacgctctgcaggacctgcaccagcaccagcaacaggaccacggtgaccaccatgacgtcagtctggaagcgctggtaaccgaagcggatcgccaggtcgcctagcccgccggcgcctaccacgccagccatggccgtgtaggacaccagggtaatggcggtgacggtaatggcggcgatgatgcctgggcgggcctcgggcagcaatgcgctgaagatgatctgccgggtggtggcgcccatggcctgggttgcttcgatgatgccgcgatcgacttcgcgcagcgctgtctctaccaatcgcgcaaaaaacggcgcggcgcccaccaccagcggcgggatcgccccggcgacgcccagggacgtaccagtgatcagcaccgtgaagggaatcatcacaatcagcaggatgatgaacggcagcgagcgcagcacgttgaccacgagcgagagaaaggcatacagcggaccgttctcgaatagctggcgcgggccggcgaggaacagcagcacgcccagcggcaggcccagcaggatggtgaacagcagcgagccaccgagcatcagcagggtgtccagcgtggccagccagatttcgtaccagtcgacgtttgccagtagggcttccatcagcgcagtacctccacatgcacgtcagcggcgtccagccgggccagcgcggcagccatatcgccgccgaccagggccagggtcagctggccgtaaggggtgtccttgatgcgatcgatacgccccgagaggatgctgaaatcgacaccggtgtcccgcgcgacggtgcccagcaacggcttgtaggtggcctcgccctggaacgtcagacgcagaatgcggccgggtacgtgggcgaagtcatcacgctgctcgccttcatcgaccgcttcgtcttcaagcacgaagcgctgggtggtggggtgcttgggatgcaggaacacctcggtcaccggcccctgctcgacgatttcgccgccatccatcaccgcgacgcgatcacagacgcggcggatcacgtccatttcatgggtgatcagcacgatggtcagcttcagctcgcggttgatttccgccaacagctgcagcaccgaggcggtggtctgcggatcgagtgcgctggtggcctcgtcgcagagcaggatgtccggctcggtggccaacgcgcgggcaatgccgacgcgctgcttctgcccgccggagagttgcgccggatacttgcgtgcgtgctcttgcaggccgacgcgatcgagcagggcggcgacgcggctttcgatctggctgcgcgaataggtaccggccaggcgcaacggcatggcgacattgtcggccacggtcttggacatcaacaggttgaaatgctgaaagatcatcccgacgcgctgacggaagcgccgcaggccgtcggcatccagggcggtgacgtcttcgccgctgaccaggatgcgcccgcctgatggctcttccaggcgattgatcaggcgcagcagagtgcttttgccagcaccggagtggccgatcaggccgaacacctcgccagcaccgatcgtcagctcggtcggcttgagcgcaggaatctcgcgacccgcgccatggccgtcggtgctccgataggttttgtggacttgatgaaattcgatcacgggcgaaccttgtgggtgcgtcgtcaacggccggatgagtggccaaaggcgtgcattctacgcgttgtagcccctcggcgcagccagcccggatgtgggctggcttgaagcctgatagctcttatggggccggcgcgcagtgctgtttgtagagccccggcctcggggcgaagcttttggcaccgagctggcgccattcgccgcgggtcgcggctcccacagaaaacgcgtgcggcctgcacaacggagcggcatgcacgggctggatttgtggggccccgaccccggggcgaagcttttcgggcaccgagctggcgccattcgccgcgggtcgcggctcccacagaagaaagggtgcgacctgcacaacgcagcgccatgcacgggctggatttgtggggccccgacctcgggcgaagctttggcgccgagctggcgccattcgccgcgggtcgcggctttcacagaaaaaagggtgcgacctgcacaacgtagcgccatgcacgggctcgatttgtaggagccccgacctcggggcgaagctttggcaccgagctagcgccgttcgccgcgggtcgcggctcctacagaaaacgcgtgcggcctgcacaacgcagcgccatgtacgggctggattcgaggggccccgacctcgggcaaagcttttggcaccgagctggcgccattcgccgcgggtcgcggctcccacagaaaaagcgagcgacctgcacaacgcggcgccatgcacggctcaatttgtgggaggcccgccctcggggcgaagcgctcagcgatcgggcagctcacgccaatgcaggtagcagcgcaggtcgaactcggtctgcgtatagcccggcatcatgtgttcgcagagcttgtagaaggcgcggttgtgctcgctttcgcgcagatgcgccagctcatggacgacgatcatttgcaggaactccggcgccgcttccttgaacagcgcggcgacacggatctccttcttcgccttgagtttgccaccctggatccgtgacaccgcggtgtgcaggccgagggcgcggtgggtcaggtcgaggcggttgtcgtagagcaccttgtcgatccctggtgcgctcttcaggtgggtctggcgcagttgctggacgtagccgtacagcgctttgtcgctttgcacctgatggcgttgcgggtagcgtcgattgagatactcgcccaggcgtccctcggcgatcagatgacggatctgttgttgcagcgactcgggatagccgctcaggtacttcagagtgctcatcgcctaggtcctgcgccgccaggcaaagctgagcaggaacagtgccgccgccgacaccacgatcgacgggccggccggggtgtcctcgtaccacgacagcgacaaccccatgcagacggcgagcagcccggtcaggctggcacccagggccatctgctccggagtgcgggcatggcgctgggccgccgcggcgggaatgatcagcagcgaggtgatcaacagcacgccgacgatcttcatcgccacggcgatgaccatggcgatcagcagcatcagcgataagcggatggccgtaaccggcagtccttccaccttcgccagttcttcgtgcacggttaccgccagcagaggccgccacagcgggatcagcgccagcaggacgatcgcgctgcccgtgatgatccacgccaagtcggtcgtgcttaccgccagcaggtcgccgaacagataggccatcaggtcgatgcgtacgtcctgcatgaaactcagcgataccaggccgagcgagaggctgctgtgggcaaggatgcccagcaaggtgtccgacgccagcggttggcgctgttgcagggtgaccagcaataccgccagcagcacgcaacagacgatgaccgccagggtcaggttgacctccagcatcaaccccagcgccacgccgagcagcgcggaatgcgagagggtgtcgccgaaataggccatgcgccgccagaccacgaaggagccaagcgggccggcaaccagtgccagcgccaggccggcgaggagtgcattgaggagaaaatcaggcataaacggggcctatcgatgcatctgtacgagccgcgttgtcgcggccaaggacgcctgcttcggcgcgggacccataccacttccgtaagacgaacgcgccagggtggcgagcaccgcttgccgcgcaacccttcgggacgggccggttttgctgcgacgcggcgttactcgtcgttctattggacccaccaagattctctcctcgtgccttgctccgcagcaaaaccggctccgtcgcggcatgcacagatacatcgatagccccctttagtgcttgcagttcgggccgtggatatggggtttgccggtgaccacgctgccgtgcaggtcatggctatggtcgtgttggtggtgatagaccgccaggctgcgcgcatcctggccgaacagctcgacgaaggccgggtcggtgctgacctgttccggatggcccgagcaacacacgtgacggttcaggcagaccacctggtcggtggcgctcatcaccaggtgcaggtcatgcgacaccatcagcacgccgcagccgtaacgctcgcgcagccggccgatcagtcggtaaagctcggcctgtccggcgacatcaacgccctgcaccggctcgtccagcaccagcagctccggctcgcgcagcaatgcgcgagccagcagcacccgctgcatctcgccgccggaaacggcttgcagcggactgtcgatcacctgctctgcgccgacttccttgagcgcggccaaggcaccggcgcgatccacacccggcaccaggcgcagaaaacgcagcaccgaaagcggcagggtcggatcgacgtgcagcttctgcggcatatagccgactcgcagtttcggcttgcgccagaccgtgccgctgtcgggcttgagcaaaccgagcacggcccgtaccagggtggtcttgccggcgccattggggccgatcagcgtgacgatctcgccgcggtgcacctgcagttcggcgccttcgagcaccgcctgcttggcgaagcgcacatggatgttctccaggcggatcagcgcttcgctcatgccgcgctccggcacggtgcgcagaggccgacgacttccaccgtctggccttcgacctggaaacccacgctgcgcgcggcctggtcgatcgcctcgctgatgctcggctgctccagctcgatcgcggtgtggcagttgcggcagatcaggaactggccctggtgggggtgctcgggatggttgcacccgatgaaggcgttgagcgaggcgatgcggtgcaccaggccgttctcgagcaggaaatccagcgcgcggtagaccgtgggcggcgcggcgcggcggccatcctgggccgtcagttcggcgaggatgtcataggcgccgagcggcttgtggctttgccagaccagctccagcacgcgcttgcgcagggcggtcaggcgcacaccggagcgctcgcagaggaggtcggcttcggccagggcgctgcttacgcagtggtcatggtcatggggtgtgcaggccagcggggacttgggcatgagcggagacgaggtggctgagagacgttattatgttacccattcagttcaatcgagtgttgcccgtgtttcgtcttttttcgataccgctgctagtgaccgccagccttttcggcagtgcccaagcccacgccgaaatcgaggtgctcgccagcatcaaacccctgcaattgatcgccgctgccgttcaggatggtgtcggcaaacccgccgtgctgctgccaccgggcgcttcgccccatcattacgccatgcgcccatccgatgtcaggcagattcgcagcgccgatctgctctattggatcggcccggacatggaggcctttctcgagccggtactgaaaggccgcaaggggccgagcgtggcgatgcagtcgttgcccggactgaccctgcgtcacttcggcgaggctgccagcgagcacgaggccgagcatgatgatcatgacgagcacgcccacgaagcgcacgacgaccacgccgagccggcacacgacgaacacgcgcacgaagcagccgacgtccatgccgacgatcacgacgatcacgacgaacacgaccacgcccaccgccccggcagcctggacgcgcatctctggttgttgcccgccaatgccgtgacgatcgccgaaagaatggcgcaggacatggccaaggccgacccggccaacgccgagcgctaccagaccaacctcgccgcgttcaagcagcgcctgggtgccctcgatgaacggctcggccagcgtctcggccagatccgaaccaagccgttcttcgtcttccacgaagcctacgagtatttcgaagccgctaatggaatcaagcacgccggcgtgttcagcggcggtggcgaagcccagcccggggcacggcatgtcgccgccatgcgtgagcgactggagcaggccggcccgagctgcgtgttttacgaacccccggtgcgtcctcgcctggccgacagcctgaccggcggattgccggtgaaagtcgccgagctggatgcgttgggttacggcatcgacgcctcggccggtggctacgagcagttgatcgacgaccttggcaattcgctggccggctgcctggaatcgctctgatcctgcttgtcggcgtcaggttgccggctggcgcttgaacgggtcgctcgtcggccgacttgatgcgcgtcattagcgcttccagcctgcgtgactatgcttcgtgctttggattccgttccattgacacgaggatacgcagcacatggcgaagacggacgggcccattgcgacgaacaccagaaccctctccgatatcgccctgcaggcggcatccgaggacatctgggcgcagaaataccgactgacccgcaaggacggcacgccgatcgacgatagcgtcgacgccacctggcagcgggtcgcgcgggcgctggccgaggtcgagccgaccaagcagcgcgagcactggtatgagcgcttcatctgggccttgcgccatggcgccattccggccgggcggatcatttccaatgccggtgcgcaggactacaagccggccacctcgaccatcaactgcacggtttccggcaccatcagcgactcgatggacgatatcctcggcaaggtccacgaggccgggctgacgctcaaggccggctgcggcatcggttacgaatacagcaccctgcgcccgcgcggctccttcgtttccggcgccggcgcgcacaccagcgggccgctgtcgttcatggatatcttcgacaagatgtgcttcaccgtcagctctgccggcggacgtcgcggcgcgcagatgggcaccttcgatgtcggccatccggacgtgcgcgaattcatccgcgccaagcgcgaggatggccggctgcgccagttcaacctcagtctgctggtcaccgacgagttcatgcaggcggtggaggccgacgccgagtggccgctgatcttcccggtgcacaccaaggaagccgccgagctggatctgcaagacgccgaacaggtgctctggcgcgagtggccggtgcaccacgactacatcgtccgcgaggacgggctggttgcctgccgaatctacgggcgcgtcaaggcgcggcatctgtgggacatgatcatggtctccacctatgactacgccgagccgggtttcatcctcatcgaccgggtcaaccagctgaacaacaactggtggtgcgaagcgatccgcgccaccaacccctgcggcgagcaaccgctgccgccctatggctcctgcctgctgggctcgatcaacctgacccatttcgtcatcgacccctttggcgccgaggcgcgtttcgactgggacacctaccgcgaggtggtgcgcgtcttcacccgcatgctcgacaacgtggtggagatcaacggcctgccgctggcgcagcaacgccacgagatcgggagcaagcgccgccacggcatgggcttcctcggtctcggctcgaccctgaccctgctcaagctgcgctatggcagcccggaagcctgcgtattcaccgaggaagtgtcccgtgagatggcgctggtcggctgggagcaggcgctcgagctgtcaaaggaaaaaggcccggcaccgctgctgacggacacgttcgaggtcacggccgagatgctccgcaagcgcccggaaatgaaaaaggacggctacaaggtcggcgacctggtcgccggtcgcgtgctgcacgccaagtattcgcgctatatgcagaagatcgccgagtacgcgccggagctgatcgaggcgctggccgagcagggcgcgcgcttcacccaccacagctccatcgcgcccaccggtaccatcagcctgagcctggccaacaacgcgtccaatggcatcgagccgagcttcgcccaccagtattcgcgcaacctgatccgccccgggcgcaaggccaaggaaaagatcgaggtgttcagttacgaactgctggcctatcgcacgctgatcaacccgcgcgccaagcccggttcgaccgagccgggcgagaagctgccggactacttcatcaccgccgacgacgtcagcccgactcagcacgtcgacattcaggccgctgcgcagcgctgggtcgactcgtcgatctccaagaccgccaacgtgcccaccgactacccgttcgaggcgttcaaggacatctaccgctatgcctggcgccagggcctcaagggctgcacaaccttccgcttcaacccggccgccttccagggcgtgctggtcaaggaagccgatctggagaagacgctgtaccgcttcaccctcgaggacggcagcgtggtcgagctcaagggcaatcaggaggtcgaatacgacggtgaggtgaacactgccgccaacctgttcgatgccctgaaagaaggctattacggcaagtattgagccccgaccgatagccgggcggcgcgggccgtccggatggagaaaccgcaatgaccgtaaagatcacccagcgcatcaagggcttcaaggttgtcgacgagaccctcgagcgccccgccgccaccactgaaagcacccccggcaaggcggcggtggtggagatggacgagagcctgcagcgcccggaaaccctggtgggcatgacctacaagatcaagtcgccgctgttcgagcatgcactctacgtcaccgtcaacgacgtggtgctcaatgccggcacgccgcacgagcagcgccgaccgttcgagatcttcatcaactcgaaaaacatggaccatttccagtggatcgtcgcgctcacccggatcatgtccgcagtgttccgcaagggcggcgactgcaccttcctggtcgaggagctcaaggccgtgttcgacccgcgcggtggctacttgaagaagggcggcgtctatatgccatcgatcgtcgccgagatcggcggcgtgctggagcggcacctgatcgccatcggcatgctcgagggtcatgcgctggacgaaacccagctcaagtacctggccgaaaaacgcgccgcctatgaagccagccagggcgccgccacagtggagccgggcgagggcttcccggcgggcgcgcagctgtgcagcaagtgcagcacccaggcggtggtgcagatggacggctgcgccacctgtctgaactgcggtaactcgaagtgcggttaggcggggcggtgcattgcattacgccttcggatcgtcggattacgcctttggctaatccaacctacgttggcttgggtgagttgtaggacggaatcgccgcaggcgcttccgtggctcaccgcctcgatcgggccgggcgataatcgccgccgcggcccgatcgaatttcaggtcaccacgcgatagcagggctcgtacggccggccgccgggcagcttcatccggtgctgctcgacgaaggcctgcagcaggcgatccagcggcttcatgatcgtctgttcgccatggatttcgtagcggccgtaccgctcgatgcggcggatgcccttgtccttgacgttacccgcgacgatgccggagaacgcgcggcgcaggttggcggcgaggatatgcggcggcacctcgcgggtcagttgcagactggccatgttctcgtgggtcggatcgaagggatgctggaaaccttcgtcgatcttcaacagccagttgaaatggaaggcatcgttgcgctcgcggcggaactgcttgaccgccttcagcccgtcgaccatctgccgtgccacttcggccggatcatcgatgatcacctgatagagcttctgcgcttcgtcgcccagcgtcgcgccgacgaaatcccgcagctgctggaggtagggcgccgcgctctcaggcccggtgaggatgaccgggaacggcagctcgcggttgtccggatgcagcaggatgccgagcaggtagaggaattcttccgccgtgccgacgccgccgggaaagatgatgatgccgtgaccgacacggacgaaggcttccaggcgcttctcgatgtccggcaggatcaccagctcgttgacgatcgggttcggtgcttcggccgcgatgatgccgggctcggtcaggcccaggtagcgcccgccaatgatgcgctgcttggcgtgggcgatggtggcgcccttcatcgggcctttcatcacgcccgggccgcagcctgtgcagatgttcaggttgcgcaggcccagttcgtggccgacgcgcttgctgtacttgtattcctcgctgctgatcgagtgaccgccccagcacaccaccatgttcggctcgactccggggcgcagggtgcgggcattgcgcagcaggtggaagacgtaatcggtgatgccctgggagctttcgagatcaatgcgcgggctgcccagttcgctctcggtatagacgatgtcgcgcaacgcgctgaacagcatctcgcgcgtgctggcgatcatctcgccgtcgacgaaggcgtccgccggtgcgttgagcagttccaggcgcacgccgcggtcctgctgatggatgcgcacctcgaaatcgtcgtaggcctcgagaatggtcttggcgttgtcgatgcgtgcgccagtgttgaggatcgccagggcgcattggcgaaacagcgtgtaggtgctgccgcaaccggcttcgctgagttgctgaacttcacgttgagacagggtttccagactgcccttggggcttaccgaggcgttgattacatagcgtgaggtcattcgtgttgtccctgaaaacaatgcgacctggctggggcggccaggcgcatcaggataagcgtcgatgccgggggccgcgacgcgtaaggaaggtgatcgggccgggagttgcgccggcgtgcaggcctgcagacggcggcgagaggcttcgcggtggcaagccgatgatcggcaagggccatgttaccccagccgctttgcgccgggctcccggcctgcgacgttgggcgccgatgcgctggcattgatgttttcagcccgttccggggcactgtttcattcatgcgtacatcccgtacgactccttgtgtcaccgtctttgacagcggacgaggtcgtttgagtgcacggggcacgaatggttttgcggcggcagttgcctggggcggggcggctgcgcctcgccggcgttcaaaacgcaaacggcaaggcgctatcgcattgctggcgagcggcgagcaggcggcgaaactcgtccgggtccttgatcagtacggcctgcccggcgaaggcctgcgcggcgatcagacgtgacagccagaaacgtacgcaggccacgcgcagcatcggcttccacagttccgcttcggccggggtgaagcggcgcagggcggaatacgcggcgagcaatgcctggcagcggtcctcgtccagctcgccgttcgggtgtgtgcaccagtcgttcaccgcgatggcgatgtcgtagagcatcggcccggagcaggcgttgtagaagtcgatcaccccggtgaggtggttgccctcgaacaggacgttgtcgcgaaacaggtcggcatgcaggttggcccgcggcagggcgagaatcttcggcttgagctcggccatctcggccagggcgtcgcgcagtagcggcaactgatcctcgtcgagcgacaaggccaggccggggccctcctgctgcatccagtccagaccgcggtcgctgcgccgctcgagcaggttgtcgcgggtggcaaggtgcaggcgtgccagcaaccgaccgacctcgctgcagtggtgcgggttgggcgaagcgacatgcttgccgggcagtcgtggctgcagcagcgccggcttttcggccagcgagcgcagggcttcgccgcggtcgtcgcgcagcgcataagggaccggcaggccggcgcggtgcagcacgtcgagcagctcgatgaagaacggcaggtcctggctgggaccgcgctcgatcagggtcagaacgtattcgccctgctcgagactgacaaagaaattgctgttctcgctgcctgcggcgatcccctcgaaggtgcgcaggcgcccgagccgatagggcgccagaaaggcttcgagttcttcgcgttgcagcggcgtgaataccgacatgagttgcttccgttaacgtcgttgctgcgttaccagctgaatatttcccaggctgggatcagcatctccggcttgtcggctcggatgaagttgctgtcgccgtcggcgcgcaccagaaagtagggcttaccgtgcttgggtgtgattttcaccgcgtagaggaagccattgacccggtattcctcgacggtccggtcaccctcctggcggatggtcacgtcgggttcaccctcgaccgggtcttgagcgaaaccgctcagcggcacgagcgccagcaggctggccagcatcagaggtttgatcgcacgcatgataaccttgtccctttgtcgccaagtggtccgatgcattctagctgcggtcccgccgaaaaggttgatcctgctcatgagccaaacgcccctcgttctggtggacggttcgtcctacctctaccgcgcctttcatgcgctgccgccgctgaccacctccaccggcaagcccaccggggcggtgaaaggcgtgctgaacatgctcctggcgctgcgccggcaatacccggacagccccttcgcggtggtcttcgacgccaagggcccgaccttccgtgacaccctgttcgccgaatacaagtcccaccgaccgccgatgcccgatgacttgcgcagccaggtcgaaccgctgcacgccagcgtacgcgcgctgggcatgccgctgctgtgtatcgatggcgtcgaggccgatgacgtcattggtacactggcgcgccaatgcgcggcgctcaagcgcgacgtgatcatctctactggcgacaaggacatggcgcagctggtctgcccgcacgtcaccctggtcaacaccatgagtggcagcgtctacgacatcgaaggcgtgaagaacaagttcggcgtcggtccggagctgatcatcgactttctcgcgttgatgggcgacaaggtcgacaacatccccggcgtgccgggcgtcggtgagaagaccgcctgcggcctgctcaacggcatcgcaggcggcctcaaggggctctacgagaacctggacaaggtcgccgagctgccgattcgcggcgccaagtcgctggccgccaagctcgaggagcatcgcacggcggcgttcatgtcctatgagctggcgacgatcaagatcgacgtgccgctggacgtgcaggtccaggatctgatgcccggcgagccgcaccgcgaagcgctgatcgcgttgtaccgcgagctggaattcaagcagtggctcgacgagctgctgcgtgaagccaaggcggcgggcgagaactgcgaagtgcagcccgaaggctgttcgatccaggccgaggccgaatacagcacgatcttcgagcaggccgaattcgacgcctggctcgaacgcctgaaggccgccgactgcttcgccttcgataccgagaccaccagcctcgatgcgcagaaggcgcagttggtcggcgtctccttcgccatcgaggcgggcaaggcggcttatgtgccgcttggccacagctacatgggcgtaccgcagcagctgaacatggaggctgtactggccgcgctgaaaccgctgctgcaagaccctggcaagcgcaagatctgtcagcacggcaagtacgacatgaacgtgctgatgcactacggcatcgagatgcgcggcatgaccttcgacaccatgctcgaatcctacgtgctcgacgccaccgccacccgccatgacatggacagcctggcgctcaagtacctcggccgcggcaccatccgcttcgaagacatcgctggcaagggcgccaagcagctgaccttcgaccagatcgccgtggagcaggccggaccctacgccgccgaagacgccgacgtcaccctgcgcctgcaccagacgctgatgggcaagctggaggccaccccgtcgttgctcaaggtgctcaacgaaatcgagatgccgttggtgccggtgctggcgcgtatcgagcgcaacggcgcgctggtcgacgccaacctgctcgggctgcaaagcgtcgagctaggcaaccgtctggtcgagctggagcgcgaggcgtacgagattgccggcgaggaattcaacctcggttcgcccaagcagctctgcgcgattctctatgacaagctcggttgcccggtgctgtcgaagaccgccggcggtcagccgtccaccgccgaaagcgtgctcgccgatctggccgacaaagattacccgctgcccaaggtgatcatgcagcatcgcagcttgagcaagctcaagggcacctacaccgacaagctgccgcagcagatcaacccgcgcactggccgtatccacaccagttatcaccaagcggtggcggcgaccgggcgcttgtcttcgtcagatccgaacctgcagaacatcccgatccgcaccgccgaagggcgacggattcgccaggccttcgtcgccgcgcccggctacaagctgctcgccgccgactactcgcagatcgagctgcgcatcatggcgcacctggcgcaggatgccggcttgctatacgccttccagaacgatctggacgtgcaccgcgccaccgcggcggaagtgttcggcgtcgcgctggagcaggtgagcaacgaccagcggcgcagcgccaaggcgatcaacttcggcctgatctacggcatgagcgcctttggcctagccaagcagatcgacgtcagccgaggcgacgcgcaggcttatatcgaccgttatttcgcccgttaccccggcgtgctcgcctacatggagcgcacccgcgcccaggcggctgagcagggctatgtcgagacgctgttcggtcgccggctgtacctgccggaaatcaattcgaagaacggggccatgcgcaagggcgccgagcgcaccgcgatcaacgcacccatgcagggcaccgcggctgacatcatcaagcgcgccatgatcgccgtggacggctggctgcagcagagcggactggatgcacgggtgatcctgcaggtgcacgatgaactggtgctggaggtacgcgaggatctggtggagcaagtgcgcgagcagatctgcccgctgatgagtcaggccgctcagctggacgtgccgctgctggtcgaggccggagtcggcaacaactgggacgaggcgcactgagttacccaggtaggcggacgatggcccggctcgccaccgttccagcggctgccggcgatagggtcggcgtttggagaaaaatatttccatccgcattgaacttgcggagcaacagatcggtctgaggctacgaagggtgtaaaagcccttcgatgctccttgttgtgttaagtgttggcagatctctggacctcgccctagcggtccggatttggacctcgaacttccccctcccccaacgaagttcgaggtttttttttcgtcccgagaaaagtgccgggacggcaggccggttgttcacgcggcgtgctttccggctcgcgcgctgcttttgcgtaggagcgacctctggccgcgatctggggttttgcgtggctatggttcagcgcggctgcggttcgcaagcagagcttgctcctacaggggacgggcgtggtgcgtctggttggcacgggcgctgcttttgtaggagcggcctctggccgcgacctgcggatctgcgtggctgcggtcctgtgtggccgcggttcgcaagcagagcttgctcctacagggggcgggtgtggtgcgtctggttggtgcggcgctgcttttgtaggagcggcctctggccgcgacccggggatctgcgtggctgcggtcctgcgtggctgcggttcgcaagcagagcttgctcctacaggggacgggcgtggtgcgtctggttggtgcggcgctgcttttgtaggagtggcctctggccgcgacccggggatctgcgtggctgcggtccagcgtggctgcggttttcgcaagcagagcttgctcctacaggggcgggtgtggtgcgtctggttggtgcggcgctgcttttgtaggagtggcctctggccgcgacctggggatctgcgcggctgcggtcctgcgtggccgccgttcgcaagcagagcttgctcctacaggggcgggtgtggtgcgtgcgcggtgggcgtcagggtagctgcagcccgccggccgccttgtgcaagctgcgcaggtggttgccgatctgagtgagattggtctcgacggcctccagttcgtcctgacgcgcctggcccagcagcaggcggacttgttcgttgagcgcttcgctgagctggctcaggcgcgcctggcgctcgctgctggcctgctccagccgctgccactcgctggcctgcggcaggccgtaaccctgttcgtcgagcagctctgcagggcgactgaggtaaccgctgttggcgaggatgccctgcaaggcttcgtcggccttggccaggctggcatcgccgcgcttacgtccgcccaggtagcgcttcttaagttcctcctgtgccagcagcaggtgtcggcgcagtgcggcttgctccaccagcaacagagcggcgcttgcgcgcaggtcagccttctcgatccagggccggcgttgctcggcgctgagttccagccaggcttcgacatccgtttggggcaggcccaggcgttcgcgcagcacggcaaacatggcctggtagcggtcgcggtaggaatcgaagcgatatcccaggcgcagtgcctcgcgcggatcatccagcacgctggcgtcagccaggcctcggttgatcaggagttccagtagtccgctgggcaggatgctgtccagcgccgtgagttcggggcgcgcggtgccgctgcgcagcagtttcaaggtctcaactgcgcagttgttggagaggaaatagtagttgccgtcgtagctccagtgcagctcggcgctgcgtgcgactaacgcgtcgatttcgtcgcgttgcaacttgagcgggatcgaggcgaggctgcgcagctcgaccttggtgtattcgtcgattacctggcccagcggcagtacgaacaggcgtgacggatagacgccggtgaggccgtcccagctggacagctgcacgtcgccgacaaaggcgcggaaggacagcaccagatgatggtcgagatccagccggcaatccggcccgcgcgggcggccgggagcgcagatgaccaggcgcagcatgctgtggccccagcggctgacccaggcgtcgttggcttcggcgaataggtagtcgacggcatagacccgttccgggtcgagctcgagcaatggtgtgcgggcgaagtcactgccggcgttgagaatcggcaggccgctttcgcaggcttgcacgttcgctggctgccagccgaaatgctcgcggaagtatcggtgcagcgatggtcgccggcatgcgtagctcgggtcgagaagaaagtattccaggttcaccgcgacgaattcgagcgggttggtcagctcgtatgcgtcggggctgcgtgccacctgggcgttgtctcgctcgcgttcgccgcgctggccgacacgctgcggccagccggccaggtcgagcaggcgcggatcgtcgctgagggtgaagcggcgctcggtcttgccgcggcactcatcgggcagtccgaccttgccaagactactggcgcgctggtgacagaacgccagctgccgatggctcgtcgcggaccagaggcgggagcggtcgtagagatggccgagttcgtggatcagcgttgccagcaactcctggcgcaccgtgccgtgggggcgcgcggtgcgttgcgtggccgcccggccgtcggtcaaggctggcagcagacggcggttgagcaacaacgtacggccgccggcactgccgtagacgtcgtgattcagccggtcggaccagcgcacctgcacgtcccggtcgagccgctcgatcatccgcggcggcaggaccgccatggcttcgctgagcagttgccgggtggcggcccgttcggccggagcaaggtcgccatcgtccggcgtcaggcgcagggcggcctggcacagattggtcgtcatgaccaatgccacgacggcccaccaggcgcgcggtgatctcactgggcgaggatggtttcggccaggaccagatcactggcctgtcgtgcttccgggaaggcttcacgcaggctgccgaaggccgcctccaggcgtgctccgcggagttcaccgccactggcaacgaagcctgctgcctcgtcacgcgcctcgctgaccactttcatgtcgctgatgcggctggtcacgtcggaagtgaagttgatgcttcgatcgagcgcgttgatgacgatgttgctggtggccaccagcgtctgcgcctgggcgccgccggcgaggagggtcagcgtgagcggcacggcgatcagcttgaagttcataacggtgctcatgaaaaagggtgggtcattggacgaggatcgcctcggccagttcaaggtcgctcgcggcgatttgcggatgctgctcgtgtagccagcgcagcgcggtttccagccatgggccacgctttgccccgtggctggcgacgaacacggccgcgtcgtcgcgcgaggcgaggatcagtttgttgtcgaacggagcgctggtcacctggctggcgacgtaggtggaggcgacgctgccgccgatgaggctgtcgaatgcctgggcgctgccgcagaagcagcagccgacgagagtgaggtaaagcggacgcatgtgaatcctgaagccgaacaatcagccgccaaggctagcgaaacgccagccacagggccagcgtcgtgctcgccgggaactgcgtgtcagagcgccaggattgcgttggccagctgcaggtcgctggcgtgcagctccggcgcctggctgcggatgtgtttcagcgcagcctccagctgaaccccgcgcgcctggccgttactggcgacgaaacgggcggcgtcgtctttggcgttgatcaccagcttgtcgtcacccaggttcgaggtgatatcggacgtaccttccacggtattaaccagcgaggcgccgatggcatcgatggtgccggtgaagctgccagccgagacaggaccggcgaccaggcaggcagccgtagcaacggacaacaggtacttgttcatagacttctccaggctggggtggcattgcgccgtcaggtgctttgaccatcaggcggctagggccgttcagcttaggctgcacggcctcgcctgggaagagcggcctcattgccagaacggcttgtccagctcggccattcgttcgctatggctgatgccgatgtcggacagctggtggtcgtccagcgctgccagttggcgccgggtgcgagcccgtcggcgccacagatgcagcagttcgaccaagcggcccagcgatagcgagccagtagcgagcctgagggtgcggggcagtacgcgttccatctgccttctccttcccgcctagtcgcggggatgagtcacgggtagatagggtcgcgcgccgcgctgttgcgtaacagccacaggggctgtggattgtgccggttcagttgcaggcggtggacaactgtaccgctgtttcgtcgacgaaactgttcgctcgactcagcctcttgcggacgaggcgctgagcatttcgactggccggatctcgaaatcgcggattaggaagtccatacgctgctcccggaaggcgcgcatgtgcgggagggcattgtgcgccgccagatgctccggcgactgccagacctcgaagaatatgaacagggtcggatcctgggcgtcgcgcagcatgtggtattcgaggcagccctcctcggctcggctggcgtcaacgtagccggcgaacagggcctcgaactccgcggatttttccggccgggtgtaggcatgaaggatgaaggcacagcggtcattcatgggtctgctccagggtgaggtgagacctagcctaaggcaagaacgaggtgccgattcgtgaccttcagtcaaatcgcttttgcttgaagcgctctgtttcgcccctgagcgaatcgttaggctgctcgccattctcacctggatacgactccatgaaaaacgtcctgctcctcaacggcgccaagcagttcgcccattccgacggccgctacaacaccaccttgcacgagactgcgctgagctttctcgatcgagccggtttcgatgtgcagcaaacccatatcgatgccggctatgacctggccgaagaagtcgccaagttcctctgggcggacgtgatcatctaccagatgcccggatggtggatgggcgcgccctggacggtgaagaagtacctcgacgaggtgttcaccgagggccacggcagcctctacgccaacgacggacgcacgcgttccgatgcctcgcagaaatacggcagcggcgggctgttgcagggcaagcagtacatgatttcggcgacctggaacgcaccgcagcaggccttcgacgatccgaccgacttcttcgaaggtcgcggcgtcgatgcggtctattttcccttccacaaggccaacgagttcctcggcatgacgggattgccgaccttcctctgcgtggacgtgatgaagcgtccggcgatcgaggccgacatccagcgctacgaagcgcacctggccaaggtgttcggtagctgaccgggcaagaaaaaacccctcgcggcgatgccgggaggggttcttgtattgccggtgtcgcttattccacggccttgaccatgtcctcgacgaccttcttggcatcgccgaagaccatcatggtcttgtccatgtagaacagttcgttatccagaccggcgtaaccgctggccatggagcgcttgttcacgatcacggtcttggccttgtaagcctcgaggatcggcatgccggcgatgggcgacttcggatcgttcttcgccgccgggttgaccacgtcgttggcgccgagcaccagcaccacgtcggcctggccgaactcggagttgatgtcttccatctcgaagacctgctcgtagggcacttcggcctcggccagcagcacgttcatgtgcccaggcatgcggccggcgaccgggtggatcgcatacttcacggtcacgcccatgtgcgtcagcttctcggccagctcgtttagcgcatgctgcgcacgagccaccgccaggccgtagccggggacgatgatcacggtatcggcgttcgacagcaggaaggcggcgtcatcgctggaaccggatttgaccggacgctgctcctggctgcccttggccgggccggcatcggcgtcgccaccgaagccgccgaggatgacgttgaagaacgaacggttcatcgccttgcacatgatgtacgagaggatcgcgccgctcgaacccaccagcgagccggcgatgatcagcatcgagttgttcagcgagaaaccgataccggccgccgcccagcccgaatagctgttgagcatcgacaccaccaccggcatgtcggcgccgccgatggggatgatgatcagcacgccgatcacgaaggccagcgccaccagaatcatgaacgcggtgaagttgccgctgaaggtgtagatcaggcccagcaccagaatcgccacgccaacggcgaggttgatcttgtgctggttggcgaacaccaccggcgcgccctggaacagacggaacttgtacttgcccgacagcttgccgaaggcgatcaccgaaccggagaaggtgatggcaccgatggccgcaccgaggaacagctccaggcggttaccggccggaattggatagccgatggcctggacgatgcccagcgactgcggctcgagtaccgcggcgatggcaatgaataccgcggccaggccgatcatgctgtgcatgaaggcgaccagctcgggcatcttggtcatctcgacgcgcttggccatcagcgtaccggcgctgccaccgatcagcagcccgaggacaatgaagcccaggccggcccagggactggcgctctcggccagctgcgcgccgagcttgaacaccaggaacaccgtggtgaccacggcgatgcccatgccgatcatgccgaacaggttgccgcggcgcgaggtggtcgggtgcgacaggcctttcagagcctggatgaagctcaccgaagcgatgaggtagagcagggtgatgaggttcatgctcatggcttggactccgccttggcgcctgcgcgctccttcttcttgaacatttccagcatgcggcgggtgacgaggaagccaccaaagacgttgaccgcggccagggtcacggccagggtgcccatcagcttgcccatcggggtgacggtcagcgcggcggccagcatggcgcccacgatgacgatcgccgagatggcgttggtgaccgccatcagcggggtgtgcagcgcgggggtgacgttccagaccacgtgatagccgacgtagatcgccagcacgaagatgatcaggttgtagatgccatcagaaatcatgtccatgttcgggctcccttaaccgttggtgcgcacgacctggccgtcgcggcacatcaggcacgcggcgacgatgtcgtcttcaagattgagctggaacctggcttcgccatcgatcaccagcttgaggaagtccagcaggttgcgtgcgtatagcgcggatgcatccgccggcacgagggtcgccaggttggtgtagccaaccagtgtcacgccgtgcttgaccaccacctgatcggcttcggtcaatggacagttgccgccctgcgaggcggcgaggtcgatcaccaccgagccgggcttcatctgctgcacggtttcttcctgcagcagcgtcggcgccttgcggcccggaatcagcgcggtggtgatgatgatgtcggcctgcttggcacgttcgtgcacggcctgcgcctggcgcgccatccagctggccggcattggccgcgcatagccgccgacgccttcggcgcattcgcgctcttcgtcggtctcgaacggcacgtcgacgaacttggcgccgagcgactcgatctgctccttcactgccggtcgcacatccgaggcctcgatcaccgcgcccaggcgcttggccgtggcgatggcctgcagaccggcaacgcccgcgccgaggatcagcacccgtgcggctttcaccgtaccggcggcggtcatcagcatcggcatgaagcgcgggtactggttggcagcgaccatcaccgccttgtaaccggcgatgttggcctgcgaggagagcacgtcgaggctctgcgcgcgcgaggtgcgcggcgccgcttcgagagcgaaggcggtgatgccgcgctcggccatgcgtgcgatgttttcattgtcgaagggattgagcatgccgaccagaaccgtaccgggctgcatctgcgccagttcggtttcgttcggtgcgttcaccttcagcaggatctctgctgcgaacgccgcagcggcatcggcgatggtggcgccagccgcttcgaaggcactgtccggaatactggcctgtacgccagctccgctctgcaccgtcacccgatgcccttgcccgatcagcttcttgatggtttccggtgtcgcggcaacgcgcgtttcaccgggcctggtttcgagaggaacaccaatgtgcattgttcttgttctcctgcttgatcgtaaccagcggcggtaccggtcgaccggttgtgaaccgctggtgttgtattcgcccggccactgcggtggtgatcgggtgtggatcggctaacggcccctgcactcggtagagcctgcaagcaggctgtgtgaacgcggctacgctcgttcatgctgcgttgaaacacccgaacatttgcagcgcgcaggctgctgtctcgcgtatttcggatcgctgcgctcgagcccggagtagcctgcggcctctactcctggtttttgcgccagcctgaactcgcctcgttacgtttcctacagcctgaccggcgcggcattttgcaatcgcctggataatcaaacaactgttttaatcagaacgagcgggtggcgcttcgttcacgtaatgactattcggttgcgctgcatggctgcaaacagcgcgggtattggcttagacgttcgtctaaggttccataccaggttatgcgcggcgcaatcatgaatgacggaccatagacggtgtactcgtcgtcgggcttgtctgtatgcgaccttggtgccggtcggcgcgtcgaatgctgaaaaaaacgggcgaaagcctgcaatgtcatgccttgctcgtagtccaaagcccttggttgtgcaggcgtcgggactgccgacggacttcgattgcattattggtgagaaattcacatggccgaactggacgtcaacgaaatgaccaccttgctggaggatccggtccagcggcgtttgccgttcgcctttgcgcgccgccatggcgtgatcctgctggatcgtcccgaaggcctgcgtctgtgtgcacgcgaaggcgcatcgttgactgcgttgcaggaggcgcagcgcatcgcgggcggtccgctggcgatgcagtggctggcgcaggatgaattcgagcaggccctgagcgcggcctaccagcatgattcctcggccgcgatgctgatggtcgaggggctcggtaacgacatggacctgcacagcctagccgaccagatccaggaaaccgaggacctgctggagcaggaagacgatgcgccgatcatccgcctgatcaacgccatcctcggcgaagcgatcaaggaaaacgcctcggacatccatgtcgaaaccttcgagaagcgcttggtgatccgtttccgcatcgacggcatcctgcgcgaagtggtgcaacccaagcgtgagctggccgcactgctggtgtcgcggatcaaggtcatggcgcggctggatatcgccgagaagcgcatcccgcaggacggccggatttccctgcgcgtcggcggtcgcgaggtggatatccgcgtctcgacgctgccttctgccaacggcgagcgggtggtgctgcgcctgctggacaagcaggctggccgtctgaccctgcgccatctgggcatgagcgagcgcgaccgcaaggtgatggagcaggcggtgcagaagccgcacggcatcatcctggtcaccggcccgaccggctcgggcaagaccaccacgctgtacgccagcctggtcacgctcaacgaccgcacgcgcaacatcctcaccgtcgaggatccgatcgaatacaacctcgaaggcatcggccagacccaggtcaacaccaaggtcgacatgaccttcgcccgcggcctgcgcgccatcctgcgccaggacccggacgtggtgatggtcggcgagattcgcgaccaggagaccgccgatatggcggtgcaggcctcgctgaccggccacctggtgctgtcgacgctgcacaccaacagcgccatcggtgctgtcacacgcctggtggacatgggcgtcgagcctttcctgatctcgtcttcgctgctcggtgtgctggcccagcgcctcgtgcgggtgctgtgtaatgactgcaaacgtgcctacgttgccgacgaggccgaatgcgcgctgttcggcctcgacccgagcgaggcgccgacgctgtatcacgccgagggttgtgacgtctgccggcagctgggttatcgcgggcggaccggcatctacgagctggtgatgttcgacgactccctgcgcagcatgatccatacccgtgcacccgagcaggacatgctccgtcacgcgcgccggctggggccgagcattcgcgaagacggtctgcgcaaggtgcgcgaaggcgtgaccaccatcgaagaagtgctgcgcgtgacgcgggaggagtaggggtgacggattcgttttgtttcaccgaaaggctcgcggtcaagaccgctcccacgggtacggggtatcgccatgggctgcgcgtcggccgtccagtcagtagcaccgccatggcccgatctacgcatgatgtcgaagacaactccctgtgggagcggtctcgaccgcgagcttctacgcgtaacgcgggacgagtaggaatgaaggatttgcttggtctcaccgaaaagctcgcggtcaagaccgctcccacgggtacggggtatcgccacgggctgcgcgttggccgtccagccagtagcaccgccatggccgatctacgcatgatgccgaggacaactcccacgggtaccgggtatcgccatgggctgcgcgttggccgtccaggcagtagcgcggccatagcccgatctacgcatgatgccgaggacaactctctgagggagcggtctcgaccgcgagtttctacgggtgacgcgggaggagtaggggtgaaggattcgcttggtttcaccgaaaggctcgcggtcaaggccgctcccacgggtacggggtatcgccatgggctgcgcgttggccgtccagtcagtagcgccgccatgcctcgatctacgcatgatgtcgaggacaactccctgtgggagcggtctcgaccgcgagcgtttgactcgctcagagctgcgcctcgcgatgggcaggcaccgactcgccgtgggagcggtctcgaccgcgaatggctcggctgctccggcgaagcttcgatctgatggcggcgttcgaatacattgccctcgacccacgagggcgcgagcagaagggcctgatcgaggcggacagcgcgcggcaggcgcgccaactgttgcgcgagaagcaatggtcgccactggaggtcaagcaggccaaggccaaggaagacagcggtggcggcggcttcgccttcggtcgtgggctctcggcgcgtgatctggcgctggtgacacgtcagctggcgacgctggtgcaggcggcgctgccgatcgaggaggccctgcgcgccgcggcggcacagaccagttcgcagaagatcaagtcgatgctgctggccgttcgcgcgcgagtgctggagggtcacagcctggccggcgcgctgcgcgaatatccgtcggcctttcccgagctgtatcgcgccactgtggcggcgggcgagcatgccggccacctcggtctggtgctcgaccagttggccgactacaccgaccagcgccagcagtcgcggcaaaagatccagctcgccttgctgtacccggtgattctgctagtggcctcgctggccatcgtatccttgttgctgggctacgtggtgccggacgtggtcaaggtattcgtcaacaccggccagcccctgcccgcgctgaccaccgggctgatcgcggtcagcgaggtggtgcagcgctggggctggctgatgctgttgggagccgtcgcgctggtgctcgccatgcgccaggcactgcgggacgagcagatcaggcgccgttggcatgcgttcatcctgcgcattccactggtgggccggctggcacgggcgaccaataccgcgcgcttcgcctcgaccctggcgatcctcacccgcagcggcgtaccgctggtggatgcgctgggcatcgctgccgccgtgatcgccaacctgcgcattcgcgaccgtgtgatcgaggcagcgcagcgcgtgcgtgaaggcggtagcctgacccgcgcgctggacgccaccggcgaattcccgccgatgatgctgcacatgatcgccagcggcgagaagtccggcgagctggatcagatgctggcgcgcaccgcgcgcaatcaggagaacgatctggccgcgcagatctcgctgatggtgggacttttcgaacccttcatgctggtgttcatgggggctgtggtattggtgatcgttctggcgatcctgctgccgattctttctctcaatcaactggtgggctagtgagcatgacgttgaacgaacgcaaacaggggggcttcaccctcatcgaaatcatggtggtggtagtcatcctcggcattcttgccgcgctggtggtgccgcaggtgatgaaccggccggatcaggccaaggtgaccgtggccaagggcgacatcaaggccatcggtgcggccctggacatgtacaagctggacaattactcctaccccagcacccagcagggcctggatgcgctggtggaaaagcccagcggtaatccacagccgaagaactggaaccgcgacggctatctcaagcgcgtacccaaggacccctggggcaacgagtaccagtacctgtcgccgggcaccaagggcggccagtacgacctctattcctacggcgccgatggcaagcagggcggctccgatctgaacgcggacatcggtaactgggatctctgatccatgcctcgagcgcgccgggagggcggcttcacgctgatcgagctgatggtcgtcatcgtcatcctcggcagcctggtgggcctggcggtgctttcgatgggcaacaccagctcgtcgcgcgagctacgcgacgaagcgcagcgactggcgaccctgatcagcctgatggctgacgaagcggtgctcgacaaccgtgagtacggcctgctgatcagccgcgacggttatcggctgatgcgctacgacgaagccgatgcgcgctggcgcgatgcgggcaacgacaaggcgcaccgtgctccggactggatgcgcctggaactgcaactcgatggcgcgccattgaaactggtggcgccggtcaagcgcgaggatgatcccatcgggctgtccgacaagcgcgaccgtgaacgacggcgcgccccgcgggtgcagccgcagctgttgatcctgtccagcggcgaactttcaccgttctccctgacctttatcgaccaacgcccgggcggcagccgttgggtggtgtccagtgatggcttcagcatgccgctagccgagccggaggacgcacgccgatgagtcgtgggcagcctcattcgcgtggcttcaccctgctggaagtgctggtggcgctggcgattttcgccatcgtcgcggcagtggtgctcaccgccgccgggcgcagcctgaacaatgccgggcggctggaggcgctgaccctggccagctggatcgccgacaatcgcctcaccgaactgcaattgcagcagccagccccgagcctcggccgggaagaccaggcgatcgaattcgctgggcgccgctggcagacgctcagcgaggtggaaaccagcggaacgccaggcctgttgcgcatccgggtctgggtggcggcggccgatccgcgtcgcgggcgcggtggcccgatcgaggagcgcgccgtaaccagcctgagcggcttcgtcggggtaccgccatgatgcgtcgcgctccgtccggttttaccttgcttgagcttttgatcgccatcgccctgttcgcgctgctgggcctggcgacctatcgcatgctcgaatcggtgctgcgcagcgatgaagtggtgcgcgcccaggagatccagctgcgtcagttgagccgtgcggtgtggcggctggagcaggatctgatccaggccgtgccgcggccggtgcgtgacggttacggcgatgagcagaacgccttcatcggccaactggcgggcgccgcgggcggggcctcgctggagctgacccgcagcggctggcgcaaccccaccggcatgcgtcgcgccaacctgcagcgtgtgcgctggcagctcgccggcgacacgctggagcggctctactgggtggttctggaccgagacctggacagcgagccgcgggtgcagaaggtgctggacgatgtgtcggcgcttcgcattcgctatctggatgcgagtggcagctggcaggaggaatggccgccgttcgaatttggccgtggtgatccggaggagcaggcgcggcgcatgccggtggcggtcgaggtgtccttcgatcatcagcgttacggcaccatcacgcgcctgctgcgcctgcccgatggcccggccccggcggcgcagtttgttcagcccgattcgcagggcgtgcccgagccggacggtgaaggagaaatgcaatgaagcgccagcgcggtgtcgcgctgatcacggtcttgctggtggtggccatcgtcacggtggtctgtgccggcatgatcgcgcgccagcagttgtcgattcgcggcaccgccaatcaggtacaggcacgccaggcctggcactacgcgttgggcggcgaggcgctggcgcagtcgatcctgcggcgcgacctgcgagcgtccggcaatggcagcgggcaacccgccgtcgatcatctgctcgagccctgggcgttgccgcagccggcctatgatctggacgaaggccaaggccaggtgcagatccgcatcgaggatctggccgggcgcttcaatctcaacagcctggtgcggcagcaacagccgaacgcggcggcactggcgcagtttcgccgcttgctgttgcgcctgcagatcaacgagccctatgccgagcgactgctcgattggctggacagcgaccagcagccaagcggcgagctgggcgccgaagacaacgcctatctgctgctcgacccgccctaccgcaccgccgggcggcggctggacgatctctccgaactgcgcctgctgctggacatgcgcgacgaggatttccaacgtctggcgccctacgtcaccgcactgccggccgacacgccgctgaatgtcaacacggccagtgccatggtgctgtcgagtctcgccgacagtctcaccccgggaattgccgagaccatggtgaaggcccggcaagccgctgcatttcgcgatacggccagcttcatggcgcaaccggcgcttggtggtgtccaactgcaaggcaccaacatcgccgtgaccagtcaattcttccaagccaccagcgaggtgcgcctgggtgaccgccgactggctctggtgagccggctgcggcgcgaggagaacggcgatgtccgggtccttcagcgcaacctggggcagccgccacggctgcctcgtcaaaccaccgatggagaacgatagccgatggactgcctgtttctgcctgccgattgcggcaaccgactcggtgccgactcccagatctactggttaccgggcgagggcgacggcggctggatgtcgctggccagctgcgccgagcaggccccggcagcggtgaccctggtgctgccggccgaggtttgcagcgccgtggcggtcaatctgccgacccgcaaggcgcgctggatcagccaggcgctggcctacgcggtagaagagctgttggccgagaacgtcgacgacctgcacctgacccacggcgatgcactggacgacggccggaggcgagtcattgccgtgcgccgacagctgctggccgattggctggccgacctgcaggcgcaggggctgaccatcgtcgccatccacgtagacgccgacctgttgccccgcgacgggacgcagctgatggtcatcggcacgcgcgccttgctgggcggcgctcaggaagcgcggctggccttcgacctccagcagtggccgcatctggccggccaatgcccgtcgccccgccacggccatggcaccccggacgaagcgccgccgctgctcgacgattatcagccagtcgatgatccctttcgctttctcgccgccgggcgcgctgcggcgctgaatctggcccagggcgacttcgcggtgaaggctgccggcagtgggctgggccggtggaagccggcgctggtagtgctcgcgctggtgctggcggtacaactgatcttcaacctggtccaggcctggtcgctggaacgtcaggccgaacggtacgcgcagtccagccgtgcgctgtacagcgagctgttccccgaagaccggcgcatcgtcaacctgcgtgcgcagttcgatgagcacatcggccagcgggccggagggccttcgggcttcatgcgcctgctcgacgaggtggcgctggccatgaccgaaggggttgcggtgaccgtcagtcagctcgattacaaccaggcgcgcggcgaccttgccttgcaggtccgtgccagcgacttcgcaacgctcgaacagttgcgtcaacgtctgggcgaaaccgccgagaacgttcagctgggctcggccagccgtgacggcgacgcggtcagcgcgcgcgtggtagtcggaggtcggggatgaatctgagacagcaaatgcaggtgcgtttgaccgaatccccgctgtggttgcgctggcagcgcctgcaaccgcgcgagcggctgtccttgaccctgctcggagcgttcctgctggtggtgctgttctacctgctgctctggcaaccggcgcagcagcgcgtacgccaggcccgcgcggacttccagcaggagcggcagttgtacggctatctggagcagaacaccgaactggcgcggcagatgtcgcgcagccagccggtttcactggcgcccgagcaacttcaggggctggtgacccagagcgcgcagcagcggggactggtcatcgaaagcttcgacatcggcaacgacggcagtctccaggtggccttacccggcgcgtcgtacgcggccctgctgcgctggttcgaggagttgcagacggcgggcgcgagcctcgccgaggtcagcatcagccgggtcggtgaaggcgtggtggacgcccgggtgagtttccgcgccggcagctgagtgcggctgcagggaggctggtcagaccgaccaggcgtcaagtccgcagccgagccagagcaaccgttggaatcgctggacgagccggagccggcggttcaggactgaggcgaggttgccgactccgggccgagtgccggcccggagattgcagccgagtcaggtcgcagggtgaatctgcatcgccagggcacgtagcgccgcttcggcgtcgagcaccttgttgaccacatcgttggccttgtcccgactcagtccgaggcgatcgaacagctcatcgggaatctcgccgtaggggccgtcaccgatgccacggttgcgtagcaggcgtaccgccaggcagaccaggttggcatgtccggcatgctcgccctggtagtacggatcgttctggaaacgcagcgcggtggacagttcgtcgggcatgccccagtagcgcatcagccaggcgccgatctgctcgcgggtgatgcccagcaggtgctgttcgatgacgctgtggctcaggtgcgggttgatttccaggtgccggcagatcagcgagaagtgcggcggaaagacgtgggcgaggaccagatagccgaagttgtgcagcagtccggccagatagctcaggccggcctcggggcgctgggtgcgcggaatggcccggttcagcccctcgatgaccgctgcggtgtagatcgcctgctgccagtagggggtggcctgttgcggctggtccttgggcaggctcagggtcttgcccagggccaggcccagcgccaggttgatcaccagatcgaagccgagcacccgcacgatggcgtcctcgaccgagcggatcttgccgggcgctgcgtagtagggggaggccgcccaactgacgacctgcgccgccagggcggggtcggtctccaccacgccggtgatgtcgtctaccgtggcgtcgggatcgacgcgcagcttgatgatcttctgcgccgtctgcgccagcggcgggatctcgatggtttcttccaggcgcttctggatacgcctggcggtgaagctctgcaccgccagggtgatctgtgcgctgtcctgttcgggacggtcgaggttgggcttgatctggctcaacggcacggcgaagcgtccggcgctggccttgctcagcaacagcttgaagtcgttgctcgccatggccagcagcacgcccggctgcccggactcgatgagcagctccggttgttgcagcaggcgctcttcatacaggcacggtgaactggtcaagggcggcaggccgggcagttccttcaggtcgtgcttggtcagcatgcgcatcagtcgctcgggcttgacggcgatcagctggcgcccggtgagctccaccaggctcggcaggtcgagcaggtggtcgcggggatagagcaccagcagcgcgccgatggcatcgtcgaccagcaccgcttgtacgcgccgagaaggatcgtagtccgggcggtcctcgcagatgcggtagggcagcgccagcttgtccagcaactggacgatcattggcgggagcgtgatgttgtggttgctgctggcggccgtattcatgagcgttgtccgtcttattcccaatcggcgcagtatagccttatggttagtgtggtttgggtttgtcgacgagcgtcaaacctgaccgtattgctgtccatggcgcagccagcgctccaacaatgggctgacatgctgcggccaatgtgccagaagcgcctgggcggcgtcacgcaccgccggcagcaggtcagcgtcgcgcatcaggtcggcgaccttgaattgcagcagtccggtctgtcgggtgccgagcatttcgccgggaccgcgcagctccagatccttctcggcgatgatgaagccatcgcaggtttcgcgcatgatagccagccgttcgcgaccgatctgcgacaacggcggatgatagagcagcacgcagtggctggcggcactgccccggccgacccgcccgcgcagctgatgcagctgtgcgagcccgaggcgttcggggttttcgatgatcatcaggctggcgttgggcacgtcgaccccgacctcgatcaccgtggtggcgaccagcagctgcaaccgtccttccttgaattcggccatcaccgcagccttctcggccggtttcatgcggccatggatcagcccgacatggagcccgccgagcgccgccgatagatcctcgaaggtggtctcggcagcctggcaggtgagctcctcggactcctcgatcagggtgcagacccaataggcctgacggccttcgttgcaggccgaacgcacccgctcgatgacttccaggcggcggctgtcggccaccagcacggtgtttaccggggtgcgaccaggcggcagctcgtcgaggatcgaggtgtccaggtcggcgtaggcgctcatcgccagggtccgtgggatcggcgtggcggtcatgatcagctggtgcgggcagagccggccgtcgacacccttgcgccgcagtgccaggcgctgctgcacgccgaagcggtgctgctcgtcgatgatcaccagcgccagccggcggaactgcacctcgtccaggaacagcgcatgcgtgcccaccaccatcgggcagcccgccgcgatacgctccagcgccgcggtgcgcgccttgcccttgagcttgccggccagccaggcaacttcgatgcccagcggctccagccatttgcagaaggtgatgaagtgctgctcggcgagaatctcggtgggtgccatcagcgccacctgatagccggcttccagcgcctgcaaggcggcgagggcggcgaccaccgtcttgccggcgccgacgtcgccctgcaccagccgcagcatgggctcgtcctgggccaggtcataggcgatttcggcgccaacccgctgctgcgcgccggtgggctggaaaccgaggttttgcagatagcgctgcggcagctcgcgcgccgctggcagtggcggcgcgtgctgcgcgcggctgctctcgcgtaggcgttgcatcgacagttggtgagtcagcaactcctcgaacgccagccggtgctgcgcccagtgacggccttcggcgagctcttccagatcggcatccggcggtggccggtgcaggtagcggatcgcttcgtccagcttggccagccgatagtcgcgggtcagctcgtcggggagccagtcgggcaggctgtgcgggccgagccgcgccagcgcctgagcggtcagctggcgcagacgctgctgggtcaggccttcggtggtcgggtagatcggtgtcagcgtctgctcgacggcgaccggctcgctgtcggtcagggcgcggtattcggggtggtagatctccagacctgaggcgcccggtctggcctcgccatagcagcgcacctgggtgccgcgcttgagggcttccttctgcgcctggctgaagtgatagaagcgcaggctgaggctgccgctgccatcgtgcaggcgcaccagcaggctgcgccgccggcccatgacgatatcggcgccggtcaccgtgccttcgaccaccgcgtcctgacccggacgcagcgcaccgatcggcacaatgcgggtgcggtcctgatagcgcaacggcaggtggaacagcaggtcctggagggtttccaggccgaccttggccagcttttcggccagcgcggcgccgacgcccttgattgcggtaaccggcaccgccgccagttcgctcatcggttcaggcgttcgccgccgcgggtttggcgaccgagcacaggcggatggagtcggccaacacctcgatggccttcggccgcgggaagctggcgcgccaggcgatcgccacggtgcggaacggcaccggcgcggtcatcgggcgaatgtccagcacgcccggggagtagtgatggctatcgaccgccgacagcggcaggatcgacacgccgaggccggaggcgaccatgtggcggatggtctccagcgacgacgactccaccgtggtgtggctgggcgcctcgcccttgcgagtggtcgggcaggcttcgagtacctgatcgcggaagcagtggccttcgccgagcagcagcagactcttgtcgttgagcatttccgcgtcgatggtttgctttttcgaccagggatggttggccggcatcagcacgtagaacggctcgtcatacagcggcaaggtcagcacgtcggcttcctggaacggcagcgcgatgatgatcgcgtccagctcgccggtgcgcagcttgtcacgcaggatgtgggtgaaattctcttcgatatacagcggcatgtccggcgccacgcgatgcagctgcgggatcaggtgcgggaacatgtaggggccgacggtatagatggcaccgaccttcagcggcgaggccagctggttcttgccggcctgggccagttcacgaatgctctgcgcctgctccagcaccttctgcgcctgggtgacgatgccctcgcccaccggggtcagccgtactgcgctcttggtccgctcgaagatcagcacgccaagctcgtcctcgagcttcttcacgcccaccgacagggtcggctggctgacgtggcaacgttcggccgcgcggccgaagtgagattcctgggcgagcgtaacgatgtagcgcagttcggtcagtgtcatagcgttattccatcagagtgccggctagcatagcctttgctcgtgttcgaaccaactggctgccagccgttccttcaaagctgatcggcggccgattcgcggcagcgttacacttcattcacgcgggccgaatcggtggtccgcacggttatggagcaaccgccatggcaactcgaccttcggtaatgatcgccggctgcggcgacgtgggtattcgtctcggattgcaactcagccgggcgggctggacggtctatggcctgcgccgccaggcggcggacttgccggtacctatcttgccggtcaagggcgacctgtcggccgcggaggtgccgcgcagctggcccaacggcacgctggattacctggtctacgccgcttcggccagccagcatgacgagccgggataccggtcggcctatgtcgacggcctgcgcaacgtgctcggctggctgcaacagcgcggccagcggcccaaacggcttctgttcgtgtccagcacgggtgtctatgcgcagaacgacggaggctggatcgacgaaacatcgcccaccgagcccaccggctacaccgggcgggtgatgctcgaggccgagcaactggcgctggacagcgggattccggccacccgggtgcgcatggcgggtttgtacgatccggcccggccgtggatgcagaatcaagtgcgcgccggcctgcgggtcgaccgtgagcccccgcagtacagcaaccggatccatcgcgacgacgccgcggcgctgttggcctgcctgctacagaccgatcatgccggtggtgacctggaagattgctacctgggtgtcgacgatgacccggcgccgctgcatgaggtcgtcgactggctgcgcgagcgcctcggtgtgacccagtgggccgagcagagcatgacccgtcgcgctggcagcaagcgctgccgcaacacccgggcacgggcgctgggttgggtgccgaaatatgccagctatcgtaacggctacgccggtatccgcccgggcaagggctgatagttttgcatcccgtcggagtcggcttgggcgcgctgtgcgacatccaaaacgcgtccgcccctttccgcgagcacgctcgctcgcgccagctttttgtaggaaccgggctgcttcgccacggtgctttcgtgggagcggtctcgaccgcgaatgaagtgagacacggatgacgggttcgtttttattcaagcggtatcaggccgcgaggcctatttagtcaggcgttgacgctcgcggggtggccacccaattcgcggtcgagaccgctcccacaggtccggtgtggttcgacctcgaagcagcactgcgaggccccttcacgatcgcatggtgccaacccgcaaacgacagcccgtcggcaatccgccggattcgcggtcatttcccgcaactctgccgccatcgtgcttactaaaactctgatagcacgcacgccacacaccctgccgcatggcagcagtcgggtcaggagcaactgccgcagcgcggcgaagacatcaggaagaaccaccacggcggcgttttcgaacaccgaagcaggagatttttccccatgagagcccttcgctggcacggtaagcacgacatccgctgtgacaaccacgtccctgatccaacgatcgaagatcctcgtgacgccatcatcaaggtgtcgtcctgcgccatctgcggctccgacctgcacctctacgacggtttcatgcccggcatgcagcatggcgacatcatgggccacgagttcatgggcgaggtcatggaggtcggctcggcgaacaagaagctcaaggtcggcgaccgcgtggtggtgcccttcaccatcgtctgcggcgaatgcgaccagtgccgccggggcaacttctcggtgtgcgagcgcaccaaccgcaacaaggacgtggccgacaaggtcttcggccacaccaccgccggcctctatggctacacccacctgaccggcggttacgccggcggccaggccgagttcgttcgtgtgccctatgccgatgtcggcccggtcgtgatccccgacgggatgaccgacgagcaggtgctgtttctcggcgacatcttgcccaccggctggcaggccgcagcgcaatgcgacatccagcccaccgataccgtggccgtctggggcgcggggccggtcggccagttcgccattcgcagcgcgttgatgatgggtgccgagcaggtgatctgcatcgatcatgtgcccgagcggctgtccatggcccgcgccggcggcgccatcaccatcaacttcgatgaggagagcgtgctcgagcgtctgaaggagctgacccgcggcaaggggccggacaagtgcatcgactcggtcggcatggaggcgcatgcggcgcgctcggtggattccatgtacgaccgcgccaagcaggcgctgatgatggaaaccgaccggccccacgtgctgcgcgagatgatctacgtctgccggccgggcggcatcatttcgattccgggcgtctatggcggcctgatcgacaagatcccgttcggcgcggcgatgaacaaggcgctgaccttccgcatgggccagacccacgtcaaccgctggaccgatgatctgctcaagcggattcaggaaggccagatcgatccctccttcgtcatcacccacagcgtcagcctcgagcagggtccggagatgtacaagaccttccgcgacaagcatgacggctgcatcaaggtcgttctcaaaccctgagccagaccctgtgcaaacggctgcgctcggctgatcgccttgcctgagtttggcttgcgatgtttcacagggcccgatagcgccgtctcgtgacgcgaggcggctcctgaggaggtattcccatgagcgttccacatcgtgttacccgtaccaaccattcagcccgcacgctggcccgtggcctcggctggttcagcatcgggctggggctggccgaagtgctgatgccgggcaagctggcgcggtttctcggcgtgcccggcaacgaagggctgatccgcgcctgcggggcgcgcgagattgccaccggcgttggcctgctgctcaccgacgatcccaagccctggatttacgggcgtatcggtggcgacgcgctggacctcgtcggcctgggcctgagcatcgagaacggcaccgaacaggtcaacgcggccatcgccgcgggcgctgtggctggcattaccgcgctggatatttcctgcgccaagggcctggcgagcgaaagccaactggtgaccgaatgggattacagcgatcgtagcggctttccgcagggcaccgatgccatgcgaggacgggtcgaagcggagttcgcggcagggcgcgccgagccgaatggctacagttcgtcgatgctgttgcattgaggctgagggctgagagctggaggctggaccatcgccgcttgggatgggcgctcgatatcgatggcccattgcgtgatagtgcggctccgctgaaaagctcgcggtcaagaccgctcccacacaagcgatgccgcgcgcacggcctcacctgcaagcaccagccctctgtaggagcggtctcgaccgcgaagagtgccgcactaacccctgtgggagtactcaggtacgagcccagcccatgagtacaggcaatcgatgttattgcattaaggctgaggcctatgggttgggccatcgccgcatgtctggacggacctgtgatgtggctgacggaactacctgatagcgtggcttcgctgaaaagctcgcggtcaagaccgctcctacaaaaagcgggggccgcgcgcacgacctcacctgcaagcaccagccctctgtaggagcggtctcgaccgcgaagagtgccagcactaaccccctgtgggagcggtcttgaccgcgaatggctcgactgcatcggggagtccgcaggtacgggcctgtcatggatacagtccgtcgacgctgttgcattgaggctgaggcctatgggttgcaggatcgccgcgtgtccggacggacgtctgatgtagatgacggaactacctgatagcgtggcttcgctgaaaagctcgcggtcaagaccgctcccacaagagcgatgccgcgcgcacagcctcacctacaagcaccagccctctgtaggagcggtctcgaccgcgaagagtgccagcactaagccctgtgggagcggtctcgaccgcgaagagtgcccgcactaacccctgtgggagcggtcttgaccgcgattgagggcaagcatagtcagtaggatgggcgaagcccatcgcctgccagggcgaaaccgcgccatcgatgagctcgattcagcttgagcaaatccaagtgcacccctcgccagcctgcaacccgcgaagatccatttcttgctaaggtctgcaaccggtccgttccggccactgccttccccgcaccgccagcctactggcggccaacctgccgctgagagtccatgtccgccgtcgtcaatgtcgttctgccggtctttgcgctgatcttcctgggctacctgtgtcgccgcaccgggcgcatgggcccgaccggggcctccgagctgaaccggttcgtggtctggctggggttgccggcgctgctgttcagcgtcgtcgccaattccacctggcagcagctttggcagccgggctttatcaccgcgttctcggtgggctgcctcggcgtcttcggcttcacgctcggttatcgactgtggcagaggcagcctttggccgacgccagcctcgatgcgctcggcgcgtcctacgccaataccggttatatcggcattccgttgtgcatgctggtgctcggtgacgaagcgctgcagccggcaatggtggcctcgatcatcgtggtgtgtgtgctgttcgccatcgcgctggcctgcgtggaaaccggattgcacgccgggcagggcttcagccggacgctgcgcaaggtcagcgtcgcgctgctgcgtaatccgctggtggtggcgccgatgctgggtgggttgtgggcggcgggcggactggaactgccggtgccgctggcgacgctgctgaagttgctcggcgcggcggctgcgccctgcgcgctggtgtcgctggggttgttccttgcgcagccgcagccgggcggcaagatcggcggcgtatggccgttggtcacattgaagctgttggtccagccgctgatcacctggttcctggcgttccaggtcttcgagctgccggcgttgtgggcctattccgcgctgttgctgagcgcgctgcccaccggcaccgggccgtacatgctcgccgaattctatggccgcgaggcgtcccgcgtgtcgcgcgtggtgctgctatcgacgctcggctctctgctcacgctgtcggcgtgtctggtgctgttgccggtctagatgggcagctcgggtcgatgggttgcgcccatcctacggatctgttgcccatatgaaggtgcgtgataagcctgcggcgttcaccctacgcctgggccggtcgtagggtggatggccaccccgtggaaaaccgcgaagcgttttccactcggtaacgttcagcccgccggacgcgtcacttccaacacgaccgcggcgatccggtcgcattcggtataggcgccatcgagcagttcctcaccgaagacgtctgggtcgacttcacggtatcgccattccagcccgcggccttcgaggcgttgttcgatttcgcggtggaacgggtcttgattgccgtgcatcgccacgccggtatagagcagcaaggtgccgcacggggcgagccgctgcagcgcactgtcgaaaatcgccagggacagcccggccccgaggggaccgccaccatggcgataggcacgctcgtccggatcgaccaggtagggtgggttggccaggatcaggtcgaattcgccgtcgacgtcattgagcaggtcgctgtggcgcgctttgagattgtcggctccggccagtgccgcgttgatacgggtcatgcgcagcgccgacgggttgatgtccaccgccagcacctccgcctgaggccgcgccaatgccgtcaggatagcgcccgcgcccgagccgcaaccgatgtccacggcgcgaccgatatgccctttgtggttgttcagatgggcctggatggcgttggcgaagcgataggtatccgggccgaagaacaccgcgtccgccgcgtcggtgggataggccgaatgcacgaacaactgaccgtcgaggctcgatagccgcacccggctgcgccagcgcgaatcgcaaggcgcaagcacgcccgcctgatccatcaggctgaagatcgaagagggcagcagctcgtgctggaagggccggctccaaccaaagacgccggccaggtccttggccagctggttttcgacccgggcgttgacccgctcgtgagtcaggggcgtgggagtgatgaagtggtagccgcgctcgcgtagcgcctgcgccagctgcagcagtgcgcggtcctgggctgtttcagtggtcatgtgtttcgcttccctggcgaggtttcgccttcaattgaaaagtccggtaaagcgccgggtggccagcaggccggcggcgctgtggtggcggctcggggccagcagcggcagcagatgacgcatgcgtgcctcgcgggtcggcagttgcgccagttgcgcttccagcagctgggtttcctggtcgaagtcgctcacgacatgattctgctcaggcgcaggagtggcctgcgaggggggctcgttcactgcgtgcgggcgtggggccggtgtggggcgtggccggccgcgggctggcgcctgctctgccagccagtcaccggcgatccagtcatggatcagctgctgctcatgggcgctgaagacaccgaacatgggcgcctgctcaccggtgatcaactgccagaagcggctgagctgcgggtcggcgtggcgcttgatccagccgcgacgctgcagggtctcgaggaactgggtaatccgctccggctccgccagccactggttgaccgtgtagccgtcgaagcggcagtaatccgaatgcacgaactgaccgaccccggccttcttttccagcacgcgtagcacttcctgctccggatcgaacccggcgatcaccgagactgtgctggcgcccaggtcgttgaggcggtaaccgttcattacccggcgatagaattcttcgctgtcgcccacctgcggccaggcggcgagcaggccctggatggcctttttcgcgtggccgttgtcggcgttgtcgaccgtcacatgcagggtgaagtaataagggtcgatgcccagttcggtgagttcgtaagcgctgatcagcaggtgcagcggcagctgctcgtagcccaggttgaagccgatgacttccggcaggaactgctcggcgtgctcggccaaggccagctggatcgcgccctggacgaagttgtcgtcgtccaggctctgccagtcgtcgcacccctggctggcgagcagcttgcggtacagcaccacatggttcttctccggctgcccttcgccgagctcctccaggtaggtctggatcagcgcggtgaaacgcgcgtcgtcccagtgatgcagcaggccatagagccaggcgccgtcgaccagcttggtcggcgccacgccgcgcaggaaatgcagcgcgtgggccttgctggtgaaatagcgacgcggggcgccggcacggcgggcatcgaggtagccctggtactcgccaccgaccctggcgacatgggagtccagccattcgtcgaggccggacggctgctgcggcagatcgcagggcaagcgggcggcgatctccagctgagcggtcaggtattcgaccgcctggctacggacctcctcgcgctcgggcgtgtccagcagggcgaagtaaagcgacctggcggacgcggccgtctcgatgctaacgggaacggcggttacgggcaggcttcgggtcaattgcatacattcacacggcggcagtgagggtcgtcccctgatggtttttgggccatggcgagcagaatttagttcagcgcttctgccgaatggccgaccatcgatgcgtggcgatcggtatgcaacttctgccaatgtcggccttcctaccttgacgggccctatccacatccagacgcaggagaccttcatgaacccaaccgaacgcggcaaggaaaacctcgagaccatcgaagaccgcaaaggcgagcgtggcgagcaggcgagcggcgcgggaaccgagcgcgtacgcaacggtgaggtcgccggcggcgatcgcgatgacgtgccggggggcgcctacaacgtgcccaaggacatggccgaagaggtcagcgacgaccctgctcgccagccgcgcaaggaacgctagcggcccgccctgctggcagaccagggcaacggcggtcacgaccacgtcggcttgcccttgcgttagaaaataccgtggccggcttaatgttcggccgtttgcggtcgcctgctgcctctgaacaaccattggtcggcgccggaccgttccgctccgatacctagcggtcgaacgagacagccgagccctccatgcgccaacactcccgcctcagctttcgtcacctcagccgaatcctggtgaccaatcaccttagcggtgagcccatgggctatctcgccgacctgtcgatgggcggtctgcgcctggtggccaagcagccgcttggcgtgagcggttgctacgagatgattctgcacgtgcccgacgagggcgagcggttgcgcgaggtccatgtcgtggtgatctgccagtgggtgcgcaaggattcgcgccgcgacgccttcgagatgggcttctcgctcgatcggccgagcccggccttcatcgaactggtcggccggttactgcccaggcgccgttgagcctagcgattgaccaccttggccggtagcgcgaccaccagcagcgagccgagtacgaggcaggcggcgaagaacagcagggcgccgccgctgcggcccgtgatgtccagcgcgaacccgatcagggtgttgctcaccaggccggcgatgttcgccaaggagcaggccagggcgaaaccggtcgccgccgccgtgccggtgaggaaggttgccggcaggctgaagaacaccggaaccgcgccgatgatcgccgcctgggcgatggagaacagcagcaccgtcaccaccacgttgtcggtgaacgcggtactggccgccatggcggcggcgccgatccagaatggcaggatgatgtgccagcggcgctcgcggaaccggtcggagctggcgccgagcgcgagcatgccgaacaccgcggcgatgcttggcagcgccgtcagcaggccgatatcggacgcatcggcgacgccggcctggcgaatgaaggtcggcatccagaaccccatggcgtaggcgctgagcaggatcgcgaaatcgatgccgccgagcatccacaccttcaagttgaaaaagccctggcgaaagctgtctccgctggccgggctccgtgcctcgtccaccgtcaggtcgcgcagaagatggccctgttcgcgcaggtccagccattcggcgtcctgtggcccttcgggaagcagccgtaacgccagcagcccgagcagcacgctgggcacgccctcgagcaggaacagccactgccagccgcgcaggccctggagtccgtcgaaggcttcgaggatccagcccgacagcggcgcaccgatgacgctggacaggggcagcccgatcatgaacagcgcgatcatccgtccgcgccggtgggtggggaaccacagcgtcaggtaatacagcacacccggcaggaaaccggcctcggcgatgcccagcagcaggcgcagcacgtagaactgggcaggtgtggtgaccagtaaggtgcacgccgaaagcacgccccaactgaccatgatccgcgcaatccagacccgcgctccgacgcgtttgaggatcaggttgctcggcacctcgaagaggatgtagccgacgaagaacagaccggcaccgaggccgaacgccgcatcgctgagctgcaactggtcggccatctgcagcttggcgaagccgacgttgatgcggtccagataggcggccaggtagcaacagcagagaaacggaatcagacgccaggcgaccttgcggtacaggcgccgcccttcggtgtcctggctcggctgggtggcggcggggccatggggcatcggcgggtcctcgcgggttacggatggacgtggataggggttcgacccggtgggtgccgggattcgttcccgagaatgtctgcacctcgacggtgcgggctggccgcaggactcgatcgattgcgaactctgacggatgggtcgtgtcgcaagccattgcggcgaccctttgccgggttcggcatctcgtgctgcaagcaatcacgccagaggagacgagcatgacttcacagtggatcgacattcccgcgcaagacggcaaaaccttcaagggctacctggcgctgccgccggccggccatggccccggtatcgtgctgatccaggaaatcttcggagtgaacgcgcacatccagtcggtcgccgatcagtacgcgtccgatggctacgtggtactggccccggacctgttctggcgcagcgagccgggcgtccagctcggctatgacggtgacgactgggagcgggcgtttgccctgatgaaggcactggacttcgacctcgccatcgacgacctgcgccgcggcgccgaactgctgcgcgaacgcgacgactgcaatgggcgcgtggcctcggtgggctactgcatgggcggcgtgctgtcctacctgctggcagcgaactcaggcgtcgacgcggcgatctgctactaccccggcagcatcgagaagcgcctggaccaggccgagcggatcacctgcccgacgctgttccacttcgccgaggaagacgaccacatcgacagcgacgcggtcgccgccgtgcgggaaaagatggcccaggtcggccaggcgcagatcgagacctacccgggcgtcgaccatggcttcaactgctgggcacggccggcctacaaccagaacgccgccgcgctggcacacgggcggagcctagtgttcctggcagagcatctataaccaaccctgtaggagcaagctctgcttgcgacccaaagccatgcaggaccacagccatactggtgcccctgggtcgcgaccagaggccgctcctacaaaaagcggcacctgagccaacagacaccacgctgctgcctgtgtaggagcaagctctgcttgcgatccgcagccacgccggaccacagccatgcgctggcccttggatcgcgaccagaggccgctcctacaaaaagcggcacctgagccaacagacacaccacgcacgcttcatgtaggagcaagctctgcttgcgatccgcagccatgcaggaccacagccacgcaggtgcccttgggtcgcgaccagaggccgctcctacaaaaagcggcacctgagccaacagacacaccacgcccgcttcatgtaggagcaagctctgcttgcgacccaaagccatgcaggaccacagccccacgcaggtgcccttgggtcgcgaccagaggccgctcctacaaaaagcggcacctgagccaacagacacgccacgcccgcttcatgtaggagcaagctctgcttgcgacccgcagccacgccggaccacagccatgcggaactcgtattcgcgaccagaggccgctcctacccaaagccgagcggcggaacgcccagccctcgttcaatcgagaggccccgactgattaacccagcgtcccgaggatatttaccccgacgcgatccggaatttcgttctgcgacagcacgtgcaaccccgggctgaacacccgtgcgtagcgcgacagcagcgggcgcagctgtggcatcacggtgaggatcggcgggtggccgtccttgcgcagcttttcctttaccaccggcatgctgttctgcagctggttgagcaggctcggctccaccggaatgttgtccaggctcacctgaccagcctgctgggcgatcgccagggcattgagcagcgtgttttccagcgcattttccagcacgaacaccgccagttcacgacggtctcctgcaatcatcgagacgatgctgcggcgcagggcatagcgcacgtcggcggccagcagcaccgggtccttggtggtttcgctgcattcgagcagggtgctggcgatggtttcgatgtcgcgcagcggcacctcttccagcaacagctgccggtagacgcgcatctgctgggtgtaggtcagcgcgcccttgaggctttcggcgagcctcggagcctgcagcgtcaggcgctgcatcaggtgctcgacgtcgtcgtgcttgaacaggtccggcaaatgctcgcgcaccaccttgttcaggtgcgtggcgaccacgctggcacagtcgatgacctgataaccgaggttcagcgcgcgggatttgtccgacggctgaatccagaccacctgcatgcggtaggccggatcggtgccgaggatgccgtcgatctcgccgtagagttccggcgacggaatggccatcaggcggtcggcgtgcagctcggcgccgtcgatcttctcgccattgatgtagatgtcgtattgcgaagccttgagccgcaagctgtcgcgaatctgcacttccggcagcaggaagcccaggtgctcggacagcgtctgccgcaccccgcgcacccgcgccggcagtggcgcgccggaggcttcgttgaccagcccgaccagcttgtagcccagcgaaatcgacagtcgctcgaccagcgggatgtcttcccaggccagcgtctgcgccttttccttgtccatcgcctggccgatggcctggatgtccttgagatcggcgccagcggccggcggctcgtgcagcgccacccgccagccgatgaaaccgatcagcgcagcaaaaccgatgaacgccagatgcggcatgcccggcaccaggccgagcacgaagaggatgccggccacggtatacagcgaggctgggttggccagcagctggcgctggacctggctggtgatgtcgctggactcgttgatccgggtgacgatgattgccgcagcggtggacagcagcagcgccgggatctgcgccaccaggccgtcaccgatggttagcagggcgtactgcttgaaggcttcgccggccgccaggccatggacgaacacgccgatggcgaaaccaccgaacaggttgatcaagaggatcaggatgccggcgaccgcatcgccgcgaacgaacttcgaggcaccatccatcgcgccgtagaagtcggcttccttggccacttcctgacggcgcgccttggcttcttcgttggtcaccaggccggcgttgaggtcggcgtcgatggccatctgcttacccggcagggcgtccagggtgaagcgcgcggtgacttccgagatccgctcgccgcccttggtgatgacgatgaagttgatgatcatcaggatgatgaacaccaccagaccgacgatgaagttgccgccgatgaccacctcaccgaaggcttcgatcaccttgcccgcggcgccagtgccggtatgaccttcgagcagcaccactcgcgtggaggcgacgttgagcgtcaggcgcatcagcgtggtgatcaggattactgtcgggaacagcgagaaatccagcggacttttcgacgacacgctgaccagcagcaccaggatcgacatggcgatgttgaaggtgaacagcacgtccagcagctgcggtggcagcggcaggatgatcatcgccaagatcgacaggatgatcagcgggatcccaatccgaccgctgctgaaggtcggggtcagtttctgaatcaggctcatgatcgcgctcggttgaacagttcttcgggaatatgaatgtcgctggccagccggggcttggcccggcggccctgtttccaggctttgagctggaggatgtaggtcagtacgtgggctaccgcggtgtagagcggcgccggaatctgctggttgacctgggtgctgaagtagatcgcccgcgccagcggcggcagctcgaccacttccaggttgttggcctgagccagcttgcggatgtacagcgcggtttcatcgacgccgcgggctatgacgaagggtgtttcggccttcttcgggtcgtacttgagcgccacggcgtaatgcgtcgggttgacgatcaccacatcggcgtccttgatcacccggctgatctgccgctgggccagctggcgctgcaactgcttgatccgcgccttcacctcgggccggccttcctggttcttgtgttcttccttgcgctcctgcttggtcatgcgcatttttttcatgaagaagaaacgttgcagcggcacatcgatcagcgagaacagcaggaacaccatcagcagcgcgatcgccagatcgaaggtcagcgaaaaggcacttccgatggcgttgctgatgtcagtgcgctgcaaagcgatcagcttgggcgcggcgtaatagagctggccaacggcgacgccgagcaaggtagtgatcttcagcagcgacttgagcaactcggtccagttctgcgccccaaccatccgccccaggccagtaatcgggttgagtttgctgaacttgggggcgaagttcttcgacgcgaacacccagccgcccggcaccagggcgaaggcaatgaccaggatcggcgtcaccagcaacggcagcagcacgctgatgaacaccagcaggttgtgggtgaggatcagctgcagatcatcgagcgtcatctcgctgtgatgaaagttgatgtacgagtagctgaacgcctgctgcaggccatcgaaaaagaaaccaaggctgaacttcaacaccagcagcgtcgccagcaacgagacggtggtggcgacgtccttggagcgggtgacctggccatcgtcgcgactcttcttgagtttctgctcggaggcctcttctgtcttgtcctgggtgctgttctcagacattgcggccgctccgcaagatctcaccgatgttgccgagcaactcgcgggtcaggtgcaggtaggcttccgacaggttcggcagcgtcaggtagatcagcgtcagcccggcgatgatcgccatgggaaagcccagcgaaaacaggttcatcgccggcgaaatgcggttgagcaggccaaagcagaactgcaccagcgtcatgcagaagacgatgggcagggcgatcagcagggccgcggaaatcacccaactcagcgacaacgcgatggtttgcaggccgtcgaagtgaatgccgctgccgatcggccagaagatgaagctctggtagatgatggtgacgatcaccagatggccgtcggtggcgaagaacagcagcgccagcaggatgaagtacagctggtagacgatcgaggccgaggacacgccgttcatggggtcgttgaacacggccatggataggcccagctgggtcgaaacgatatcgccgatcagggtgaacacggtgaacaccagcatcagcgccacgcccagcagcagacccatggcgatctgctcgagcgcggtgaggatgcccttcatcgacagcgggtcgatgggcgccgtcgccggcaaggcggcggtgagcaccacggtcagggcaatggccagcagcacacgcacccgcacgcttaaggacttatggctgaacatcggcgccaggctgaacacagccatgatccggcagaacggccaccagtagcccagcaacgattgcaggtattgaccgacctgcatgatgggttcgttgcccacggctaaccgaccagccgcccggcttgggtgaaggtttcgatgaacaggtcgctgaaggtgcgcaggatccagtgtccggcgaacaccagcatgccgagggtgatcagcaggcgggggaggaagctcagcatctgttcgttgatctgggtggcggcctggaaaatgctgatcagcaagccgccgagcaggctcggcaccaccagcacgcagaccaccagcacgatgacgtgaatggcgttggagacgatgttgacggcggtgtcgggggtcagcattcgggcacctgggaggtgagggcttgtgcgctgcttggccgagtggcgagcggcagctttggttgtgcttttcgtgggagcggtcttgaccgcgaagcctttgggctctgggtccgcgcggttacagccgttggcagggttggctgaggcattggtttcgccctgctgggcgagtcactttttcttgtgtggccaagaaaaagtaaccaaaaagaaggccacccctgcatccgggttttgcttcgcaaaacttccctccctccggcgctgctccgggggatcggactaggcgccccctcacgaagggacatccatgtcccatcactcctcgctcggcatccatgcctcgcgtccccctgcgcagcacctacgctcggcctcctgaagggggatctagtccgagttgccttaaagatcgtaaacagcgaaacaagcgcgcttcgcttgtttgctggcgagcgagctgccagaagcctcccagcacctctctcagatcgtagggtgggtaacgcgaagcttacccaccgatttttgtcggcgaagttcgataccgattgcagagtcgattgcgatggaaaatgcttcgcagttttccaccctacgaatcgcccacagccactggtcaattcaccttggttcgaagcggctttgtgcttttccattgcacgacctaccagacgccgccgaacgcccctttcagaaggccgaatggaatcgctgcgtagaggggcgagcggcatggatgccgcgagagccgtgaagggccatggatggcccttgcgcggcgaccctcggagcagcgatggaatgagggaagtcgagcgcagcgagacccggatgtaggggcaagactttttggttccttttggggcaactgccaaaagggactcgcccagcagggcgaaaccattgcgtcggccaactccgccaacgggccctaggcaaggaagcccaagcccaacagcttcgcggccaaggccgatcccacaggagtgcactgcctccccgctctccaaaccccaccgcacggcaaccgcatccatccccatcacctaaaacggctgaatactggtggtcagggtccccatcaacaacgcccacccatccaccaacacaaacaccatcagcttgaacggcagcgagatcatcatcggcgagagcatcatcatgcccatcgccatcagcacgctggcaaccaccaggtcgatcaccagaaacggcacgaagatcatgaagcccagctgaaacgccgtcttcagctcgctcagcacgaacgccggcagcagcagcgagaagtccaactcatcgaggttctcgggcacttcctcaccagccagcgagaccatggtttccagcgacgtcttgttggtctgcgccagcatgaaacccgagaggctggttttcgaaatgtccagcgcctgctccaggctgatctcgtcgttctggaacggctcgaatgcatggctgtggatttcctgccacaccgggcgcatcaccagcagggtgacgatcaacgcgatgccgatcagcacctggttcggcgggctctgctgcaggccgatggcctgacggaggatggccagcacgatgatgaagcgggtaaagcaggtcatcatcatcagcatcgccggcaggaagccgagcagcgtcatgatgatcaggatctgcagcttgacgctgaattcctggccgttctcggtatcgttcagattgaacagcgtgatctcgccgccggccgcctgggccaccaacgggaacagactgatcagcaacaggcacagcagtaacagcccgtggtgcagtttcattgcgtcagagcatccaggccgacgccggacagttcgacgatgcgcaggccgtagctgccattcatcaccaccacttccgccttggcgaacagggtgccgttgaccttcacgtccagcggctcgccggccaccttgtcgaggacgatgacgctgctggtgtcgcactccatcagttctttcagcgagatttcggcggaagccacttccagcgtgacgttgaccggaatcttgccgaagaagctcaggtcctggcgcggtgcctgaggcttgggtgcggccgcgggtgccgcgtcttcggcgccatcgaggctcaggtcgccctcgttgatgaggttctcgaattcgttgtcggacagttgaccggtcattgggatttcacgctttcaagtgaagtgaggaacaaggcgccgtcttcttcgaagacagtcccccgaaagagcttctgctggttgatgcgcacctcgtagcgatccagcgggcgcaccatgagaatgtcgttgagctgcagggcaagcacttgcgacagcggcatctgcaccgaggcgaccacgcagtcgaggcgtaccggcagatgctgaatgtggtcgagcgggttgccgctcaggcgttccggtaacgggccggccaggcgcatggtgagttcatcgaccagttcggcatccagataaatgaatatcgacgagcggctatgggtgagatggctgatgtattcgaactcggccacatattcccaagtggtctcttcgtaatcattttcgtagcgctcaagttcaccgaatgtgccaccggatagcaaagagcgagcgaagatatagctcaggtccaggcccaggcgattacgcatccgttgttcggaagtgctcagcggcggcgtgtcctgattgggcacgatagtgccgccgtagtaacactcgagtgcttcggtcaatagggcgcgatcgattgcgaatccaactttacccatgggcgaacggtagatgcagtccggcccctgtttttccgcttcctgcacttcgaccttgctcaattcaaggctgatccggtagttgcgcaggaagtaatcccccatcaagcgcgggttcttgttggtggtttccttgatgaactggggaatcttgtggtgatgccggccaagcttctgcggtttcaatacagtcaggctttgggcgggcacgccatggtggacttttgaattgccagacatgttgtgaacggtatttcctggttcttgcgcggctggcgaagccggtcgcgcgggtattaagcagaaggatgtttggccagggagggggtgccatacccaggatggcaggcacggctctagcgtgccgccagtctaggcttgggcgcgagaaaggattaaatcaataggtatcaattgatcttttttgagatcagctgtgagcaattgatttaattttagcggaactgattgggcggttccgggcgggcttgttagcgtgcgcgcaattgtttcggagcggtcggtcgcagttacctgtctcgttcggcgagttggacaggcagggcgacgaaagttccagaaggcttaaatattttttcagcgaatccggcgttgtgctcgagcaacaggcgtaacgacgccaaggtggtcacattgaacagtgtcagtcatgcaatgaactactcgtgcgaagagcggttcgctccagcgccggcgcgcaagaaaatccttatcctgggtaatcctgcagaagcgggttgcgagttcctggaagcaggtctgcgcaaggcaggttgtgcggtcttttcatatgccgatgtgaatgatctggataacgccgccctgaagggcacgtcgctgattttttatgtcatcagcggcatgcaacagtcagccttatatacgaaggtcgattcgttgattcgtcgcggtcgctccatcagtgttattccggtcgtgcaatacgccgaccaggaaaaagccgccgccttacttgagctgggttgtgtcgattacctgttgtcgccattcagcgaaactcagttaagtgcgctgttgcgtcgccaggaattcgccgatgccgcgcaggagagtttcgtctcctgttcccaggctggccgccgcctgctggcgatggcccagcgggtatcgctgacccgggcgccgatcctgatcaccggtgaaaccggcaccggcaaggagttgatggcgcgttatatccatcgcttctcggccagcgccgaggcgccttttatcgcggtgaactgcgcggcgatcccggagcagatgctcgaatcgattctgttcggtcacgagaagggcgccttcaccggtgcggtggcggcgcagccgggcaagttcgaactggccaatggcggcaccctgctgctcgatgaaatcggcgagttgccgctgggactgcaggccaagctgctgcgcgtgctgcaggagcagcgcgtcgagcgcctcggcgggcgcaaggaaatcgagctcaacgtacgcatcatcgccgccaccaaccgcgacctgcaggtggaagtcgccgaaggtcgcttccgcgccgacctgatgttccgcctcgatgtgctgccgctgcatatcagcccgctgcgtgagcgcaaggaagacgtactgccgctggcccgccgcttcgtggccaagtacgcgccgcaggaagccgacgaagaactgttcaccagcgaagcctgccgcgccctgctgcagcacgattggccgggcaatgcccgtgagctggaaaacaccgtgcagcgcgcgttggtgttgcgcaatggcctgttcatccagccgcaagacctcggcctggcagccccgccgcaagccgaagtgcgcagcgagcggctgccgcagcccacggtcgagaccggcaaagcggccctgcgtgccagcggcaagtgggccgagtaccagcacgtgatcgacactattcgcaagttcgacgggcacaagaccaaggccgctgccagcctcggcatgacctcgcgcgccttgcgctaccgcctcaatgccatgcgcgagcagggcatcgagctgaatttctgatttttaccagccaaggggagagccagtgatgagttccatcacgcaggtgcagcaggagctgctgggccggatgcagcagctccaggaggtcgcctccagcgcggcaatcaagccagctgagcaggcggcgcccgacgcgggcgggttgttcatggcagcgatgcgctcggtcgatgcacagcagcaccaggccagcacggcgatggccgcggtggacagcggcaagagcgacgatctggtgggagccatgctcgacagccagaaggccagcgtgtcgttttccgcgttgctgcaggtgcgcaacaaactgaccacggcgttcgacgacgtcatgagaatgccgctttgacgcggcgtgagagctgagccgtgcttgagaaactgaagagcaagctgcctgccggcgggctgcaactggacccacgggtaaccctggccgggatggcggtaatcgccgccgcgctggctgtcgccgtggccttttacctgtggcgcgacaacggttcgttccgcccgctgcacggtgccggcgaagccttcccggccgccgaggtgatgcaggtgctcgatgccgaggccgtgcaataccgcatccatccgcagagcgggcagatcctggtgcgcgaggaccagctgtcccgtgcccgtatgctgcttgccgccaagggcgtgaaggtgtcgatgccggcgggttatgagctgttcgacaaggaagagccactgggcaccagccagttcgttcaggacgtgaggctcaagcgcagcctggaaggcgagctggcgcgcaccgtgatgtcgctcaagggcattcagcatgcccgcgtgcacctggcgcaggaggagaacagctccttcgtggtcagcaagcgcgcgccggccaaggcctcggtgatgctgcagctcgaacccggctacaagctgggcgccgatcaggtcggtgcgatcgtcaacctggtggccggcagcgtgcccaatctcaagccagaagatgtcggcgtagccgatcaatacggcgcgctgctgtcgcgcggcttgaatgtcggcggtggcccggcgcagaactggggggccgtcgaggattaccagcagaaggccgtagccaacattgaagaagtgctggcgccagtgctgggcagcggcaactaccgcatcagcgtcgcggccgatatcgatttcagccagaaggaagagacgctgcagtcctatggcgaaaccccgcgtctgcgtcgcgaagtgctgagcaacgaaagtgcgctggatcagctggccctcggcgtgcccggctcgctggccaaccgccccgtcgccccaccgaaggaaggcgaggaacccaagccggccaagggcgaaaccaagggcgcgacctccctgcgtgaggagtccacccgtcaactggattacgaccagagcgtgatccacgtgaagcacgccggtttcaccctgcgccagcagagcgtcgcggtggtgctcaatgccgccgccgcgccggaaggtggctggagcgacgaggcccgcgccgaactcgaggccatggtgcgcagcgcggtcggcttcaagcaggcgcgtggcgacttgttgaccttgagcgtgctgcccttcgccagtgtggacaccgccgttgacgaagtgccctggtgggaaaacagccaggtgcatgacctggccaagctgggcgtcgccggcctgatcgcgctgctgctgttgctgatcgtggtacgtcctgccgtgcgcagcctgacccagcgcaacgcgccggccgaggccgatccggtggcactggaaggcaccctggcgggcgcgtcggggccgctgccgatcgaggccgagagccgcgctgcactggccagcccgcgtccggcaacggccgatggcgcgagcatcttcggcgaactcaacccgctctcggaaatccgcctgccggcgcccggatcggggctggaattgcagatcgagcatctccagatgctcgccaagaacgacccggaacgcgtttcggaagtcatcaagcattggataggccgcaatgaaagagacctcaacccagccagctgagccggcgaccggctcgagcaaggaaatcaaagcgcgcccggtgcacctgcgctcggtgagctcgctggaccaggcggccatcctcatgctgagcatgggcgatgacatttcggctggcatcctgcgcaacttcacccgcgaagagatcatcagcatcagccaggcgatggcgcgtctgtccaacgtcaagcagccgatggtgtccgacgtgatcagccgcttcttcgacgactacaaggagcagagcagcatcaagggcgcctcgcgcacctacctcgccggaatgctcggcaaggcgctgggcggcgacatcacccgctcgctgctcgactccatctacggcgaggaaattcgcgccaagatggcgaagatggaatggctcgatcccaagcagttcgccgcgctgatcgccaaggaacacgcgcagatgcaggcggtgttcctcgccttcctgcccccgggcatggccaccgatgtgctcgaatgcatgcctgccgagcgtcaggacgagctgctctaccgcatcgccaacctcaacgaggtcaacagcgatgtgatcgccgagctcgagcaactcatcgatcgcagcctgcaggtgctctctacgcaaggctcgcaggtgcgcggcgtgaagcaggcggccgacatcatgaaccgcttcaagggcaatcgtgaccagatgttcgagctgttgcgtgctcacaatgaagagctggtcgagaagatcgaggatgaaatgtatgacttcttcatcctctcgcggcagaacccggatgtgctgcaaaccctgctggaagtgattccgctggacgagtgggtggttgcgctcaagggcgccgaaccagcactggtcaaggcgatccaggcggcgctgcccaagcgccaggcgcagcagatggaatcgatcaaccgtcgccagggcccggtgccgctgtcgcgggtggagcaggtgcgcaaggacatcatggcggtggtccgcgagatgtccgccgatggcgacctgcagattcaactgttccgcgaacagaccgtcgagtaagcgccgatgagcatcaagatcatcaagggcgaaggtcgcgcctggcgtccgttccgcttcccgcctcgcgtgcgcagcgcagccgaaatcgctgacagcatggctggcgatccggcagctctgcagcgcgcggtcgccgatggctttcaggaaggcatcgacaagggttacgagcaaggcctggagcagggtcgcgaggccgggcatcgcgaaggtttcgagcgcggtgtcgaggacggcaaggcgatcgggcgcgaagagggccgtgtcgcgggtcgtcgcgccttcgacgaggcggcccgaccgatggatgagctggtcgagcgcttcgagcgcttccggcaggaattcgagcaggcgcgccgcgaacagttgttggagctggtgcagaaagtctccaagcaggtcatccgctgcgaactgaccctgcacccgacgcagctgctgaccctggccgaggaagcgctggcggctatgccgggtgaccaggaggacgtgcgcattctgctcaaccccgaggaatgcacccggatcaaggagctggcgcccgagcgagcggcggcctggcgactggtgccggacgagaagctggcactcggcgagtgccgcgtagtcaccgcgcaggccgaagccgacatcggctgccagcagcgcctggattcgtgcatggaaacgctgaccgaacacatccgggcggaagcctgagatgtccctgcgcgagagcttccggctcgacgaggcgttgcgctcgctggatacggtgcagctggcgaaggtcagcgggcggctggtgcgcgtctccggcatgctgctggaaagcctcggctgccagcgcatgaccggccagcgctgcttcgtcgaacagggcgacggcagcatgctcgaagcgcaggtggtcggcttcaaccgcgacatcacctacctgatgcccttcaagaagccggtggggctgacggccggctcgcgcgtatttcccgcgccggacgacgccaagctgcatatcgatgaatcctggctggggcgcgtggtcaacggcctaggcgagccgctggatgaaatgggcaagctgagcgggcgcgatccgctgcccaccgaattgccctcggtcaatccgctcaagcgcaagccggtctgtgaaccgctggacgtcggcgtacgtgcgatcaactccatgctcaccctcggcaagggccagcgtgtcggcctgtttgccggttccggtgtgggtaagagcgtgctgctggggatgattacccgccagaccaaggcggacgtcgtggtggtcggcctgatcggcgaacgcggccgggaagtgcaggagtttctgctgcattcgctgggcgaagagggcctgaagaaggccgtggtggtggtggcgccggccaacgaatcgccgctgatgcgcctcaaggccaccgagctgtgccatagcatcgccgcttatttccgggaccagggcaacgatgtgttgttgctggtcgattcactgacccgctacgccatggcccagcgggaaatcgccctggccctcggcgagccgccggcaaccaagggctatccgccgtcggtgttcggcatgctgccggagctggtggaaagcgccggcaatggcgccaacgacaacggcagcctcagcgcgctgtacacggtactggccgaaggcgacgaccagcaggacccgatcgtcgactgcgcccgggcgattcttgacggccacatcgtgttgtcgcggcgattggccgatgccgggcactatccggccatcgacatctgtgcctcggtcagccgctgcatgagccaagtcggccagccaccgcacctgggggcggcgcggcagctcaaggagttctacagcacctacgagaagatcaaggagctgatcccgctgggcggctacagccccggcgcggacatcaagaccgaccgcgccgtgcagctggcacccaccatcgaacgcttcctgcgtcaggaagtgggcgaggcggcggagctggaaaccagtctcaccctcctgcagagcatcatcaggaagccatgaaacagcagatcgaaacgctcacgcgcctggccagcctgcgcggcaaccgggtcaagcagatgctcgggcaggttcagtaccagcagaacctctgccagcgctaccgcaacaacatcaccggcctcagccgcctgtgcggtttctccgtgccaatgagcacgccgctgcagcgcgacaaccaacagcgttacaaggccacgctgtacaagatggtcgaactgcaacggcgcgaactggcggtggccgagcaggccctggcgcggatccagcaggaattgctgcaggccatgcgcagcgagaaggtggtcgagcacgtgatcgaggccaagatgcagcagtggcagcagctgctgatgacgcaggagcagaagatccaggatggcctggcggcgcagagctggtggcgcaatcagattgcttgatggggttggactccgagttcgcttggctccgccccctcaccccagccctctccccagaggggcgagggggcgtgtatggcgtgatggatgggtgggaggctggatgcagtggtcgggcgaaggttgagcaaaggcaatccagacacaccggcagcggctcgcagggccgactctctaccttatcgcgctcaaggtggtctggcggcgcagggctggtggcgtaaccagattgcttaatggggttgggctccgagtttgcttggctctgccccctcaccccagccctctccccagaggggcgagggggtgtgtatggcgtgatggacgggtgggaggctggatgcagtggtcgggcgaaggttgagcaaaggcaatccagacacaccggcagcggctcgcagggccgactctctaccttatcgcgctcaaggtggtctggcggcgcagggctggtggcgtaaccagattgcttgatggggttgggctccgagttcgcttggctccgccccctcaccccagccctctccccagaggggcgagggggcgtgtatggcgtgatggacgggtgggaggctggatgcagtggtcggcgaaggttacgcaaaggcaatccaggcaagccggcaacgatccgcagggccgactctctacctgatcgcgctcaaggtggtctggcaccgcagagttggtggcgtaaccagattgcttgatggggttgggctccgagttcgcttggctccgccccctcaccccggccctctccccagaggggcgagggggtgtgtatggcgtgatggacgggtgggaggcttgttgctgtggctcggcgaaggttacgcaaaggcaatccgggcgtgccggcaacgacccgcacggccaactccctcttcctgagggcgcaggaccagaaggttcaaggatggcctggcggcgcgaaggccaccctgggcacgctggcaaagactcgcacggccaactccctctccctgcttgcggggagagggctggggtgagggggcgtgctcgagtacggcatcggcggatcggctggaaacgctccgccggtccgccccgacaaaaaatatttaaggtttccgcctgagcggtcgcttgtttggcagtaaccaccgagttggaacgacatcatggaaatcagccggcacttcaagcccgccatcacgacgcccgccgagccgggagcgacccgtccggtcgccgctcgtcccaccgcacagcccgccgcccgccaggccggcagcttgccgctggagcagatgcacgacgcgctgcgcgcgatgcccgaggtcgatctggatcgggtagcggccatcaagcaggcgctgcagcgcggcgagatatccaccgacgtgggtgatctggccagcagcatgctcagctttcaccgtggaaacgatgcgtgagccagcgtgaaaagctgctggccgtcgtcgatgacgacctgcaacaggactgcggcgattatctcgccttgcgcgagctgatgcaggagctgtacgggcgtctgctcgagcgggacgtaccggaaatcgaccgcatcaacttgcagatcaccgtccgcgtcgaagccattgccgcgcgtgcgcagcgccgcagcaaggtgctggcggcgttccggctggagacctccagcgtgggcatgcgtcgcctgctggccagctgcacgggtgagcgcggcgaatcccttcagcagcattggcggcaggtcggcgatctggccgtgcagtgccagcagttcaacgagcacaacggcaagctgcttgccatgcatcacgacatcctgcagcagctgctcgccggtgggcaggacgctcggctctactcaccgcaggcgtactgagccacatagcccggcgcgcgaatcctccggcttgaggagtgccagcgagccggggcttacagcccctctactctccgcccggccaaggccggccgcttcgctgatgccatgccgactacgaatggctgacgccgatcctgcacctcgccgcccgtgccggttttgcatgcgcgacctataaacagccagcaggcttcggcccgaaggtcgaagcacaacgcttgctattcgtaggggctgacttgccggctgatcggcgtgcgccgcctcaaccgctcagagcgcttggctccgagcccggcccgcccgcaacgcggcatcccgcgacaatgccgcatctctgcaagcggaagaattaatccatttccgctaccgctttaactacctcgcctctgacgtcgcctttacagacagatgttccgccagcgttcgaagcggaaacggtacttccccgtttcctcgtcgcatcgtttagcggaagccttttttctgcatggccggcgctgaaacgcccgtaaacagggcattcgagacctggcatccaacttgctctacctgaatcaagaggggatggtgatggctataaattccgattacgtacagcagatgtcgacgcagttggcgacctacgaggttcagtcttcgttggatcggcttaatcgcaacgaatcgcgctacaaggcgcaacgtgaagcgctgagtgcgctgcgtacctcgctgagcaccttcaagtcagccatgaccaagctcaacagcagcacgtcgagcatgctgaccaacagcgcaaccttcagccaggagggctacgccaccgccaccgtgggcaccacggcaaaggctggcgcctatgacttcttcgtcgagcgcctggccagcaagcagcaggtcgcggtacagggcctggtcgatggcagcctgagcggcaccctgacgctgaacgcccaggctttcgacctgagccagtacgccacgctgggcgatgccgccacggccatcaacgacgccggtctcggtgtgcaagcgaccctggtacgcagcaacggcgcggtcagcctggtcgtcagcagcgagcaaaccggcgctgccaacgcattcagccacagcatgacgggcaacgcagccgccaccacgacagagctgtccactgcccaggacgccatggtccgtctgggtggcagctatggcgcgggcggcatcgagctgaccagcgccagcaacaccttcatggacgtcatcgacggcgtcagcctgaccgtaagcaagacccatgcggcgggcgacaccccgctgaccgtcacggtcggccaggacaaggccggcacccaggccaaggcgcagaccttcatcgacgccttcaacgccctgatgaccagtttcgattcgctcaccgccagtggcagcgacagcgccaagcgcggcgtcctggccggtgattccggcgtgcgcgccatcgagagccgtctgaatggcctgctgcgtgccgacttcggcggcaagagcctgatcgatttcggcatcagtgccgaccgtaacggcaagctgacgatcgatgccaagcgcttcgaagccgcggtcgcctacgatccagcgggcttcgaggagctgttcaccggcaccgacaagctgctcgacagcatggacaagaccgtcggcagttacaccagcagcaccaacggcctgctgaagaaccgcatggacacgctggacatgaacctgcgccgcatcgacgagcagttcgacaccctccagcagcagtacgacacccactacagccgctatctgcggcagttcaccaccatgatgcagaccatgcagagcatggagcagaccagcggaatgttctcgatgccaaccacatcgcaagctaacggattgttctcatgaacggctatcacccgaacgacagttacgacagctaccgcgcggtagacctcgaagcgcgtgcagcctccgcgtcgccctatgagctggtgctggtgctgatggacggcctgctggacgagctggcccgggcccgcggccacatcgagcacaagcgctatcagcagaaaggtctttcgctggaaaagtgcatgaacatcctcaacggccttaacggcgcgctcgatgaagagggcggcggcgaagtggtgcaaggcttgtcgcgtctctacgagtactgcatctatcggctctcggacgtcagcgtttcgctgtcgctcgaagggctggacgaggtgatcaacctgctcggcattctccgcgagggctgggagggcgtcagtgccgcccgtaagtgacagcgaacgcctgatggcgctgcacggcgagttgcaggcggcgttgcagagtggcgactggaccgcggtcgccgcagtcgatgcggcgatccgccagtgcctggtgacgctggccgggcggcttgagctggacgagtcgacgcacgcggctagggaccgtctcaagcagctccacggcgaaggcctgcaagcctgtgcagaagagtgtgagcgcttgcgcctgttgctgttgaaccacctcgaatacgccgaagggcgtgccgcctatcagcgcattgacatgttccaagccggagacaggggatgatccagtcgatatcagccacgcgtgccgccgcggccagtggcgagtccgcatcgccggccgctgcgcgcgcgggtcagggcgggcaggccactgccggccgggcgatggcaggcgatgccatgcgtgccttcggcgagcgcctgcggcaggctgcgaccgcagatgatgagctgccctcggtgcctgccgcctcgttgccgggcgcgttgcccgttgtggcggccgagcagggccaggtcgcgcaggctggcggaacggccagccagggcagcgataaaccccaggagctgaccccggagcaatggctgctgagcatgatcgaccagcaattggccgagatccaggcgcgcgacgcggcacaggcggacgccatgcctgcccagctaccgccggcgctgccggacgccggcaacgccgcaagcgaggcgccgttcgccggtatggcggagcaggtacagctatcccaggcgccatccgtgaccgctgcgaccgatccgctgaataccgctattgcggcagcgcctcggcgaggcgccgtcgaggcgagtccgttgacggcagctctgtccaaacccgccggcgagatgggtctcgtgcaaccggctggtgtcatggccacgccgctcgaggcgacgtcggccgccgcactggaaccgctgctggagaccaccgagtcgcaggattccggcgacccacttgccgctgcggtcgagcgcggacaagccacaccgctgcactcggctgaccgcacgctgaaactccaggcaccggaagccaaatggggcgagcagatgctccacgccttgcgtgagaacgtcgatctgcagattcagcagaaggttcagaacgccaccatccgcctcgatccgccggagctgggcagcatggaaatcctgctcagccacgagtcgggccggctcaatgtgcacctgtccgccgcgaacgccgatgtggcgcgcctgctgcagcagaccagtgatcggctgcgccaggagctggtgggccagcatttcgtccaggtcaacgtgcaggtcggcgccgacggcggcggtcagcagggccagccgcgccaacgcccgctgctggctggggacgaggcgccgctggcggcccggccgcaggagcaggagccggagcgggaaagcggccgtgcccgtgatgtcctggtaacggtctgagccgatccaacctaatcagtcatttgtgagtgtgttatgtcgacgccccgtattgtcctgctgatgctgttgctcaacgtcctgaccgttgccggtggcgtcggcgtcagttactggcttctaaagcccggcctggaaggcgccaccgcggaagacgccgccgaggccgagccggtcgagccgtcggagtacctgttcttcccggtgcagaaagtcatcgtcagcgtgcgcggcgacgggcgcgagcactacttcgtgctggacctggcgctgcaggcggacgcatcggacgaaccaccgaagttcgagcaggccgagcccatcgtgcgtaactcggtggtgggctacctgtcgtccctgcccttcgaagagttgcgcggattgaagatcggcgagttgcaggaacgcctggaaacggccctgttcgccgattttgccgccaagaacgcagcggtgccgttcaagcacgtgctggtcaacaagctgatcgtgcagtaaaggccacgccatgagtgccacgtgccccatcgactactacggcgccacgccggccggcccctcgctgttcgcaccggcggtcgagcagcgctggctgatgcagtacctgccgctggtcaagcgcatcgttcgccagctgtcattgcaggccaaccaggtgctcgaccgcgaggacatggagcagatcggcatgatggggctgctcgaaggcctgcgtcgttatggcgagccggatgaaggcttcggcaagttcgcttccctgcgtatccgcggcgccattctcgatgagctgcgccgccaggactggcgcccgcgccaggtccgccagcaggcgcacaaggtgcgtgatgcgatccgcgacctgtcgcgtcagctgggccatgaacccagcgatgaagagatcaaggcgcataccggcctcgacgacaaggaataccaggcgtttctctgtgccgactcgtccgaggccatcgaaagcctcgacgagctgttgcagagcggtcacgaacatttcccggacaccaccgagctgttcgaggagcgcctgatcaaggagcgggtgctggcgcaggcgctggcacggctggacgagcgcgagcggctggtgctgacgctgtattaccagcacgaattgagtttgaaagagatcgccctggtgctggaagtcagcgatgccagggtctgtcagctgagcaaacaggcgatcggcaaggcctgccgattcctaaccgagagaagtcagtagtcatgcagaaagtattaggcgccttcatcatcatcggctgcgtgctgggcggctatgccatggcgcatggcaacatggccatgctctggcagcctgccgaagtggtcatcatcctgggcgccgcgctcggcagtctggtggtgggcaatcccaaggaagtgctggtggagatgctgcaccagatcaagggcgtgttcgcctatcagcgtcgcggcgaggaattccagcgtcagttgctgatgctgctctatgaactgctggagatggtcgacgtgggcggtctcaaggtgctcgattcgcatatcgaggaaccggagcagagcgacctgttcgtgcgctacccactgatcctgcaggaaaagaacctgatggccttcatcgccgacaacttccgcctgatggccatgggcaagatcaccgcgcacgagctcgaaggcttcctcgagcaagagcttgaagcgatggaacacgcgctgctgcagccggcgcgctcgctgcacaagatcggtgaggcgatgcccggcttcggcattctggcggcgatcatgggcatcatcatcaccatgggcagcatcggcggcagcgtcgcggaaatcggcgcccatgtggccgcggcactggtcggcaccttcctcggcatcttcttctgctactgcctgatggacccgctgtccaacgccatgagccaacgggtcaagaccgaactctccgcgctggaatgcgtgcgcaccacactcgtcgcccacgtcgccggcaagcccacgctgctggcggtggacgccgggcgcaagctgatcgagcaggacgtcaagccggccttccgccagctcgagaactgggtgactcagtacgaggaagaaagggacgccgcatgagaagccggggcaggggcaagggtggcggcgaaggcgagcacgagatcatcatcaagcgtcgtggcaagaagggtcacgacgacgagcatggtggcgcctggaaggtggccttcgccgatttcaccctggcgatgatggcgttgttcatggtgctctggatcatccagccgcagatggagcagtccaacccgtcctacggcgagatggagagtaatccgctggtcgatggcggcgccggcatcttcgatggcaccagcacctcgccgctggaactggacggcatcccggtgcgtccgccgcaggccgatgacaccgagcgcaagcaagcgaaaagcgatcaggacggcagccgcaactacggctcgaccgaggagctgaagaccctcgccgagctgatgcgcgaagtcgccagcgaagtcgacgccctggccaacctggaagtcgatgtggtcccgcaggggctgcgcattctgatcaaggacgaccagcagcgcttcatgttccagcgcggcagtgcgacgctcaatccgcatttccagaagctgctcggcgtgcttgccggtgtgctggcgaaggtcgacaacaaactgatcatcagcggccacaccgatgccacgccgtatcggcagaagaacggctacgacaactggaatctgtccggtgatcgcgccctgcgcgcccgcaacgccctggtcgatgccggcttggccgaacgctccgtattgcaggtgactgcgcaggcggccgtcatgcctttgcttcccgaggacccacagaacggtgccaaccgccgggtggaaatcctgctgctgaccgcctcggccgaagccctgtacaaggagttgttcggcgacagttacggccaggtgcgcttctccgaaagtggggcgagctatagcggagctgtcgccaactgataggtgtcgtggggcgccgcatcaccggtccgcgcggcgaatcgtaggatgggtgcaacccatcaaaattggcggtgggatgtacccgcgaaagccaatccgcgtcctgcgccagctgctctcccttctccaagtgcccgggatgggcttacccggtcccgtaccgaccggcgatgctcgtcagacggagcagcgtcgcattgccggatgggcgatgggttgcacccatcctacggggtgcgcaccgtcgttctgttgatacaaggaacgagctggctaagggaatgcgatgccccatcgtgccgatacacccggcgaaggcgtcgcttcagccgcggttgggatgatcgtccgcgcaatagacctgacgggtctcgacgccgtacaggcaggcgccaacctgttcaagggagattcgggcgcccttgtgggccccgtagaacaggttgaacatcagctcgtcatccagtgcgtcctgcgggcccagcccatgaacctgcccctcctcgacgacgagggtcgcgcggccgagcagatccgtctccaggcgccccgatgtctcgacgatggccggggcgttgcgcgtcagcgagtagaaccgacccttgttgaagaccaggctctggctgacctgttgggtcgtgccgtcgcgcagcagaatgtaaccgcttgagctgtagcgaccgtcgaagctggacgatgcattgccgttggtgcccatcgccacgaaagcccatagtagcagcgcggccggcgccatcacgcgcagcaggcgcttacccgccgcgccggtttcattctggctgctcatcgcaggcatccttctaaagggtcgctaggcgtcgtctggatctggctcttgtgaatcttcaaccagttgactcggccgtcgcgttgcagacaacggacttcgtaaaaacctggggacatgttgacgatgagccgacccgctgcgctcatgccgctcatcgtatcgaccagttggcgggtttccttgaccagcgaatcgagcagacgctggctcctctccacatagagcacctcgagcccgcctaccgtgagcgtctgggtgaaagagggcgttaccgcgctggccaagcggaaaccgagcgttgccagccccaacaacagcatcatgccggtgccggcgagcgctgcgatctgccacgagcgggcgcgcgatgccaacccggtcgccgcaggcatggccgctgcgtcgggtattggcagagggctgggcgcagggaccggttgttccgccgcttgtgcttcggcagtaggtacctgcggctcggatgtggtgctcggttctgcgatcagatagtgcggattgaacaggtagccccgtcgcggcagcgtctggatgatctggctgcgactgtcggacagtgcctggcgcagcgtgtagatctgctggttgaggctgccttggccaaccacacggccttcccaggcgtatgccatcagttcttcgcgggaaacgacctcgccgggcgcctgcaacagccgctcaagcacgcggctgccggaaaagcccagatccagcagctcttcctgctgttcatgcttgagcgtgagctggtacagcgcccgatcgaaatgagccaaacaatcagctcggccagtctttaacagggggcagatgagggcatcggtggccgtgggggtcagagatgaggtcataagcgcctggcgataaaaaggaaaaacctcggtgtgatgaggttcgcaaaagttggcggcggcatgttgacgccgtttttttgatactacaagccgtttgctacaagaattcgccgaacggccacgctttcaggcgttcgccagcggcagggataggcatcggcaggctgtgatcacggcccaggcgggattaatcggggggtgtagtgtacggaggtgcgctctggcgagggcttgccgttggtcaggtgcgccgggagttggccggaccagaaatgaaaaagccccgaacggatcggggctttcgcggccggtcgttgcgaccggcactggcgcgtatcgcttagccgagcaggctcatgaccatgcctggcatctggccggcttgcttgagcatggagatacccgactgcatgagcatcgagttcttgctcatgttggcgctttccatggcgaagtcggcatccatgatccggcccttggccatctcggtgttgtccttcatgttcgccaggttgttgctggtgtggttcaggcggttgatgttggcaccgaaatccgcacgcagcgagccgatcgaatccagagcgccagctagggtatcgatggcagtgttggcgcccgcttgtgtggtgatatcgagggcggtgatgtcggtcccgagtaggctgtcaagggcgtcggtcttggccgagacgtctacttcaagcgtttcggcagtcgaggcgccgatctggaaagttacagcgcccgcgccgaacttgccggcaccgaacagtgcttcgccagcgtaggtggtgttatcgaagatgttcgccatttcagtggacagggcggtgaattcggcctggatggcggtgcggtcttcagcggagttggtgtcgttcgctgcctgagtagacagatctttcatgcgctgcatgatgtcagtcatttcgttgagcgcgccttcggcggtctgcaacagggagatcgagtcgccaacgttgcgcatcgcaacgcccatgccgcggctctgggcgttcaggcgagtagcgatctgcaggccggcggcgtcgtcggcggcagagttgatgcgcaggccggtgcccagacgctgctggttggtggccagggcgctgttggacttgttcagcgcggtgttggtggtcagggcggaatagttagtgtgaatggacagagccatgatgatcatccttcgtgcgttgggctgttaggagctggcttgactgcctgctgaaaaagtaaggcgacagccctcggcgggggattaaatcctgacgtcaaaaatttttagctggtttgttttcgcgggttgaatccctttgattcgacgttacttgcgcgggtccggtagttgtcttcggatcgcgtcgtaagagcgggactgcttatgtaggagcctctggtcgcgcccgaggcctccgcgcggctgcgggtcgcaagcagagcttgctcctacaaggatggttttcgtcttggcgtggatcaggacgtgctggttcttctgcaggagcggcctctggtcgcgaccggggtccccgcgcggctgcgggtcgcaagcagagcttgctcctacaggggatggtgttcgtcttggggtggatcaggacgtgctggttcttctgtaggagcggcctctggtcgcgaccggggcctccgcgtggttgcgggtcgcaagcagagcttgctcctacagggcttgtgttcgtcttggcgtggattggagcgtgctggttcttctgtaggagcggcctctggtcgcgaccggggcttccgcgcggctgcgggtcgcaagcagagcttgctcctacagggggtggtgttcgtcttggcgtgggttagagcgtgctggttcttctgtaggagcggcctctggtcgcgaccggggtccccgcgtggttgcgggtcgcaagcagagcttgctcctacaggggatggtgttcgtcttggcgtggattggagcgtgctggttcttttgtaggagcggcctctggtcgcgaccggggcttccgcgcggctgcgggtcgcaagcagagcttgctcctacaaggatggttttcgtcttggcgtgggttggagcgtgctggttcttctgtaggagccgcctctggtcgcgaacgaggccttcgtgcggttgcgggtcgcaagcagagcttgctcctacaaggatggttttcgtcttggcgtggattagaaggtgctggtcaccacgccggcttccagtaccttcgcctcgatcaccttgccgctgcgtacgttgcgtacgcggatgacgtcgcctggctggccgtcggccagggcttcgccagaggtcgaggcttcgatgccctcgttgttggcgacgatcttcactggctggccgcgtttgaccgccatggcttgttcgagcagcgctggggtgatggtctggccagcgcgaatgcggcgtttggcagccaggccgacgacttcatcgatgcggttgtagtagccacgtcgggccttggcgacgttgatgcgctgcagcttgaggtcgttggcggtcagggtctggccgcggtcgatgatgccttcggcgtgcacggcagggaggaagacgtgggcctggcccgtggcgttggtcgaccagccgggtgcgtcgatgcagcgaatctccaaggtctgccggtccatggccgacggcgcctcgcctgtcgcccggacctgcagtgcttcggagcagcgcggcaggttggctgcgctggccggtacgttgatctcgtagcgcagttgcatgccttgccagccctggcgcgcggcctgctgttcgagcatcagccgcaggtgattctccaccgcttgctgaacctgcgtcgtggcatccgcgtgcgcctgcggcacggcgcccagcagcagaaggatgacggccaaccatgcggaagtcgcttttccgcttccgcttactcgccgttcgccaagcggaaaaatgcgcttgatacgttctggcgttgttgtttttttctctttgtaaatcaatcgcttactcgcatctgtatgttcggcacgctttctgcaaaacgtcttgaaagcagcgggctgggatcagcctgcacaggctgcaaagggtatcggtaaatgagtatacggattgatgaagcgctgggcgttcacgagcgcgccctcggtttgcgcatgcagcgcagcgagattctcgcggcgaacctggccaacgaagacaccccgggcttccaggcgcgggacatcgatttcagcaaggaaatgcagcggctcgacagtagcgcctcgccgcgcgccagcctcgccggtaccgatccgcgtctgctgtaccgcgtcccggaccagccctcgcaggacggcaacaccgtcgagctgtcgaccgagcaggcgcagttctcgcgcaactccatggattttcagaccagcctgaccttcatcacgatgaaatttcgtggtttgaagcaagccatcgagggccgttaagccatgtcgttcgattccatttaccgcatcgccggttcgtccatgaacgcccagaccgtgcgtctgaataccgtggcgagcaacctggccaataccgactcggcggccaacaacccggccgacgtctaccaggcgcgcaagccgatgttcgccgcggtgtacgagaacaattcgctgacccgtggcgtcggccttggcggcgcccatgtgcaagtactcgacgtggtgacctccggcgccgagcccaaacgccgctacgagccgggcaatccactggctgacggtgacggctacgtctactaccccgacatcaacgagatcgaagagatgaccgacatgatgtcggccacgcgtagcttcgagaccggcgtcgaggtgctcaaccgcgtcaaaagcatgcagcagagcctgttgcggctgggagaatcctgatggcggtgatcaataaccttcagggcagcggcctgtccggcagccatgccagcgacctgccgaagcaggcggtgaacgtcagcgatgccacgcagatggagaacaacttcatcagcctgatggtggcgcagatcaagtatcaggacccgaccaagccggtcgacagcaccgagtttctcaaccagttctcggccatgtcccaggtcaagagcatggagaacctcgccaccgtggcgaaaagcaacctggtgctgaccgacaacctgcaaaccctgaccgccgctggtctggtcggtcagcaggtcagtgtcgcggtcgagtcgctggagctgagcggtcagaccgtcagcggcgggttcgacctgagccacgcttcgcctcgcacggcgttgctgctgaccgattccaacggcacccagacccgtatcgagctgggcgcgcagtccgctggcaaggtgccgttcacgatcgacccggccaagcatggcctgcgcgacggcaaatacagcgtcagcatcgaatccgaaaacggcgagtttccgcaggtggaggtggccggtcaggtcgccaacgtacgcgtcagcgccgaaggtccagtgcttcaggtcaagggcgtcggttcggtgcccttctacaacatcctcgaattcgcccaggccgacgccgggctgctcggcggctgagccacgctgctcgccagtccttcccactatcgcatcgagatcagcccatgagcttcaacatcgccctgaccggcctgtccgccgtcaatgaacaactcaacaccatcggcaacaacatcgccaacgccggcaccgtgggcttcaagtcctcgcgcgccaacttcggcagcctctatgccgagagccaggcgatgggtgtcgaagtcaccggcaccagccagagcatcagccagggtggtgcgctgaccaccaccaaccgcagcctggacctggccatttccggcggcggtttcttcgtcacccgcgcgagcaatggcgacatttcttatacccgcgccggcgtattcggcaccgacaaggacagctacctgaccaacagcctcggccagcgtctgcagggctacccggccgatgccaccggcaatctgcagaccggcaccgtcagtgacctgcagctcaagtccggagggttgccggccaaggccaccgacgcactgagcttcgtcgccaacctggacgccaaccaggacgtgccggcggtggcgttcgatccgttggtggccgacagctacaactccacctacaccaccaagctgtacgactcgcagggcaaggaacacactctgacccagtactttgccaagaccgcggataacagctggaacgcccactactacatcgacggcgcagccagcggtacgcagccgttgaccttcgatggcgcgggtacgcttgcggcacccatcggcaaagtttcgatcaatgctgccctgactggcggcgtcgatccgctggccatccagctcgactacagcggcaccagccagtacggctcggaattcagcgtgaccagcaaccgcgccaccggctattcggccggcgagcagaccggcatgagcgtggagaaggacggcaaggtctacgccacctattccaacggtgagcgcctgctccagggccaggtggtgctggccagcttcgtcaacgccgaaggcctgaagaacatcagcggcaccgcctggaccgaaaccgccgcctccggcgcggccatgctcggtgcgccgggtgtcggccagtacggcaccctggccagcggcgcgctggaaagctccaacgtcgacctcacccagcaactggtgggcctgatggaaggccagcgtaactaccaggccaacacccaggtcatttccaccaacaaggaactgacccaggttctgtttagcgcactctgaggctgatccatggatcgtttgggatacacggcaatgaccgccgccagccgcacgatgatgtcgctgcaggtgcgctccaacaaccttgccaacgtcaacacgccgggctttcgcgccgacctcgagcgcgcccaggccgtggcggtggaaggttacggttacgacagccggcacatggcggtggtggaaaacaacggtgtcagcctggcggctggcccgatgatcgccaccgggcgcgagctggatttcgcggtcaagggcagcgggctgatcgtcctgcaggacggcgaaggcgaggcctacacccgccagggcagcatgcagatcgacgccgaggggcggctgaccctcaacggtcgcgccgtgatgggtgagggcgggccgatcgagctgcccgagcatgaccgcgtcgagatcggcaacgacggcaccgtctcgatcatggcgccgggcgactggatgatggccgaggtcgaccgcatccgtctggtcgacgtaccggctgcggacctgatgaagaacgaggcgggcctcttggtcacgcgcaacggccagcccgctgctcctagcgagaacgtgcgcctggccagcggtttcctcgagtcgagcaacgtctcggcgatcgacgagctggcctcgaccatgagcctcaaccgcctgttcgagacccaggtaaagatgatgaaagccgccgaggacctctccgacgccggcaaccgaatgatccgcggcagctgatcgggagataacgcatgaattccgcactttgggtcagcaagaccggtctggctgcacaagacaccgccatggcgaccgtcgccaacaacctggccaacgtcaacaccaacggcttcaagagcgaccgcgcggtgttcgaggatctgttctacagcatcgagaagcagccgggtgcccaggcggacgagatcaataccgtgccgtccggcatccagctgggcagcggcgtgcgcgtcgcgggcactcagaaggtcttcaccgaaggcagcatccagaccaccgggcagccgatggatctggccatcgtcggccgcggcttctttcaggtcgaggcgcccaacggtgacatcctctataccgagaacggccagttccagctcaacgccgaaggcgtgatggtcaatgcccagggcctgccgctgaccccggccatcgaagtgccgcagggcagtactggctttaccgtgggcgccgatggcatcgtcaccgccgttctgcctggcgacaccctgccgtccgagctggggcagatcaccctggtcaacttcaccaatccgggtggcctggaagcgctgggcggcaacctctatcgcgaaagtgtggccagcggcgaagccgtggaaggcgtgccgggcgaagaaggcctcggccagctcaagcaaggcgtgctggaaggctccaacgtgcaggtggttgaggccatggtggcgatgatcgccatccagcgcgcctacgaggccaacgccaaggtcctcgacgccgccagcggcatgcagcagttcctcaaccagaccgtctgagaccgatgatgcgtacccctctcctgctcgtcgccctgaccctgctcggcggctgcgccagcttcaacgaaatgctgccggaagagccctccaccgaatacgagccgctggagctggactacagcctgccgccgaccaccggtggcggcctgttccgctccggctacagcggctcgctgatcagcgacaagcgcgcggtgcgcgtcggcgacattctcacggtggtgctcgatgaatcgacccagtcgagcaagagcgccggcaccagcttcggcaaggaatcgagcgtcggcatcggcattcccacggtgctcggcaagacctacccggacgtcgagggctcggcctccggcgagcgcgaattcaagggctcggccaagagttcgcagcagaacaccctgcgcggctccattgctgtcagcgtgcatcgcgtgctgcccaacggcaccttgcagatcaagggcgagaaggccctgcgcctgaaccagggcgacgagtacatccgcctgaccgggctggtgcgcatcgacgacatcaaccgctacaaccaggtgtcctcgcagagcgtggccaacgccaagatttcctacgccgggcgcggcgtgctcaacgacagcaactcggccggctggctgacgcggttcttcgcgtcgccgctgttccctctttaagcgagctgccctcttcatgactagcttcgtgcgacctttcaagctgttcctcgccgccgtcgcgctgtggcaattgccggcccaggccgtgccgctgatggacctggtggatgtcgaaggcatccgcggcaaccagctgatcggctacggcctggtggtcggcctcgacggcaccggcgacaagaaccaggtcaagttcaccagccaatcggtggcgaacatgatcaagcagttcggtgtgaacctgccgccgaacgtcgacccgaagctgaagaacgtcgccgcggtgaccattaccgccaccgtgccgccgtcctacagcgccggccagaccgtggacgtcacggtgtcctcgctgggcgacgccaagagcctgcgtggtggccagctgctgatgaccccgctgcagggcgtcgacggtgaaatctacgccctggcccagggcgcggtgatcgtcggcggcgccaatgccgagggtgccagcggctcgaagatcgccatcaatacttccaacagcggcctgatccccaacggcgccacggttgaacgaatgattcccagtgacttcaccgagcgcccggaagtgatgctcaacgtacgccagccaagcttccagaccgtcagccgggtggtcgatgcggtggacgcctatttcggcaagggcaccgccaccgcgctgaacgccaccaaggtgtcgatccgcgcgccggtcaccagcacccagcgcatgagcttcatggccatgctcgaacgcctggacgtgcaggaaggacgcacccggccgaaggtggtgttcaacagccgcaccggcaccgtggtggtgggtgagggcgtacgggtcaaggccgcggcagtggcccatggcagcctgaccgtgaccatcagcgagcgcccccaggtcagccagcccaaccccttgtccggcggccagaccgtggtcacgccgcaatcggacgtctccatcgagcaggaccgcaaggccatgttcaagtggcccgagggcgccagcctggaaagcatcatcagcaccatcaacagtctcggcgctacgcccgacgacgtgatgagcattctccagtcgctggaacgcgccggcgcactgaacgctgaattgatcgtgatgtaagaccgcggtatccggtccgcccgccaggcagaccggccacgcagccgagtgaagacaggtttcaagccgacatgagcatcgtatccctcccgcaacacctcgcttccctgcgcaatcgcgccgacggcccggccgcggcgcggcgccagcagctggaagtcgtcgccgagcaattcgaggcgatgttcctgcagcagatcctcaagcagatgcgcaaggccggcgacgtgctcggcgccggcaatccgatgcgcagccgcgagctggacaccatgcgtgacttctacgacgaagtgctggctgacaccctggccggcaagcgccagaccggtatcgccgacatgctggtacaacagctcggcggtgaggccggcggcgcgccggcgccgaccgcattggccggccacgccggcagcggtttgcagagcggtggtttgcacgcgctgcgcggcacctggcagcgcggcgtcgatgcattggacagtgcctgggaaagcgggaaagccggcttcaaatcgctggtcgacagcgtcatcaagcacgagtccagcggcaacatcgccgccgtctcgcccaagggtgcgcgcggcctgatgcagctgatgcccggcaccgcgcgggacatggccgccgaactcggtttgccgttcagcgaggcgcggctgaccagcgatgccgaatataacaagcgcctcggcagcgcctacctgaacaagatgctcgaccgctacgacggtcatcaggcgctggcgctggccgcctacaacgccgggcccgggcgggtggacgaatggctgaagagccatggcgatccccgcaagggcgagatcggcaccggcgcctgggtgcagaagattccttatgcggaaacccgcgactacacccgcaagatcctcgacgatctgcgcgccgctgtgcctcggcaggccgaaccgcgggctcagctgcaggccgttccgcctgttgcgccatcgccgcttaattccgctggcgatgcggtcgctctttctagccaacagcatcgagttgttggcggtggccacctgtccgtggcgttcgcgcaaccgatccggatcgagtcgaaggaagtcgtgtcgtgagtattttgggtcaaattggctacagcggcgttcgcgcctcgcagatcgccctgtcggcgaccgggcagaatatcgccaacgtcaacacgcccggcttcagccgcctgcggccagacctgcaatcgcttggcgggcagacggcggtcagcatcggcggcggggtgcaggtcggcagtattcggcgcctgtccaacgacttccagaatcagcagctctggcgcgccggtaccgaccagaactacttcaataccagccagcaatacctgaccgcgctcgaaggcctgatcgacagcgaaggctcgagcgtcagcgtcggcctggacaacttcttcgccgcgctcagcgaagccagttccacgccggaatccattgccctgcgccagcagatcattggcgagtcgaaacagttggcacagcgcttcaacggcctgaacagcaacatcggcacccagctcaacgccctgcagggccaacgcgtggcgatgaccagcgagatcaacgggctgtccggcaatatcgccgagttgaacgcgcagattcgcgagatggagtcctcgggccgtgataccgcgaccctgcgcgactaccgcgagaatctgatcaaggacctcagccagtacgccggtattcgcgtgcaggaagcgtcggacggcagcctgaacgtctcgctggccaacggtcagccgctggtcgccggtgcaacggcgggccagctgaagatcaatgccaatctcgccggcgagcaagagatgacgctggtcttcgccaagaccaccttcccgctcaaccagcagggcatcggtggttcacttggcggcctctacgacatggaatacggcgcgctgcgcccggctcagcaggatttgcatgacatggcctcggccgtggcgagcatgatcaacgacgccctcgccggcggtttcgacctcaacggcaatcccggccagccgctgttcagctacaacgcgggcagcaccagcggcatgctggcggtcaatgcgctgggcgcctcggaattggccttctccgacaccgcaggcgaggtgggcaacaacaagaccctgctcgccatgctcgcactcaaatcggcgggcgtcacggtcgctggcgaatcggtgccgctcaacgatgcctacgccggcctggttggccgcgtcgccagtgccagccggcagaaccaggccgatctgcgcgccgcgaccaccgtagccgagcaggcccaggcccagcgcgacagcgtcagcgcggtcaatctggacgaggaggccgtcaacctcatggcctacgagcaggcctaccaggccaacatgaaggtaatcagcacttccaacgatctgttcaacgccgtcctggcgatgttctgagccggcaccagccgtttcgaccgacgagaaagacaccatgcgcatctccaacgcccagatcaccgccatgatgcacggctcgatgaacaccagctccgagaagctcggcaagctgatgcagcagatggccaccggcgagcgcatgctgctgccctcggacgacccgatctctgccgtgcgcgtgctgcgtatcgagcgcgaggaagcgacgctgacccaataccgcaccaacatcgccaacgtcgccggcaacctgtccaagcaggaggccaacctcaaggcggcgtcggactccatgctcaacgtgcgcgacctgttgctgtgggccgccaacggcagcaacaccagcgaggacctggcggccatcgccaacgagctgggcaatctggagaagaccattctcagtttcgccaatgtgcgtgacgaagaaggccgctacctgttctccggcaccctcagcgatcggccggcgatcaccttcgatgccgctacccagagctaccagctgaccggcaacgatcaataccgccaggcggcagtcgccaatggggtactggtcgaggaaaatgtcaccgccgcgcaggtgttcggtggcggcgtcggcatgctcaacgacctcaacgccttggtgaaaatgctcgccgacccggcgctggacgccagcgatcccgcggtacgggcgagcgtcaccgccacgctcaacagtctcgacaagacccacggcgacctgctcggcgcggtctcggagctgggcggccggcagaacaccctgacgctgctgtcgagcagcaacgaggacgtctcgctggtgaacaagaagatcgaaggcgaactgtcgcagctcgactacgccaccgccagcatcgacctgaacaactaccagctgtcgctgcaggcgacgcagaagacctatttgaagatcaacgggctgtcgctgttcggcatgctctgaccgaggtagcccgaatgaagattggcaagcagctcccggctgtttccgcaatcaacccgcaggagcgccgtgaagcgttgctgcgcgatgcgcctgcgccgctgcgggccggtgtgccgtcggacgcgccgcacaccgaggcgacgcccagcaaaagcaccagcttcagcctgcagctcaatcagcagctgtcctcgatgcagtcggccgacagctacctgggcgacctgcagacgcgcctgtcgcagctcaagctgagtctcagccggcagatcagctcgccgcagccgagcggagaggaaagcattcgccacaccgtgcagcagattggcgagttactgaaagagcgcagccagcgctccggcaattctctggacgccactctcaagctgcgattgaccgagccggtgcgcagccgcttcagcctgaaagggctggagtcgctcgaggcgattcgtcaatccgggcgcgagacgctgctgttcagcggcggtcgccagctggccgagccggtcgccgtggtgctcgatgacgagatgagcgacgagcagatcctgcgccgtttcaacggcagcctgggccaggccgggatacgcgccgaactcgatcagaacggcgcgctgaagttttccgcccgcgaaggcgactggcagaaactcaaggatcagctggcggtacagggcgaaggcaagttgttcgacaaggggcgctacgttcgcctgcagagtgaggacgaccagctgctgagctttcccgaagagctgcagctcgattccttccgcgagctgcgccgcctgctcgactcggtggtggccgggctcgacaaggtcaccaccctgcgcgaacagctgagcaaccggcagcaggagatccgcgagttccttgcccgtcaggcccacgccgacgagaagcagtgggcgatggacttctcccgctcggtgttcaacctgatgcagcgcagcccctccagctacgcggcggtcacccagaccgtggtggcccaggccaccatcagccgtttcgcggtggtcagcctgctgtcctgagccgcgctgcgccgctcagcgtacgctgcggtcgatgaacttcaggtccgatggccggctcatgggcagggtttgcagggtatcgcccagcagcccgctgtcggggtcgcgcggcaccaccaccaacgcatcgctcttctgattggcgatcagcatgaaccgcccgctcgggtcgatggcgaactcgcgcggttcgcggccttcgctgtcgcgcgcctggatttcgcgcaaattggcgttctcctcgatggcatagaccatgatgcggttggtctcggcgcgatcgctggcatagaggaaacggccgtccggcgagagatggatcgcgcccggcgaatgcttggcggtgtccccctcggcggccatgtccaccagctggcgctgcaccaggctgccatcgacatgatcgaaacgcgccacctgagcgctcaactccagggtcgcgtacgcctgcaagccgtccgggctgaacaccagatgacgcgggccgctgccctccggcaggctgatgaaggccgggtcggcgggtgacagcgggcgctcggcattggtcgggtcgtagcgataaacgaagatcttgtccgcgcccaggtcactgacgaacagggtcttgccatcgggcgacatcaccgccgaatgcacgtgggccgactgctggcgctcggggtgcacttcgctggccttgtgcgcggcgatctgggtgacgggcatgagtgtcccgtcgttggccgtcggcatcacggccaggctgccgccggggttggcgctggagccgtagttggagacgaacagataacggccgtcgcggctctggctcagatgcgtaggctcgtcgccgagggtcagttgctgggccagcggcgacagcttgccgctgttcggcgccagcgtgaaggcgctcacccgtcccaccgggtccggatgccccggcccgttctcgttggccgcatagagccggttacggttcagatccagcagcagccaggacggattgtgggtacgtaccacttgcagcggttggggtgcgatctggccgttctcggcgtcgaactgcatccggtagatgccttcgctgttcccttcgctggtgtagctgccgacgagtaactgatacatgggtgccgccgctcccgtaaggctgaaggtcagaaatgccgcggcaacgccgagacgaatgaatgaggtgatcggcgtggaaccgcgcatggggtcgctccttggtcgctgattggaatgccctgatgcgctttggagcaccggatacggaaataattttccaaccggcgcatcgagctgtcgatttcgcccttgccggcacgactatggggtaacgaaccacgctggcaaggggatcgcaatgcgttatctatgcctggtttatctcgatgagacagccttggcgggcctgtcgctggccgcccgcgcggcgctggaggccgaattgcacgattaccgcgaagggctgcagcgcagcggtcggctgatcatcggtgaggcgctgcagccgaccctcagcgccaccaccttgcgcatgcagggcgaccaactcctgctgcgcgacggcccggtcgtcgaagcgcgcgagcaaccctcggccttctacctgttcgaggcggccgatctcaacgacgccatcctgctggcctcacgcattccgccggtgcgcctgggttacgccgaagtgcgggcgctgccaccgcgcgcgccgccgtgacggccgttgccgcactcgcgcttgatccattttttcagacgccacgaggaaacgaacatgaacactgcaagcgatattcagaacggcgaaacccgtatccgcgaactgatggtcgagttcgaacaggccgttgcggtgaaggatctcgatcggatcatggcccagtacgcggccgacgtcgtggccttcgatgcggtcggcgaattgcagttcaagggtgccgatacctatcgcgcccactggcagcgctgcttcgacttctgccagggccagggcttcttcaagatcggcgacgtcgatgtcgttgccagcggcgacctggccttcagttattcgctcaaccactgcggcggcaccaatgacaaaggcgagatgcagaccgcctggatgcgcggcacgcgctgctggcgcctgcaaggcggcgactggaaggtcgtgcacgagcacttctcgatgccattcgacatggccaccggccaggcttgcttcgacctcaaaccctgagcggcgcaccgcctcaccccgtgcagctgccgcggcgcgaagccctcgtgctttcgccgccagctgctaaggttgtcggtctgcatgatgtaatggagaacagcatgaaatacctgtgcctcgtctattacgacgaacaacgcgtggacgccatgaccgacgagcagtggctcgcgctggtcgaccagtgcatggccaacagtgcacgcctgcaagaaagcggacatttcgtcgccggcgagccgctgcaatcggtacgcaccgccaagaccgtacgggtacgcgaaggcgcggtctcggtggtcgacggccccttcgccgaaacccgcgagcagctggccggcttctacctgctggaggcggccgacttcgacgaggcggtgaaactggcggcgaagattccaccagcggcgctgggcagcatcgaggtgcgcccgctgcgccagttgcctgatcgttgagtcaccgggacgcgtttgcgtgacggccacatcgggcggggaagcggcgagccagcggaccatcgaagccatctaccgcaacgaatcgcggcgcgtgctggcaaccctgatccgtctgctgggcgacttcgacctggccgaggaggcgttgcacgacgccttcttcgccgcgctacagcagtggccgcacgacggcataccggccaacccgcgcgcctggctggtgtcggctgggcgcttcaaggccattgatgggctgcgccggcgggcacgcttcaatgcctcgctgaacctgctggccgatcagctggatgccgccgaggaaccggactgggatcacgacaggctggaggacgatcgcctgcgactggtcttcacctgctgccacccggcattgcccggcgatgcgcaggtggcgctgaccctgcgcgaggtctgcgacctgaagaccgaggaaatcgcccgtgccttcctcgcctcgcccagcaccatcgcccagcgcatcgtgcgcgccaagcagaagatccgcgacgccgcgattccctatcgagtgccttcgcgtgaggagttaccggcgcgcctggataacgtgctgcgggtgatctatctggtgttcaacgagggctattcggcctccagcggcgccgagctgacccgcgccagcctgagcagcgaggcgatccgcttgggccggctgctgctcgagttgctgccggatccggagctgatgggcttgctcgcgctgatgctgctgcacgactcgcgccgcgccgcacgcaccgatgaggcgggcgagctggtgcgtctcgacgaccaggaccgcagcctgtgggaccgggcgcagatcgaggaaggttcggcgctggtccagcgagcgctggcctcgcggcgattcgggccctacaccttgcaggccgcgatcgtcgccgtgcacgccgaggcgcccagcgccgcgcagaccgactgggcgcagatcgtcgggctctacgacgtgctgttgcgcgtcagcccctcgccggtgatcgaactgaaccgcgcggtggcggtggccatgcgcgaagggcccgaagctggcctgaggttgatcgacgatctgctggcccgcggacagctccgcgactatcacctgctgcactcggcccgcgccgatttctgccgccgcctcggccgtctggacgacgcgcgggacgcctatcgggacgccttgcagttggcgcagctggagccggagcggcgctttctgcagcagcgcctggatgagttgggcgaaacggacgggtcatagcgctgtttcgtctatgcagcaccgccgctagggtgggccgggcggcgtaccgcttcagcccaccgttagcgcggcgatcagccgcgccaggcccccgggttcaccaggttcgccggccgctcgcccgccagcgccgccagcaggttgtccaccgcgcagcgcgccatcgcttcccgcgtctcgtgggtggccgaacccatgtgcggggtcgccaccacgttatccagctgcaacagtggcgagtccgcactcaacggctcctgctcgaagacatccagcccggcgccgcgaatctgaccgttgcgcagggcctcgatcagcgccgcctcgtcgactaccttgccgcgggaaatgttgatgaagatgctctcggggcgcatctgcgcgaaggctggcgcgctgatgaggccatgggtttcggcggtcagcggcagggtcaggcagatgaagtccgcttcctgcaacaacgcctcgaggctgcggtagccggctccgaatcgctgctcggccgccggtttcggcgagtggctgtggtagatcaccggcatgccgaagccgaagtgcccgcgctgggcgagggcttcgccgatgcgtcccatgccgatgatacccagcgtcttgccgtgcacatcgctgccgaagtgacggggaccgatgttttgctgccactggccggcgcggaccatgttagccagctccacaacccgccgcgcggtcgccaggatcagcgcgaagccggtgtcggcggtggtttcggtcaggacgtccggggtgttgctgagcaggatgcggcgttcggtcaggtagtcgatatcgtagttatcgacacctaccgagacgctggccacggcttgtagctgcggtgccagatccagcagtgacgcatccagcctgaggctcgcacccaacaggccgtgggcgctgggcagggcatcgcgcaactgcgccaggccctgggcatcgaggcgttcgatgagggtgacttcggcctgcgcctgcaggcgcgccatcagcggcgcggacagggccttgtacaacacgacgtgctttttcatgggaatcctcggatcaggggcgggcggtggccgaaaggggcgttgcgggtgccggcgcggtccggtcgctggcgccaggcttgagggccagggtcagtaccaccgacagcagcaacgcaccgctcatcagcaggaaggacatgccgggcgagccggtggagccgttgaggtagcccaccaggtaggagccgccgaacgagcccagcgcgcccatgctgttgatcagtgccatggcgccaccggccacgttcgccggaaggatttccggcacgatggcgaaaaacggcccgtagggtgcgtacatgcaggccccggcgatcaccagcaggctgtaggaccaccagaagtgctcggcgccgagcaggtaggaggcatagaacgcgatggaggcgatcagcagcggcggccagacgaagcgcttgcgcttctggatcttgtccgaggcccaggacaccagcagcatcgcgatcaccgccgccaggtagggcagcgccgacagccagccggcctcgaccatgtccatctgctgaccggccttgaggatggacggcagccacagcacgaagccgtagacaccgatgctccagcagaagaattgcaacgccaggatgatcaccttgggcgagcggaaggcctcggcgtagttcttcaccgccttgatgccgacctgttcggccgccagggcgctttccaggtcctgcttctcctggtcgttgagccacttggcctgggccgggcggtcatcggccaggcgccaccagatgaaggcccagagcaccgccggcaggccttcgatgatgaacatccagcgccagtcgaattgctgcaccaggtaacccgacaccaccgacatccacagcatggtcaccggattgccgagaatcaggaaggtgttggcgcgcgagcgttcggcgcgggtgaaccagtggcacaggtagaccagcatggccggcatcaccgcggcctcgaccacgccgagcatgaagcggatcacgatcagccagtaggcgctggagaccatgccggtcagcgtcgccagcgagccccagaggatcaggctgacgaagatcagtttcttcacgctgcgcttctgcgcgtagatcgcgcccggcacctggaagaagaagtagccgaggaagaacagcgcgccgagcagcgacgacattccgggggtgatcatcaggtcttcggccatgcccgaggcggcggcgaagccgtagttggcccggtccaggtaggccaggctgtaggtgatgaagacgatgggcatgatgtaccaccagcggcgggtggcgaggttgagcgtttgcatgtcatgactcctgagcttgttgtttttgtctgcagcaggtgtggttagaaagcgtttggggtgtgtttcggacttatcgggcgtggctcctgcctaacccgtcgccagggaggcgctggttcgctcgcagtcgaggccttcgagttccgccgataattccaggcgggtcggcaatccctccatgtcgccgcggctctgtaccgcgcggctgccgatccagttggcgcgctgcaccgcctcgtcgaggctgcgcttttccagcagcgcgctgatcaggccgacggcgaagccatcgccggcgcccacggtgtccaccacctgaacgtccggcacggcggcgacgaagccttgggcgtcgggcgtgcggtagtaggcgccgtctgcgccgagcttgatcaccacagcctcggcgccctgatccagatagaaggcggcgatgtcggccggatcctcgaagccggtcagcacgcggccttcgcagagtcccggcaggatccagtgggcgagggcggcgaggcggttgatctcgcggatcatggtcgactcgctgccccacaggctgggccgcaggttggggtcgaaggacaggctgcggccggcctcgcgcatccgcgtcatcagctcgaaggccatctcgcgggccgtgatcgacagcgccgggacgatgccggtggcgtgcaggtggcgagcctcgagcagcgccggcgcgatggaatcgatcgacagatggctggccgccgagccacggcggaaatactcgacctgcgggtcgctgccgtcgtcgctgcgggatttgaactgaaagccggtggggtgcgccggatcgaccgccacgtggcggcaatccagaccctcgttttccagcgtctgtaccacgaagcggcccagggagtcggcaccgacccgactcagccaggcgaccttgaagcccagccgcgacaagccgatggcgacgttgctgtcggcgccggcgatgcgcttgtggaaatgctcgacgctagccaggtcaccgctctgctcggccaccagcatcgccatggtttcaccgaaggacagcacatcgtagtcagacatgggccacctcccggtgcggttggccgagacgggacaggagggcgacatgctcggcggtcagttgcagcaggtcatcgccttgcagcgggtactcggcggcgcgcatcacgccggccggcatctgctcgagcaacagctcccacagcggcagatcggccatgctcggcggtgtggcgacgagcttgccgtcgacgcggcgggtcaccgccttgcagtgcacgtaggcgacatgccggccgagctggcgcgcggcgacggctgccgactggtcctgccattgccagttgccgatgtcgaaggtcatgccgatgggcaggccgagcttttcgacggccgagaagaagcgctgcaagggctcgatccgcccgccctgttcggtctggtcgttctccaccagtagctgcaccgtgctcgtggcgagagcatcggccagggccgacaggtcgtggccctcgctgaaatggccgagggaaaccttcagccagctcgaaccaaaggcctcggcgcgccgcagcgcggtcagcaaggcggggttgggcgtgggctggtcgacgagccacagctccagtggcgacgaatagatgctgcgcaggcccttggcgtgcgcgcctgcggccagttcggcggcgtgttcgctggtcagcagttcttcgcgccactcgatccgcgaggcgccggcggcagccagcagatcaatgaagctgccctgaccgcgtgcgcgcaccaggtcggcaccgtagctggagaggctgatggagacgggtggttcatgcattgttgcgctcctctgaaaccggtttcagtttcgcttaaaaaattttgcctcggtcagggcctcatcgtgcgaggccccctgttgtcagcgctgcggaccgcgtgtcgatccgcgctcgatcagtcgcgccgcgaaatcgagggtgcgcgccggcccgttgtcgccgcgcagacgcttgagcaggcagtcgaacgcgccggcgccgatctcggtcgtcggttgcgccagggcgctgatgccgctgcccaccagggggtaccagtcgaggtcgtcgagggcgagcaggccgatatcgtcgaacagctggcagcccaattcgcgcagcacctgagtggccgccagcgcggcgacgccgttggcgcagaacaaggccttggggccatggtccggcccggccagaaaggcttcgatgcgcgccgccaggcggtcgcaggtctccaccacagcgccgcgtagcgccggacgctgctcgatgccggcgttgaaacgctcgacccgctcgatgcgcgagctggtgccgtcgaacggctcggtgaccagcagcaggtcgcggtaaccgcgctgctcgaggtgatcgagggccatgtcgacggcggccgggttgtccaggccgaccagatcgctgtcgagccgatcgaccttgcggtccaccagtaccaggggcatttcccggcgcagctccaagagctcgtcgcggtggtggccgagggtgttcacgatcaggccttcgatgttgtaggcgcgcagcagcgccagatgctggcgttcctgctcgtcgtcgcgatcggtgttgcataccaccaggctgtagccatggcgccggcaggcggtttcgacgccatgcatcacggcgatcgaataggggttgcggatgtcggccaccagcatgccgatcaggcgtgtgcggccgcgcttgaggccgcgggccatctggttcgggcggtagcccagctcggcaatcgcctgctcgatgcgccgggcgatggcatcggagagcagggcgcgatcttcgccgatgaagcgcgagacgctggccttggagaccccggcgcgttcggcgacatcgagcatggtgacgcggctgcgctgggcggcggagaaagaattcacgggctgaaacctgcttttttgaatttattgtctggctctgaaaccggtttcaggaaactccagaagccggtcagcagtcaagagcttcttgaaaacagggcgaccgacggtcgcgggtctccggtccgcagcgatccgcaataacccatggcagagcctgtgggcaattttcggcgcctcgccgcggatgaccgttgcaaggtggttgtctcgatgtgcctgcccgccgccatcgcctctgagccgcaagtgacctgatgcaggtccagccgataatccaccgcctagcctgtccatgtgcatctgagtgcgggttggttaccgccagtgattgcctcgctgcagcgccggttggcgcgctgggatcagctttcgccgttgcccgccggcagatagtcgctgcggcttagaccgtggcgctgcatcttctcgttgagggtgcggcgcggcagttgcagctggttcatcacctcggcgatgttgcccttgtgctgttgcagggcgctgtgcaggcattgcgcttcgaaggcttccatctgctcggcgagcgacgtggcggcgccggcggcgggaatgcccgtgttcgcggaaggcggcggtgtcaggcccagcgcatggcgttcggcggcgttgatcagttcgcgcacgttgcccggccagtcgtggctgagcagctgcgccagctccgtcgggctggccggcaccgggtcgcggccatggcgctgggccgcctggctggcgaagtggtcgaacagcagcgggatgtcttcacgacgatcgcgcaacggcgggatgtgcagctcggcgacgttcaggcggtacagcaaatcttcgcgaaagcgcccggcgcgcacttcgtcgagcaaatccggcttggccgcgctgatcacccgcaggtcgacctcgatgctgcggttggaaccgagccgctccagggttttttcctgtagcacccgcagcagcttgacctgctgggccagcggcatgctttcgatctcgtcgaggaatagggtgccgccgtcggcatgctcgatgcggccgatgcgcttgccctgggcgcccgtgaaggcgccgctctcgtgaccgaacagctcgctttcgaagatggtctccggaatggccgcgcaattgagcgccacgaatggattgcgcgcccgcgggctgaagtcgtgcaggcagcgcgccacctgctccttgccgctgccggtgtcgccgcggatcagtacgttgacgttggtgccggccagctccagcacctgccgccggaggtgttccatgccccgcgagacgcccagcagcatcgactcgatgcggcccttgcgggtgaattgctcgcgcagctggcggttctcgcagaccagccgacgcttgtcctgggcgcggcgcacgctgtcgagcaggcgctcgggggtgaagggcttctcgatgaaatcgtaggcgccctggcgcagcgcctgcacggccatcggcacatcgccatggccggtgaccatgatcactggcagctccggatccagcgccaccagccgttccagcaggccgaggccgtccaggtcgggcatgcgcacgtcgctgatcagcacgccgggaaagtcccggtcgatcgtcgccaacgcctgctgggcgctggcgcaggtgcgcacgctgaagcccgacagctccagccattgctgcacggcctgacggatcgccgcttcgtcgtcgatgaagatgacctgaccgctcatgtcccgctcctcctgtgagtcgccagtctactcggcgacggcctcttcggctgccggcagatgcagcacgaacaccgcgccgagggcatcgttgtgcacctccagattcccgcccaggtcgcgcacgatgccgtaggacaccgccagccccaggcccaacccctggccgaccggcttggtggtgaagaagggttcgaagacctgatccaggtgctcgctggcgatgccgccgccgctgtcggcgacgctcagcgtccagccccggcggtcacggtgagcctcgatgcgcagctgacggaccgtgcgattctgcatggcatcgagcgcgttggtcagcagattgatcaacacctgctccaggcggatgccgtcgccgctgacccaggcctcggccggaacctggcgcagcacctcgatgccatcgttgcggatccgcgggccgagcagttgcaacgcctgttccagcacctcggtcaggcgcaggcgttgacgcaggccggcagggctcttgcgcgcgaatgtcttcaggtgactggtcagcgcggccatgcgttcgagcagcccctcgacctggccgatgccttcgcgcaccgcctcggtgcggccgttgtcgagcagcaatcgctggctggccagttgcatgcgcagcgcggtcagcggctggttgatctcgtgggcgagggcggcggacatctgccccagcgccgccatgcgcgcggcatgcaccagctcgtcctgggcggtgcgcagctcgcgggtgcgtgcctccaccaggcgctccagctcgctgcggctgtgctgttcgacgcgccgggtcttgcgccgttgggccaggtaaagcagcagaaacgccagggtcatccagacaccggccgcggccaggcgatagctgcgcacattggcggcgatcagttgcggctcctgcagtagatgcaaggtccagttctcttccggcagctgcaggcgctgccagaggtaattgcggcgaccgtccgggccgtccacctggcgccgctcgctgtcttcggcgatgcgctgcaggctctggttcggcaagggttgcaggttctgctcggcgtagcggcgcgcggcgaccagttggtcgcgcacctcgtcgctaagcggccgcagatagcggaagcgccacgcggggcggttggtgaggatgacgatatccagcgaatcggcaatcaacaggatgccggactgcccgacccactcgcgttgcatctcctccagttcgagcttgaccaccagcacaccgattacctcgccagcgctgttcttcaccgaacttgagaggaaataaccgggaatgccggtggtcacgccgacggcgaagtagcgtccggagtcgtttttcagcgcatcgaggaaatacgggcggaaggcgtaattgttgccgacgaagctggtccagtcgcgccagttgctggccgcgagggtttcgccgtggcggtcgagcagatagagcaccgaggagccggccgcttcgttctgttgctccaggcgctggttcaacaggtcgcgcagcttctggtcgtcgggtttgttcagcagctcctggatatcgctgtccagcgccagcaatgccggcaccgagcgaaagcgctcgacctgggtatggatcgcctgggcatacagcgcgagctggccacgcgcctcctggctgcgttcggcccaggcgcggcgctcggcgatgtggccggcccagtacatgcagagcagcaggccgatgaggatcagcgcaacgatcagggttacccgcaggcggttggacagtgctggcatgacgacgctcgcggtaggacgcgacgatggtaagcgatagtaggcagcggtggcgcatcgttgatgcctcggcatagcaccaaggtcttgatctgcccaataggggtatagtgccatcatcgctatactgcggggagttaccatcagctcggtaggggtcgctagttcggaacgggaggtccgccatgctcagaaaaattcttgtcagccaagtccgcttcggcatgtacgtccatgggctggacggcagctggttcgatcatcctttctggcgcagcaaatttctgctgaccgatacagccgacctgcaggcgctgcgcaacagcggcgtcaaggcgttgtggattgatacgggcaagggcgtcgatgtcgaaacggcaaggccccccaccgccgaggcccaagacctggtctccgacgccatgccggttacgcctcccccggccgtcccatcggcccagcaatgcagtgttcaggaagagatgcagcgcgctgcgcaggtgctcaagcgttccaagcagcaggtgacctcgctgttcaacgaggcgcgcctgggcaaggccgtcgacccgcagcagtgcctgccactggtcgagcagatttccgcatccctggcgcgcaacggctcggcattgctcagcctggcgcggctgaagaccaaggacgagtacacctacatgcattcggtggcggtctgcgcgctgatggtcgcgctgggccggcagttgggcctgagcgaacaggaagtccaggaagccggctttgccgggctgctgcatgacatcggcaagatggccatgccgctggatgtgctgaacaagccgggcaagctcagcaacgacgaatacgccgtcatgcgcagccaccccgagcgtggtcacgcgatcctgctctgtgcgggagcgaccgtgtccgaggcggttctggatgtctgcctgcatcatcacgagaagatggacggtaccggctatccgcagcggctggccggcgaacagatcagccggctggcgcgcatgggcgcgatctgcgacgtgtatgacgccatcacctcggatcgcccgtacaaaaccgcctgggacgcttcgggctcgctggcgcgcatggcgcagtggcaagggcacttcgatacccggatcctgcatgccttcgtgcgtacggtgggcatctacccgctgggctcgctggtacggctgcagtcggggcggcttggtgtggtcatcgaacacaacgcacagcagctgacggcgccgcgcctgaaactattctattccacccgcgcccgcgcggcgatcgtgccggtggagctggacctctccagcccgcgatgcagcgaccgcatcgtcggccgcgaagtccccgccgcctggggcttcagcaatctggatgcgctctggacctagattggcggtcgtaaacggggggcgatgcgactagaatatcgtcccccgaatgcgattcgcccggcgagcccctcagagaagatttgtaatgtccatgacccggctgtctagtccgccatagcgctacgcccccccctcgcgtcactttgcgaccgcctgtcatggggccgtcttgcgatgctgtccgtgcgtatcgtcgactggcagccgaatcaatcaccaaaatctcgccttgcatcgctgccggccacccgtggtctgcatggtggtgcctttgctctggatattccgatgcttcactcgatcaagcaaaactggttcggcaacattcgtggcgacgtgctctccggtctcgtcgtcgccctggcgctgattcccgaggcgatcgccttctcgatcattgccggggtcgatccccgggtcggcctctacgcgtccttctgcatcgccgtggtgatcgccttcgtcggtggccgcccgggcatgatctcggcagccaccggcgccatggcgctgctgatggtgacgctggtgcgcgatcacgggctgcaatacctgctggcggcgactctgttgtgcggggtgctgcagatcggtgcgggctacctgcggctcggctcgctgatgcgcttcgtctcgcgctcggtggttaccggcttcgtcaacgcgctggcgatcctgatcttcatggcgcagctgccggaactgaccaacgtcacctggcatgtctacgcgatgactgccgcgggcctcggcatcatctacctgttcccctacgtgccgaagatcggcaaggtcatcccctcgccgctggtgtgcatcctgtcgctgaccgctgtggccatgtacctgggactcgacatccgcaccgtaggcgacatgggcgatctgcccgatacgctgcccgtgttcctctggccggaagtgccgctgaccttcgaaacgctgcagatcatcttcccctattccgccgcgctggcagtggtcgggctgctggagtcgctgatgaccgccaccatcgtcgatgacctgaccgacaccggcagcgacaagaaccgcgagtgcaaggggcagggcatcgccaacatcgtctccggcctgttcggcggcatggccggctgcgcgatgatcgggcagtcggtgatcaacgtccgctccggcggccgtacccgactgtcgacgctgatcgccggcgtggtgctgttgctgatggtggtgtttctcagcgactgggtcgggcagatccccatggccgcgctggtggcggtgatgatcatggtgtccatcggcaccttcagctgggattcgctgcgcaatctcaagcactacccactgtcgaccaacatcgtcatggtggtcacggtggtggtggtcgtcttcacccacaacctggcctacggcgtgctggccggtgtgctgctggcggcgatgttcttcgccaacaaggtcggccactatctcgacatccgctcggagctggacggtgatggcagtggtcgaacctatcgggtggtcgggcaggtgttcttcagctcctcggacaagttcaccgccgccttcgatttcaaggaagccctcgctcgggtcaccatcgacctcagccaggcgcacttctgggacatcaccgccgtctccgcgctggacaaggtggtgctcaagttccgccgcgagggcaccgaggttcaggtgctgggcttgaacgaagccagtgccaccatcgtcgaccgcttcggcgtgcacgacaaacccgatgccatcgacagcctcatgggccactgacagggagaacgatatgaaccagataatggcttgcatcgacggttcagcacaggctgcggccgtctgcgattgcgcggcatgggccagcctgcagctggacgcgccgctgacgctgttgcacgtgctcgaccagcagcaatacccggcggccggcaacctcagcggcattatcggcctcggcagccgtgaatacctgctcgaagaactcgccgcgctggacgagaagcgcagcaagctggcgctcgaagaaggccggatgatgctcgactccgccaggcagcgggtgatcactgccggaatagcacagccggacgtgcggcagcgccacggcgatctggtggaaaccttgcgcgacctggaagcggacatccgcctgttggtgatcggcaaacagggcgaggacagcggtaatgacctgcagctcatcggcagccagctggagagcgtgattcgaaccctgcaccggccgatcctggtcactccggccagcttcagtgtgcctaccagcgtgatgctggccttcgatggcagcgacacctcacgcaagggcgtcgagatgctggcctccagcccgttgttcaagggcatcccgatccacctggtgatggtcggcgatgacaatggcgagcaccgtgcgctgctcgattccgcccgcgatgcgctggtgtcggcggggttcgacgtgcatatcgccctgcgcagcggagaagtcgagccggcgctgcacgcctaccaggccgagcatcagatcggcctgctggtgatgggcgcctatgggcactcgcggattcgccagttcctcgtcggcagcaccaccacgcggatgatccgctcgaccaccacgccgctcttgctgttgcgctgagatgggggctgcaggctgcaggcctcaggcttcaagcttcaagcttcaagcttcaagcttcaggcttaaagcccgaagagcacaaagcccctagcctcctgcccggtcaaaacgcgagtttaagccgctgcgctcaaggtcacgctctgcacggctccaaccagtgggaggcgcgacccgcggcgaatgcggccgtccggttgccagcaaagcaaaggcttcgctccgagggcggggctcctacagaaaaggaaagcgctgggcttcggccctcaagtttccctacgtcgcaccgcaccgcttttgtgggagcggtcccgaccgcgagcttcccagcaaaaccgcgcgatcaacacactgaccatcagagccgccgctccccttgagggggcgactgcgcggccgcggcgcggctatgtctcggtaccgcggcccgcctgcggtctagcgatagatatccgcgcgcgaccagggcagctcgtgggagccatccggcaacggcttgctcgccaggatctgatgcaggttgatccagttgcggcggaagccgtaggcacaacccgcgagatacacccgccagatgcgcagcgcccgctccggcaccatccgctgggcttcggccagattcttctccagccgttcgctccagaactgcagcgtgcgcgcgtaatgcaggcgcaggctttccacgtcgacgatctccaggcccgaggcgctgatgcaggcgccgatctcggtcaggtgcggcagctcgccgtggggaaatacgtagtggtcgatgaactcacccgcgccgtgagccaccggccgtccgtcgaggtggcgcgaggtgatgccatggttcatcaccagcccgcccgggcgcaccacctccgacagctgcttgcagtacagcggcatattggcgtggcccacgtgctcgaacatgccgacactgaccaccttgtcgaactggccatccgtgggtagatcgcggtaatccatcagctccagctgaacctgatcctccagcccttcggcggcgacgcgctcgcgaccgagcttcaactgctcgcggctgagcgtgatgccgaacacctgggcgccgaactcgcgcgcggcgaagcgcgccagcccgccccagccacagccgacatcgagcaggcgatcgccgggtttgagccgtaacttgcggcacagatggcgcagcttggcctgctgcgcctgatcgaggtcttccgtgccggtctcgaaataggcacaggaatagaccatgtcgcggtcgagccagagctgatagaactcgttggacaggtcgtaatgaaaggaaatggcctcggcgtcggtggccttgtcatgcgcctcgcgggtcggcagcgccgaatgctcttcgccgagcgcgctggtgatctcatcgccgatgcgaatgatctcctccagcggaccgtgcaggtcgatctgaccttccacataggcaccgccgagcagatcgaggctgggatgcgcgagctgcggtaccaggccggggtccttgatctccagcgtcacggaaggggcggggccgatatcgatctccttgccgtcccacagcttgagacgcaacggaagctccagctccttcaaggtcggaagtattgtggccaacatactcggtctcctgatcgtcacgtatggaatcctagaccagcttttttccgcttgcgctcgatcgacggatggcttttctctatgggctcgattgagccgcctggacgagcgcagggaagggttgtcgcgtgcccagggctcggccgaagtggcgggctcggtggagcaggcgagggatgtgtttgggtctagggcggggaaatggcggaaggcagtgggagtcgaacccacccgggaacggctgccgcccccaaccgggtttgaagcccggccgcaccaccgggtgcgattgccttccagaagtggcaagaccggcatttggcgccggtcagtgtgcgagcagcctacctgagctcgacctccgaggccaaggcgctgtcggggcggattttgcgttcgttgccgaagcgtcgggtgaggccgatgcggtcgaagtgttcgagcagttgaatgctgcgtttgcggccgagctgaatctggtcgcggaaggcggcagcgcggatcacgccggcctggcgttccatatccagtatctggttggccagttggcggatggtcgcgtcggggtagaacaggtccttgaccacttgttgcagctcgccgatgcgggacagtttgcgcagcaggtggcgaacccggtcttcctcgatgtccagcgcgccggccaggtcgcgcacccagggcgggttgaagcgggccgattcgagcaacggccagagccgggccttcagggcttcctcttcttcactcaggcgcacccggtgtcccggcaggtgcagccaggggccgctggcttcgatcttgcctgccgccagggcttgctcgagcagggcgaggtaaacaggtcgctccagctgtggcagcgcatagcggcgcaggcggtcacggtccgggccgagttcatccggttgtgtttcgtggaagcgttggagcgctgcgaccaggctctgttcgaggtaatcccaggtaccgcggtcgaacagccttgggcctacccgcgtgttgatctccaccgcctcctccggcagacgccaggtctgccgtggccggttgaactgacgctccagcgaggccggttccaggccgttgatggcgctgggtagcagcgccggcaggatatcttcgagggtttcgccggacagcgcgcgcaagactgccagccgtgcctggcggtgccggttgcgtggcggggcgaaggggtcgagcactcggccgccaccgagggtgcgctgcgcggactggtcgcgcagcaccacacggtcgccgtgaaccgcgtgggccggtgcgttaagcagcagctgtgcgtgtacgtggccgccgggcgcgaggcattcgccttccagcagggcgatccggccggtgacgtcctgggcgccgagatggatatgcaccggggtccagtgccgcaactcgcgcgcttcaccgggcaacagggtgaattcgatgtcgatgcgtcgggtgggggcctgcagttcgggatgcagcaaccagtcgccgcggttgatctgctcgaccgccaggcgatcacccgccaggttcagggcgacccgctggccggcgtgcgcctcttgtgccgcctggttctgggcgtgcagcccgcgtacccgcacggttcggccggcggggctcagcgccagttcgtcacctacctgaacgcggcccgcgaaggccgtgccggtcaccacgacgccggcgccggtgacgctgaaggtccggtcgatggcgaggcggaaatggccgtcttcgctgcgcgcgcgtacgtcggcggcctgtgcgatcagcgcggcacgaagcgcatcgatgccttcgccggtaatgctggataccgggaagatcggcgctccggccagcggaccggcttgcagcagtgcttcgacctgctggcgtacttcggcgacgcgcggcgcttcgacgcggtcgatcttggtcagcgccaccagtgcgcgacgaatgccgagcagctcgacgatagccaggtgctcgcgggtctgcggcatcaccccgtcgtcggcggcgataaccagcagtacgcagtcgacgccgcaggcaccggccagcatgttgtgcacgaagcgttcatggccgggcacgtcgatgaatccggtgaggtcggactcgcccagcgaggcgtagaggtagccgagatcgatggtgatgccgcgcaggcgctcttcgcggcggcggtcgccttcctgcccggtcagtgccttgagcagcgcggtcttgccatggtcgatatggccggcggtgccgatgatcatgacgccagctcctgctgcagatgtggcagttgttccagcagtgccggctcgtcgtctagctggcgcaggtcgagccagagcgcgtcgtcggcgacgcggcccagaatcgggatcggcaggcagcgcagcgcttcttccagctggcgcaggctgcggccacgcaggcgtctgggctgctgtgggcggatgcacagcgcagcgctgggcaggcgggccacgggctgagcgccgctgccgatcatgcccagggcatcgctcacggtgacctgccaatgctcgcctagcgctgtggccagtgccggtgcgagccgttcggcctgggcgcgaatctctacctgcgggcggctcagcaggcgcaggctggtcaggcgctcaccgaggcgatcggggtcgcggtagagattgagcaccgcttcgagcgccgccagggtcagtttgtcgacacgcagcgcgcgcttgagcgggttcttcttgatcttctggatcagctcgcggcgcccgacgatcaggcccgcctgtggcccgccgagcagcttgtcgccgctgaaggtgacgatgtcggcgccatcacgcagcgcttcctgcacggtgggctccttcggcaggccccagcgcgacaggtctacgaggctgccgctgcccaggtcttcgagcagcggcagaccgtgggcgcgggcgatggcggccagttcggccgtggcgacgctgctggtgaagccttgcacgctgtaattgctggtatgcacgcgcatcagcaagccgctgcgtgggttgatggcgttttcgtagtcgcgcgcatgggtgcgattggtggtgccgacctcgtgcagcttcacacccgcgcgggccatgatgtcggggatgcgaaaggcgccgccgatctcgatcagctcgccgcgcgagatgatgccttccttgcgtgcgccgaggctgttcaacgccagcagcacggcagcggcgttgttgttgaccacggtgacggcttcggcgccggtcagttcgcggatcaacccttcgatcaggtcgtcacggtcgccacgcttgccgctggccaggtcgaattccagattcagcggataacgcgccgccagggtgatcgcttcgatggcttcatccggtagcagggcgcggccgaggttggtatgcaacacggtgccggtgaggttgaacacccggcgtacgcggctgcgatgctggttggccaggcgctcaccggcgcggccggcgagtaccgcttcggacagttccagcgccgcgagttggccctggcggaccggttcgcgcagctcgtcgagcaggtcgcgcagggtgcccagcagcgcttcgcgtccataacgctggtgcagcggctcgcaggcgggtgcgcggagcaggcggtcgaccgaaggcaggcgaatactgctcatagctgacgatccgaatggcgattcggtgagggcagggcgatgagtgcgcgagccgtgctggtggcgctgaacccggttgcgacgttgcctggcacgcaggactccaatcatttttctgcttcgcgatcagcatagacgctcatttcttcgcagggttcagctcggcagggtggtaacgggtggcgcgggaggatttgaccgaacgcaggtctgtcggtgggtacgtccggtctccaggctgttctggaggcgctgatggtcgctccggtcgatcgcgaattacagaaacgacaaacccgggcaagcccgggtttgtaggggaccgctacgtgggtcaggcgttctggcggatgccggcgaccagccagggctggttctcgccctgcgcacgctccatgcgccagctttcgctgaacggctcgccctggtcgaagcgcgagttcttcgagacgccgacgaaggtcagggtggcgatggtcttgtcggcctggtcgtccacgccgtcgagttggatttccaggttgtcgatgtaggtcgactggtaggcgtcgccaatctcggcgcgttcacgcttgaggaattcgaacagctgcggggtgacgaactcggcgatcttgtccatctcgttggcgtcccagttctgctgcagggacatgaaatgctcgcgggccgcggcgacgaagctctgctcgttgaaccaggcgggcgcattgatcacgggcgcggcggacggggaggcgctgctgcctccgaagatcgagttctgcgctggcatttcgcgctgtagcggagcgttcccatgcccgtgtccggccatggccggctgttgctgctggcgacggcgggcggcaaggaagcggaacagcaggaaggcgataccgccgaagatcaggatatccatgaactggagaccttcgaagccatcacccatgaacatcgaggcgagcaggcctccggctgcgaggccggccaatgggccgagccagcgcgaggctccgctggtggcggctggcgtctggcggcctgcctgggtcggggtggcctgggtctgctggggcgcctggcgagtttgatggctgggcgccgagccaaagctcttgccgccgccgaaacgcttggcgttggcatcgaggctgagggtcaggccgatacacagcgccatgaaaatgctgagcacacgttgcatttggtagtcctggtcggatgaatatacggagcagatggtgcacgccccggtcggggcgcgccagttgcagagtgtttcgggcttttgcgtcgctgcgctcgccggggtgaacggcaagcgcagcgtggtgcgaggttaacgccagttgtacagctctttctcggagatctcgtgcatcggggtgacctgcgcctggaatgccttcatcgaggcccagatgcgcccgttcagctcgctctgcgcggccagatcgccgagcaccttgtcggactgttcgcgcatggcggcaagcacttcgtcggggaagcgcttgagctgggtgccctgttgcttgagctgctcgagggccatggcgttgttgtagacgtaatcgtcgaccatgtcgcggctggcggccagcgccgcttcggtgaggatggcgcgcaggtcgtccggcaggctgtcgagggccttctggttgaccagcagttccagcaccgcctgcggctcctgccagcccgggtagtagtagtacttggcggccttgtgcagaccgaaggcgaggtcgttgtacgggctgacccagtcggtggcatcgatggcgccggtctgcagcgcggtgaacacttcaccgcccggcatgttgacggtggtcgcaccgagacgggtcagcacttcgccgcccaggccgggggtgcggatcttcaggcccttaaggtcgtccagcgagttgatttccttgttgaaccagccgcccatctgcatgccggtattgccgaccaccatgggtttgacgccgtagggcgcgtaggcttcgtcccagaacttctggccgccgccgcgggtcagccaggcgttcatctcgctggtcgacaggccgaacggtaccgaagtgaagaactgcgcggtgggcaccttgcccttccagtaatacgcggcgccgtggcctagctcggcggtgccgcgcgagacggcgtcgaacacttcaagagccggaaccagctcgccggcggcgtagaccttgatagtcaggcggccgtcgctcatggcattgacgcgatcggccagccgctgggccgccgtgcccaggcccggataattcttcggccaggcggtaaccatcttccagttgaaggtttgcggcgcttcgctggcagcggcggccttcggctcgggggtgggttcgaccttcttttcgtctttacagccgaggaggctgagcgacgcaagcacggcagcggcaacaccaaacaagtgacgacgtttcatgaatggcaatttccttaggcgattttattagtatgggtacaggttgacgtaaacgtcatagcgcttccagtttggcataactgagcatcaaccacttgcttccttcactctcgaaattcacctgcacgcgggcctgggcgccggagccttcgaaattgagaatggtgccctcgccgaacagcgagtggcgaacgcgttgccctaggttgaagggtgtttccggcacattggcgccgtcgaacagcgagccgccgcccatgccgcgggtgttgaagctgcggctgacggtattgctcaggcgcacttcgctgatcagcgccggcggcagttcgcgcacgaagcgcgagaccttgttgtaggtctcgctaccgtacagccggcgggtctcggcgtaggtgatgatcagctgttgcatggcgcgggtgatgccgacgtaggccagccgtcgctcttcttcgaggcgaccgggctcttccaggctcatcttgtgggggaacagcccttcctccatgccgaccaggaacaccagcgggaactccaggcccttggcgctgtgcagcgtcatcagttgcacgctgtcctcgtggtcaccggcctgctgctcgccggcctccagcgaggcgtggtcgaggaaggcggccagcggggtctgctcgtcctcttcgtcttcgctgtagttgtcgaaggcgcgcgcggcggagaccagttcctcgaggttttccacccgtgcctgggctttttcgcctttctcgtcgcggtgataggcgagcaggccggactgttcgatgaccagctgcgccatgttgtgcagctgcatgccttcgactttcagggcgagggtatcgatcagttcgacgaagccattcagcgcgctggcggcgcggcctgaaaccaccttggtgccgaccgcctgatgcagtgcggcccacatcgaggtgctttcctgacgggccagttgccgcaggcactcgacggtcttctcgccgatgccgcgcgccggcacgttgatcacccgctccagcgcggcatcgttgtcgcgggtctggatcaggcgcaggtaggccatggcgttcttgatctcggcgcgctcgaagaagcgctggccgccgtagatccggtaggggattcgctcgcgcagcagggcttcttcgagcacccgcgactgggcgttggagcggtagagaatggcgatctcgctgcgtgccagcccttccttgcggatcgcgctctcgatgctctcgaccacgtagcgggcttcgtcgtgttcgttgaaggcggcatacaggctgatcggctcgccctcgcagccctcggtccagagctccttgccgaggcggccctggttgttggcgatcagcgcgttggcggccttgaggatgcacgcggtggagcggtagttctgctccaggcggatggtttcggcatccgggaagtcttcgctgaactggtgcaggttctccacccgcgcgccgcgccagccgtagatcgactggtcgtcatcgcccaccaccatcaggctgtcgccgcccttggccagcaggcgcagccaggcgtactgaacggcgttggtgtcctggaactcgtccaccaggatatggcggaagcgccgctggtaatgatcgagcaggcccgggttgtcacgccacaggtccagcgcgcgcagcaaaagctcggagaagtcgatcaccccggcacgcgcgcaggcctcttcgtaggcctggtagatgctcagcatggtcgccaggaacaggtcgccgctgggctggatgtgcctgggccgcaggccttcgtccttctgcccgttgatccaccactgggcctggcgcgccggccagcgctgctcatcgaggccgagctcacggatcacccgcttgaccaaccgctgctggtcgtcggaatcgaggatctggaagttctgcgccagcttggcttcctgccagtgcgcgcgcagcaggcgatgcgccaggccgtggaaggtgccgacccacatgccctgcgggttgaccttcatcagctgctcgatgcgctgacgcatctcggcggcggccttgttggtgaaggtcaccgacaggatcgagtgcaaggaagcccgttcgacctggtgcagccaggcgatgcgatgcaccagcacgcgggtcttgcccgagccggcaccggcgaggaccaggtgacgacccaacggcgcggccacggcctggcgctgggcatcgttgagggagttcaggaggagagagagatcgtcatgcatggcgccattctagccggaaaccatgccgagccgctcgtgcaacggacggacgccaatctgtcgcacgccaggggactaggcctggctgaccagcacgcgtagggtctagcatgaggtttggcggccggaagatcgtcacggtttatacctggggataatcgctgagcgtctttggtcgggccagactatgaccgtacgctagcgacgtgccattatccggaggtgctgcagtgtcgacgatgctgctccagaacttattacaagaacaaagcgatgaccgattcagcacaagccaacccgtctacggccatgcacatacacaaccccgctgcgtgtagcccagccgaggtcgatcagatcgagcgtatccgcctgctctacgagggctcgcggctcgcattactgctgatggccctgtccagcttggtgtttccgttcgtgctctgggatacgggccccgctccgaagctgatggcctggtcgggctggacgctcctcctggcgttgtttcggctgcaccagagccacacctttaccaaggccagtgccgaggaacagcagcaggcgcactggttgcgatcattcctggtggccaacacgctcagcgcgctcaccctttgctatgcctttctggaactggcgataagcgggccctttctgcagcagacggtgctgctcggttcgcttgcctcggtcgtcgtcgccgggggtgtggcctgcggtgtatcgctgcgggccttcggcaccttcgtgattccgtgtttgctgccagcggtggcaatgctgctgggcagtggcgagccgcaactgcaggggtggggggtactcggcgcgatcgtgctgctcacgctgagcatgatcgcctggcagatgaaccggctggttactaccagcctgcaacagcgcttgcataatcaacagttgatccggcgcctggagcgcatgcgcagcgaggccatcgagctgaacggcgacctggcacgcgaagtcgagcagcgccggcatgccgaaacccaactgcgcgaggccttcgacgggctcgagcggcgagtgatcgaacgcaccagcgagctgcgtgaaagcgaggcgcgactgacgctggcgctggaagccagtgaactgggcatgtgggactgggacctggccaatgatgaggtccatcactcacggatggacgtcattttcggcgttggtcgcagcgatcggctgcggctcgccgatcagcagcgtcccgaagtacaccccgaggatggtgagcgcgtccggcaggacatgatcgaccatctgaagggcaagactgacatctactcggtgcagtaccgggccatgttgctcgacggcacgtccatatggatcgaagaccgcggtcgggtcatcgaacgcgacgccaacggccgagccttgcgcatgatcggcacccgccgggacatcagccagagccatcggcaggccgaacagctgcggttggccgcgacggtgttcgaggccgcgggcgagggcatggccatcatggaccccgaattccgcttgctggcggtcaatcaggcctgctgcaaactgtccggcttcacccgcgaagagctgatcggacgcagcgtcgcactgctggccagctccgaagacagtcgccagcaatacgcgacgatccgcgaaagcctggtgcagcacggtagctggcaaggcgagctgatcgagacccgcaagaacggcgaggtctatccgcagtgggcgcaaatgcgcgtggtacgcgacgcccacggcaacgttaccaatgtggtcgccttcgtatccgatctcagcatcaggcgccaggccgaggagcggctgcgctacctcacctacttcgacgagctcaccgggctggccaatcggacgctgctcaaggagcgtctgcatagcgcctgcgaacgcagccgcagcagcaaccgcgggctggcggtgctctacatcgatctggaccgcttcaagattctcaatgaaagcctgggccacgaggccgcggaccaactgttgcacgaggtgtcccggcgcctgtcccatacgctgtcggacgccgacaccatcgcgcgcctgtccggtgacgagttcgtagcggtactcgacgggtacggcagcctcgcgagcctggcgcacacggccagccgactgttggcgcgcatcagcaaaccgattcagatcggcgatcaggagctggtggtccgcgcgtccattggcgccagcctgatgccggacaactctcgcgaagcggcttcgctgctgttgcaggcgaacatggccatgcagcacgccaagcatctgggcggcaacaccctgcagttcttcacggagcgctttcaggcgtcgagcctggaaaacctcaagctggaaaaccagctgcgtcgcggactggaggaaggccagctggaagtcttctaccagtcgcgcctgaacgtggcggacgaccgcctcgatgcagccgaggcgctggtgcgctggcgtcatccgcagaaagggctgattgcgccgggtttcttcatcccgctagccgaggaaaccgggctgatcattgccctgggcgagttcgtgttgcgtcaggcttgccgccaggcgcgtcagtggcagctcgatgggctggcggaaatccgcgtgtcggtcaatctgtcggtcaagcagctgcgccaaggcaacttcgtcagcttggtgcgacagattctcgaagaaaccgggttgcccgccgatcgcctggagctggaactgaccgaaagccagttgctggatgacatcgataacgccatcaccatcagccggcaactgcgcgccctcggtgtgaaactggccatcgatgacttcggcaccggttattcctcactcagctacctcaagcgtttcccggtggactacgtgaagatcgaccgctcgttcatctgcgagctggatcaggtcggcgaagactcggccatcgttcgcgcgatcatcgccatggtccatagtctggagctcaaggtcgtggccgaaggcgtcgagacccaggcgcaggcggacttcctcaaggcgcacggctgtgacgagatgcagggttacctgatcagccgccccgtgccggccgaggaattcgtcgagctgctgatgtgaggggccgcccggtcgcagcggcgaacggcgcgccgcttaatccggcgggccgggtgtcctgagcgtggtttcgctggaaagctcgcggtcaagaccgctcccacaacagcggtgccgcgcatcgtcttagctgccagcctcatccccgtgggagcggtctcgaccgcgaaagagcgcccgcaccagctctgtgggatgcctcgaccgcaataaagcgcccgcaccaacccctgtgggagcggtcttgaccgcgaaaaagcgcccgcaccagcccccctgtgggagcggtcttgaccgcgaaaaagcgcccgcaccaacccctgtgggagcggccttgaccgcaataaagcgcccgcaccaaccccttgtgggagcggtctcgaccgcgaaaaagcgccagcaccaacccctgtgggagcggtcttgaccgcgaatggctcggctgcgtcgttaacgcgcagacctctagggcaggagccgggcccgtcctgctgagcgtcacccactgagagtccctgctagccgcgagtggtgctgccgtcgagttcgcgcatgagcagcgcgtagcgcaaatccacgtcttccggtaccggcaggtagacggtgtggccgtcgccgggagccacctcgatggcctcgccgcggctgttttccaggcgctccaggcgcaggttgagattgccctgcggggtcatcagctccagcttgtcgccgaccgcgaaacggttcttcaccttcacctcggccaggccgatgcgccgttcgccggtcagttcgccgacgaactgctggcgttcggagagcgagaagccgcgttcgtagttctggtactcgtcatgcacgtgacggcgcaggaaaccctcggtgtagccgcggtgggcgagggattcgagggtgtccatcagtgacttgtcgaacggccggccagccagcgcatcgtcgatggccttgcggtagacctgcgcggtgcgtgctacgtagtagtggctcttggtgcgcccctcgatcttcagcgagtgcacgcccatctgcaccaggcgctcgacgtgctgcacggcgcgcagatccttggagttcatgatgtaggtgccgtgctcgtcctcggtcgcctccatgaactcgccgggacgcgagacgtcctcgagcaggaacaccttgtcggtgggcgcgccggcgcccagggtcggattgccctgcgcctcgacctgctgcacggtgatgggttcatagaggtgaaccgagttgcccagttcgtcctccttcgcttcgtgagtcttgtattcccagcgacaggcgttggtgcaggtgccctggttggggtcgcgcttgttgatgtagcccgagagcaggcagcggccggaataggccatgcacagcgcgccgtggacgaacacctccagctccatgccgggggcctgttcgcggatttcgccgatctcctccagcgacagctcgcgcgaaagaatcacacggctgacgccctggctctcccagaacttcaccgtggcccagttcaccgcgttggcctgcaccgagaggtggatggtctgctgcgggaagtgctggcgcaccagcatgatcagcccggggtcggacatgatcagcgcatccgggcccatcgcgactaccggctccagatcccgaatgaaggtcttgagcttggcgttgtgcggggcgatgttgaccaccacgtagaactgtttgcccagcgcatgggcctcgtcgatgccgagcttgaggttggcgtggtcgaattcgttgttgcgcacgcgcaggctgtagcgcggctgcccggcgtacaccgcatcggcgccgtaggcgaaggcgtaacgcatggacttgagggtgccggcgggcgatagcagttctgtacggggcagggtcatggtgcggtggctcggtatatcaacaagaaatgtgcggattctactgggttggccgacgcttttcgccccgtccggtcaagtgagcgcgaactcctgagggtgctcccagtcatttcatagacagggcttgcgtcgtgtgcgccgagttccgatgcaagccgcccgccatattccggaggccatcgtgagcgccaaccccgtcgatgccagaagcagcctgatcgcgacgatcttctgcggggtcggtttgatggccgcgatcgatgagatcgtctttcaccaactcctcgcctggcaccatttctacgaccgctccacactggccatcgcgttgctctccgatggactgttgcatgccgccgagctgctgatgctggccgccggcgtctatctgttcgtgcgcctgagccgcgaacgcaccatatccagacggcacgcctgggccggtctgctgtttggcgccggcgggtttcagctattcgatggcatcgtcgaccacaagctgttgcgcctgcatcaggtgcgttatgtcgatgacctctggctctacgacctggcctggaacggcttcggtgtcctcttgctactgattggcctgtttatctggcggcggctcgcagccggccgtgtggcctcaccgcggagtgagtagccgatgacgcacgacgcccatctgctgaccctggcggggaccttcctgctggtcttgctgaccctgggcctgtggttcgcctatgtgctcggcgtacgcagtcagcgccggcggcgcaaggcctggccttgccgaaggctgatcagtttctcgctgggctgcggcttgctggtgctggcgctgtcgccgcccatggtcgaatggggtcatgccgacctgcgtgggcacatgatgcaacacctgctgctcgccatgttcgcgcccatcgccctgatgctaggcgcgcccggcaccctgttgctgcgttgcgtgccggtggccaccgcgcggcgcctcaccgatctggccgccactgcgccgctgcgctgcctgagccacccggtcactgcgctactgctcgatatcggtgcgctctacgtgctctacctgacgccgctgtatcagctgagcttcagccagccgttgctgcacgtctggttgcatctgcacttcgtgctggccggatacctgttcagttggtcgatcgccggcccggatcccgcgccccaccgtccgggcatgtggctgcggttggtggtgctgttcatcgccatcgccggccacgccgtgctcggcaagttgatgtacgcctatggttttccgcgcgatgcggggcacggcctggcgcagatcgaggccgctgcgcaattgatgtattacggcggcgatctggccgagctgctgttggcgctggtgtttttcgccacctggtaccgacgccgggtgacgtccgctgcattcggctggcaaacggcaaaccgccggacctagcgggtgccgggtccggcggttcggtgttgccggggcgcgcagcggcttacgcggcggcgatcacgtcgccgtggttttccggctcgatcaatgcgcggtgcagcgctgcgaccgcatcgtcgtagtcttcctcgttgaccacgcactgcatctccacctgacggatcgactggtggacggcctggatactgatgccggcagcggccagcgcggccacggtcttggccaggatgcccttgaccttgaggtccgagccgatcgccgagacgatggcgacgttgtgcacggtaacttccgcagccggatacttctcctcgatcagccgcgcggcgcggttgatcagcttgcgcgagccggacgcgtagtaggtgatgctgttggcgtcggagtccttgttcaccacgtagaggcgcagctgcttgagcagcttgctgatctcgatgtcgtagccgacgtcgccgagcatgtcctggtcgaacacctcgatgccgaagacgtccttgcgcccggcgatgatctcgacgcagggccgctcgctcttgtaatcctggctgatgagggtgccggcgtggtccggctcgaaggcattcttgatgcgcagctcgatgccggcacggcgcagcgtcttggccgcacgcgggtggatcgcttccatgccgagattcgacagctgatcggccacgtcgtagttggtacggccgatggtcaccaccttgtcggcaccgaccagattcggatcggcgctggaaaggtggaattccttgtggatgatcgcctcgcgggcaccggtagcggccgcgatctgcgcaaaggtgatctcgctgtagccgcgatcgaaggtgttcatcaggccttcgctgcagtgcgtgtaaccggtggcgaccaccagttcgcgggacaggtccacctcggcgaaactgtggcgcaccatgtcctcgaagggcagcggcgcgtcgcggtgccagccagtcaggtcaaccatcttggcgttgacgccgcggtgcttgagcgccagcaccgaattgaaggcgctgtgcgcttcgccgagagaggcgagcatctctcggaccttcatcaggtgttcgtcgagctggaagtggccgtaggcgcacaggcgttgcaggctgctcatgcactcgcgggcgtcgtccaggcgcgagttgacgaactggttggccgcgcgcagctcgaattcgcgggcgaacagctcggcgttcttgccgagcatgcgctcgcggaccgtttccagcgcgtcgagccaggcgccttcgttacgggcatcggcgaagcgctgatagacgccgggctcgccggtcttcttgtgttccagcagcaggttggtcatgccgctgtaggccgagacgacgaagacgcgctgatagagtgcatcgccttcgcgaccgccgataaagatgttgtccagcaattcttcgaagcggctcatggatgtgccgccgatcttttctacggtatgcatcgattcaacttcccatcttgggggtgaatttcatccctgggccgccgtcttccggccgccaacaaagatcaggcccggtagtcgggcctgataggggtacgtcagagatacgtctgtttctggatgtgcagcggctcgaagttctcgcgttcggcaacgaacggcggacggggcgaaagcccacagaacggggcctgcgcggcattatccacgtggttgtagacgtagaacagattgctgcgcgcgctgggcgtgatgttgctgttggagccgtgcatcgtgttgcagtcgaagaacaccacgctgcccgccgggccggtggccgtgtcgatgccgtagcggtccgcgaggcgggtcaggctgtcgtggtccggcacaccgaattcctgcttgcgcagcgatttctcgtagtggttctccggcgtcgcgccgacgcagcggatgtagtgcttgtgcgatccggggaccagcatcagcgggccattgtgcggctcgttgtcggtcagcaggatcgagcagctaagcgtgcgcatgcgtggcaggccgtcttcgatgtgccaggtttcgaaatccgagtgccagtagaactccttaccggtgaaaccgggtttgaagttcatccgcgactgatgcacataaatatcgccaccgaggatgaagctggcgatggcggcgatgcgctcgtcgcaggcgacacgggcgaacagcggattgtcggcgtggatggcgaacaccgagcggatcgcgccgctgtcgggttccttgatggtcttgccggactcggcgacggccgggtcctgacgcatgcggtcgagctcttcgcggaataccgcgacttcctcggcgctgaacaggttggggatgaccagataaccgtcatgctcgaagcgttcgatcatctccggtgcgatcggagcgttggccaggtcgttgcggtagacaaccggatccagacgctcctgccagctgggttcgtcgtgctggcgcgaagggtacaggtcggcttgcacggggttcacttcgcagtctcctttcgattcttcggcgggtttcacccaccctacggtcgagctgtaggatgggtgaaacccatcgatagcagtgctggatcgcaccacatcgtgcctctcagacggtttcagcctcgagcggatacacgccgctgtcgtcatgcacttccttaccgttgagcggcggattgaagacgcaggccatcttcatgtcctcgctaccaccgcgcagcaggtgctcgtcgtgcttgtcgaggatgtacagggtgccgggctcgatctggtagatcttgccgtcggcgatggtctcgacttcgccgttaccgctgatgcagtacaccgactccagatggttctggtagtggatgtgcgtctcggtgccggcatagatggtggtgatgtggaacgagaagcccatcttgtcgtccttgagcagcatgcgggtgctgtcccaggtctcggtcttgatcttgcggttggactgctcacagtcagccagggtacgtacgatcatattttcagctcctcaggaagcggcctggttggcgtcttgttcggacatcacggcggcaaaggccttgtccagaatgctcatggccttgtcgatctgctcttcgctgataaccagcgggcagaggcacttgaccacttcgctgtgggcgccgctggtttcgatcaccagcccgttttcgaacgcgtggcggcagacggcggcggcggtgtcgccatccgggcagctgatgccgatcatcattccgcggcctttgacgaacagcgaatcgggaccatagcggcgcacgatcttgtgcatgccatcggcgatgcgcttgcccttggcctggacgctcttggcgaactggtcatcgctccagaagtgttcgatggccgccgcggcggtgacgaaggcgtggttgttgccgcggaaggtgccgttgtgctcgcccggcttccactggtccagctccttgcgcagcagcaccatggcgaacggcaggccgaagcccgaaagggacttggacagggtgatcatgtccggcttgatacccatttcttcgaagctgaagaaactgccggtacggccacaaccggcctggatgtcgtcgacgatcagcagcatctcgtgcttgcggcagagtttttccagcttgcggacccactcggccgatgcggcgttgaggccgccttcgccctggaccacctcgacgatcaccgcggcgggcttgtcgatgccgctggagggatcggtcagcagcttgtccatcatgccgatggtgttgaccttctcgccgaagtagttggcgtacggcatgcggctgacgtcggtcagcgggacgccggcggcgccacggtgatgcttgttaccggtcgctgccagagcgccgatgctgcagccgtggaagccgttggtgaagctgatgatgttattgcggccggtcaccttgcgcgccagcttcagcgcggcctcgaccgcgttggtgccggtcgggccggtgaactgcatgacgtagtccatgttgcgcggcttgaggatcagccggtcgaaggtcgacaggaagcgctctttcgcatcggaatacatgtccaggccgtgggtgatgccgtcggcgctgatgtaatcgagcagcgcttgcttgagcaccggatggttgtgcccatagttgagcgtgccggcgccggcgaggaagtcgatgtaatgcttgccttcacgggtgatcaactcggcgccgcgggcttgcttgaagaccactggaaaggagcggcaatagctgcgaacaccggattcgtgcagttcaaacgtttgcatggggtttcctctggttcgttgtctggagtcggtggcgtcgaacggacccgcccgataaagctcttcgtcttcgtgctgaccggcgaagtgcttggcccgagagaacagcgtgcgggtgctgtactcggtctccagttgagcgaaggccttcttgaacagcgcttgtgaagcaccgttgtcaggcgagatggtcgtttccaggtgacggacgccctgttctctggcgacccgagtaaccagggccatcagcatgcgcagggccagaccctggccgcgcatcgacgcgtctaccgcgacctgccaaacgaacagcgtgtcggggcgagcgggagggcgataaccggaaatgaaacctaccagctggccgtttgcgttctcggccgcgatggaggtgtcggcgaagtcggaacactgcagcagattgcagtacaccgagttggtatccagaggctggcagcgtgctaccagatcatggagggcggaaccgtcgccgtcggttgggcgacggagcgttacggtaggaacactcaaaacaaatcctttggggttgttgattgaatcctttattagaataaacacatcaaaaatctaatctcaaccgcagtcctccatattcggccttgattcgctcctgatatcgcggaagttcgccgcttatcgagcaatctgaactttttccgaagacgcggaatttgcgccgaatccggctacatatctgggtggatatcttcggcgcgttcagtggaagaatcagcgtgactttcgcgcatcgctcgcctgctactggcggaccgccaacaggggcctgtcatttctgtgagagccagcaaaatcaagggtttcagcgcgtattggcaccgccgccggtgctgccgttcggcaccggtgcggcctgtcgatgaggtggcgaaagttgggtcgtgaaacgcgcgtgattcggccgctgaactatcgcgctctggcggagatatcaaaggcagatatcggcgatatatgccgggaagattggcgatggcgtcgcattcaatgaaatttttgtggcgagttgattttgtcgaattcagcgaagttgctctggtagttgtcggacgctggccaagttagttatgccgagaggctgcaagctgctctaacccgcgagctggaactgttccgggcgccgtggtcgcacgcccggaaaggtgcctcaacgccaccattggcggccctgatgttcgatcagttgatgagcctgctccgggccatcggtaccggccggatagggcctcggtttacggtaatggctctgccagccgcgcaggatcgggtcgacccagttccaggcggcttccacctcgtcgcggcgcatgaatagcgtcgaatcgccttcgatgacgtccagcagcagtcgctcgtaagcttcccagcggcgggtcttgctgaaggcattggcgagattgaggtccagctcgacgggctccagttgcatgcccttgcccggcgccttggccatcagctgcaggctgatgctttcttcgggttgcaggctgatcaccaggcgattcacttcgcccttggtgaagagcatgtgcggcacctgcttgaaggtgatgatgatctccgagcgtttgcgggccatgcgcttgccggtgcgcagatagaagggcacgccggcccagcgccagttgtcgatctcggccttcaccgcaacgaaggtctcggtgtcgctgtcgttgtcgacatcgttttcgaaatagtaggcctgcacgtcgtggccaccgatgcggccggcaccgtactggccgcgcacggtcttgtcctgcacgtcattgccggtgatcggcttgagggcttcgagaatcttcaccttctcgccgcggatcgatttggcgtcgaagcgcaccggcgcctccatcgccaccaggcagagcagctgcagcagatggttctgcaacatgtcacgcatggcgccggcgtgatcgtagtagctgccgcggttctccacgccgagggtttcggccacggtgatctgcacatggtcgatatgaccgctgcgccagatcggctcgaacagcgcgttggcgaagcgcagcgccatgaggttctgcacggtttccttgcccaggtaatggtcgattcggtagatccgcgattctgggaacaccgcaccgatcgcctcgttgatttcgagcgccgaatcgagcgaatggccgatgggcttttccagcacgatgcgcgcgtcttcccctgcaaggcctgcgctttccaggttggaggcgatgggctcgaacagcctcggcgcggtggccaggtagtgcacccgcacgcggccctcggcttggcccagatggtgcgcaagcccgacgaattcgccccgctgggacgcatccatggcgaagtagtcgagacgctgactgaacgctttccagacgtcaggctcgaaatcggtgcgcgcgatttccgcgcggcaatggcgctcggccaggctcagataggcatcgcggtcgatctcctggcgggagatcgcaaggatgcgtacgtcgtcgtgcagccggtgttcacggtgcaggtgatagagcgctgggatgagtttgtgtagcgccagatcaccggtaccgccaaataccagcatgtcgcaggaaatggacacagcgtcactcctaggaaggtgaacagactcaaaggtgggcgatgcggcgaaccttgtagtataactacaagcccactacagccagccggcaagaacgaatgcgaacgcacccgccgcattcgaccgcccttgccaggtattgatcatagcgagtccggaacgtgaatctgctgcaacacatcgctcaatcgagaagttcgctacgcaagtcggagctgaaggtggccgaccatgtgctcctcgatccagctgcggtgatgcacagttccatggctgatctggcccatgtggtgggtgtcagcgagccgaccatcgtgcgtttctgtcgtgccatcggttgcctcgggttccaggatctgaagctgaaactggcgcagagcctcgccgccggggccagcttcggtcagttcgccatcagcgagagcgactcggtcaccgacttcgcgctgaagatcttcgataccaccctgcacacgctgatggaggtgcgcgagaagctcgactccgacgcgctggagcgcgccgtggcggcgatggcagtggccgagcgcgtcgagttctacggcttcggcgcgtccggcgcggtggccaccgatgcccagcacaagttctttcggctgttgctcagcgctgctgcctattcggacccgcacatgcaggcgatgtccgcggttacgctcaagcccaccgacgtggcgatctgtatttcccagtcggggcgctccaaggacctgttgatcaccgccaacgtcgtgcgtgaatccggtgccacgctgatcacgctgtgtccgagtcagaccccgttggcggatctggccaccatcaacctggcgatcgacgttcaggaagataccgaaatctatactccgcttacctcgcgcatcgcccatctggtggtgatcgacgtgctggcgatgggcgtggccatggcgcgtggcccgaccctcgtcaaccatctgaagagcgtcaaacgcagcctgcgtagcctgcgcctgtcgccgaaatcggtgaaaccgcacgaagactgaccccgttcgaaagcggcgttggtcatcgcagcgtcatcaggctgtcctcatagcgtcacccatcgcgccgatgctgagcctcccagtacctttctcgggagaccagcatggcccagcagcgcgaaacctacgtcaacctcgatgcccgcgcccgccgcaagcagcaggacgaacgccgcatgcgcttccgccgcgcgatcgagagctacgacgagcagcgtcaattgcatgcgcaactgatggagttccccgacctgatggtcgccagcccgctgctgcccacctcggcggagtgccgctagggaacgccactccggctggcgctgcacggcctcatgcggggcgttcgagcaacgccatgaggtcggcatgcagcgcgtcggggatgtccacgccgtcgcgcagggtccgttccctagcttcatagcgccgttgtgacggcagccgcgcgccctggccctggatcgactcgaacatcgtctcggcgcgtgccagatgctcgtcagcggcgtctcccaggatgcgcttgggatcgatgacgatgatcagctcaccgccgtagggcgccgatttggtgcccgcatcgaaggttagcgactcgcggctggtcatgtcgccgatcagcggtccggcgagcaactcgaccatggccgccagagccgagcccttgtggccaccgaaggtcagcatggcgccgttgagcgcttgcgcggcgtcggtggtgggattgccctgcgcatcgatgccccagccttcgggaatcggtttgtccgcccggcgatgcagttcaatttcgccgcgggccacggcgctggtggcgaagtcgaagatgaacggcagcttcccggcgcgcggccagccgaaggcgatcgggttggtgccgaataccggcttgctgccgccggccggcgcgacccaggcatgactcggtgtgcaggccagcgccaccaggccggcagcggtcagcgtttccatttccgcccagagcgccgagaagtgcacgcaatggttgatggccaggagcgcgatgccctgctgccgcgccttgtccagcagcagcggcagcgcggcctgaaacggcacctgggcgaaaccgcctttggcatccacccggacgatggagggcgcatggtcgaccacttcgggcaccgcatcggctatcgccttgccggctttcagcgtggcgatgcagcccagcaggcggtagatgccatgggatttgcactcgtcgcgctccgccgcaaccacgctttcggcgatcgtcacgacatagggctcggcgaatccgtgctggcgtagaatgcgctgcgcaagatcgcggacttcatccagggataagcgggccatggaaatctccttctagcgagtcccaggaagggacagggtcagaacagttgccgcggcagccaggtggcaatatccggtacggcgagaatgatcaggaacagcagcagctggatggcgatgaacggaagcacacccttgtacatgtgaccgtaggtcatgtccggcggcgcaatcgagcgcaggtagaagatcgagggtgccaacggcggcgtcaggtaggccgtctgtatgacaaccatgaacatcaccgcgaaccagatcgggtcgatgccggccagctttaccagcggcatgaagatcggtacgaagatcaacacgatggaaatccagtccagcaccatgccggcgatcaacacgatgaacatcagtgccaggattagccagtaggggctcagatccagttcccccatgaagtcggcgagcatccagccaccgccactggcggcgaagatcgcggtgaacatggtgccgccggtgacgatcagcatgatcatcgcggtgattgtgatggtcgaaaccagcgcctcgatcagccgccggacgctcagctcgcggaagcacagcgccagaaccgctgcgccaaaggcaccgaccgccgcggattcggtcggcgaggcgacaccggcgagcatcgagccgagcacggcgaagatcagcaggaacggtgggatcagcgcttttagcgtgatcgccagtttttccgtcagcggtgtggcctgcattgccggcacggcgggcgccagtgacggcgtgatccagcagcgcacgccgatatagagcaggaacatcgccagcatcagcacaccggggatcaatgtcgcggcgaacagctggccgatcgacagctgcgccatcgaggcatagaccacgacgatcaccgagggcgggatgatggtgcccagcgagccgccggcgcagatggtgccggccgtcaacgagcggtcatagttgtacttggccatggccgggatggccatcatgccaaccacgatttccacggcgccaacgatccccgagctggcggcgaagatgccgcacatcagcatggtcgacatcgccagaccacccgaaaaaccgccgagccaaagctgcaacgcctcgtacaagcgccgcgccaggccgctgcgctcgagaatcgcgcccatcaatacgaacaacggaatcgctgacagcgagaaattggtcgaggcctgcagcagcgagccgaacatctgctgaaagatgttttcgccgaacagcagcaggccgaacagcgccgagaccgtgatcagtgaaaacgaaaccggaatgccgagaaagatgaaggcgaacagcagcgcgaacatcagcagcgggatgaaatccatcattcgggcattcccccgctgggctgcttctggtcggtgaaatagcggtaggcgtcgaccagcacctgcagggtcagcgccgccaggccgatggccagtgcgctgtagaacggccagatcagcggtgcccaggggctgacatgctcgacctccccggtcgcgaaggcgtgccaggtgcgcttgcccgcggtccaggtcagcgcgccgagaatgggcgcgaacagcagcaggtagaacaggccgttaatccagcgctgcaccgccggtttgaggcgcgaagcgagaaagtcgatacgcacatgggcatcgattttcagcgcataggcgcagccgagaatgaacatggctccgttgagcatgtaggaaatgtcgaaggcccagagcgtcggggcgttcagcacgtagcgcgagaacacctcgaagatcatcgccagcaccagcagcagggccatcgcggcagcgatccagagcaaggcggtggccggccagtcgaaatagttgcgcttcatcgaacctccaggccggccgccccggggcggccggcggcgttgctcagtggcgatacaggtaggacgagttgtccgaccagcgcttcatgtagtcctggtagtccttgaggatcgccttggcgtcggtcttgccttccgggcgggcttcgatctgcgagctgatcaggtcgttgccgcgcttggccaggtcttcgatcgccgcgggctcgagccggaggatctcgataccggcgtccttgtaggcctgcatggccttcatgtcggcatcgaggaagtggaagtagctctgcatcgtggtcagcttggccgccgcttcgagcttgtcctgggtcgccttgtccagggcgtcccagctcttggtggtcatgaagaattcccagacgaacgacggctggtgcacgcccggggtgaggatgtacggcgcgacttcatggaagccttcggtgaagttggcgccaggtgtcgcccactcgatggcgtccacgcccttgcgctgcagtagcgtgtagatttcgcccggcggcaccacggtcggcgaagcgccgacctgcttgaccacttcagcccaggctccggcggtgcggtacttgacgcccttgaagtcgtccaggttctgaatcttcttgttcgagtgggcgaggatctcggtactgccgacgcccaccaccatcgagtgcaggcccatctccttctcgcgatattcctgcaggtatttcaggccgttgccctcgtacagccaggagagtgtctcttcacccgacatgccgcctgggaagctggcgaacacgttgttgagcggatcctggttgaccaggtaggtggaggtggagtggccggccttgagcacgccgttctgcaccgattcgaacacctgcagcgccgggacgatcacgccggcaccgaccgggcgaatcttcacttcgccgtcggtcagcaggtcggcgttcttggcgaagcgcaccaggaagttctcgaagaagaagctgccttcgggcaccgaggtcggcaccgtataggtctccgcggcctggctgctggcgcagaccagggccaggccgagtgcgacgaacagattggtttttttcagttgcatgacgaaacctctcatggcgagtcaggcgccaggccgccgcagcagcccaggcaggtggcggttgcggaacgggtcacaggcccacgtcaggcagcgtcgggcggttggccatggccttggccatgatctgttcgacgtactggcgatcggcgtccggtagggccaggcgcgggggacgggtgagggcgctgccgcggccggcgatggcttcgcagagcttgatgcactgcaccagatcggcgcgggcgtcgagatggaggatcggcatcagccattcgtagatcggcatggcttcggcgaaacggccggccttggccaggcgaaagatggtctcgccttccttggggaacacgttggacatgcccgagacccagccctcggcgcccacggcgatgctttccagcaccacgtcgtcgaggccggcgaacagcacgaaacggtcgcccacctcgttgcgcacgtcgatgaagcgacgggtgtcgccggaggagtccttgaagcagaccacgttgtcgcagtcggccagtgagatgaggatgtccggggtgacgtcgtttttgtagatcggcgggttgttgtagaccatcagcggcacgtcggcattcttcgccacgtagcggtaatgttcggcggtctcgaacggcttggagccgtagaccagcgccggcatcagcatcacgccatcgacaccggccttcttcaccgcattggcgaccttggccgcctgcacgctggtgaattcggcgacgccgcagatcaccgggacccgtcctttggaggcgtcgacggcgacctcggtgacggcgatcttctcttcggcggagagcgaagtgttttcaccgaccgagccgcagaccaccaggcccgacacgccatcacggatgacgttggagatgaccttgtgggtctcctccaggttgatcgagaagtcgtcgttgaattgcgtggtaacggcggggaatacaccgctccagttgactcgtttgctcatatctatgtctcctgcgtctatggtatttcgtatacgttgcgcttcgtgcgaaaagcggcgtccgtgctccgtcgcgcctgcggaaccgggcgcctgttctactgctgtcgggctcccggccaggtgtcggagagccggtaaccttccggccagggatcgtccggatcgagcagatgctggtgcgtaccggtgatccaggcacgtcccgaaatgcatgggtagatcgccgcgttgccggccagctcggtcagcgagtcgatgcggcagtggaattccgaaccgatgatcgagcgcccgataaaggcctcgccaacggccagttgtcccttggcatgcaagaccgccatccgcgccgagcagccggtgccggtgggcgagcggtcgatcttgccgggctggatgaccacggcgttggcgccggtggccacgccctgttcgcgcaccaccggggcggcgagctggcagaaggagatatgcgcccagtccgggttggtcgggtggacgaagccgagctgttcgttggcggcgcgggtgattttcagtcccgccgcgaccagatcggcggcttcgtcgggacgaatcgaaaagcccagcgcccgggcatcggcaatcacgaaactgtcaccgccgtaggccgtgtcgaccgtcagggtgccgagcccttgcacttcgatgaccgcatcgagcttggcggcgaacgagggcacgttgcgcacctcgacccgctcggccttgccgttgcggcattcggcgatcacctcgatcaaaccgccgggcgcttcgagcgtcagccgggtttgcggctcggtcatcggcaggatgccgctgtccagcaacacggtggcgacgcacagcgagttggagccggacatgggcggcgtgtcggccggctccatgatgatccagcccatctgcgcgcgcggatctttggccggcaccagcagattgacgtggcggaacacgccgccacgcggctcgttgagcatgaagttgcgcagggtttcgtcacgggcgatccagcgcgactgttcccacagggtgtcgccgggtggtggcgcgacgccgccgacaatgacgtcgcctacctcgccctcggcgtggcagctaaccacatggatgaccttgctcgatcgcatggcgcctcccctagatcacggatttcaggaacgccgcggtttccggcttctgcgggttgctgatgacctgatcggccggaccgatttcgtgcaccaggccgttgcggaagaaggcgacgcggtcggatacctcgcgggcgaagcccatttcgtgggttaccaacaccatggtcatgccgtcttcggcgagcaggcgcatggtgtcgagcacttcgcctaccaactgcggatcgagcgccgaggtggcctcgtcgaacagcatgtaatccggcgacatggccagggcgcgagcgatcgccatgcgctgctgctggccaccggagagcttgctggggaacaccttgagcttgtcggccaggccgacatgggtcagctgtttcacggccagctcctcggcttcctcgcggcttttgccgagcaccttgcgcggcgccagcatcacattttccagcaccgtcagatgcggaaaggcattccactgctggaacacgatgccgatcttctgccgcagcttgttgagatcggtgcccttggcatgcacctcggtgccgtcgacgcgaatcgagccactcttgatgggctccagcccattgatgcacatcagcaaggtcgacttgcccgagcccgagccgccgatgatcgagaccacttcgcctttgttgacggtcaggtcgacgcccttgatcacttcgagctcgccgaaggatttgtgcaccttttcgatctcaatcattgctgccaccttttttccaaccgggcgcccaggcgagcgatcaccaggctcatgacgtagtagatgaggccggcgatgcacagcaccagcagcggctcctgaatgcgcgtgacgatggtctgcgaagcgcgcagcaactcgatgatgccgatccacatcaccagcgccgtgtccttcatcaccgacagcaccagattcacccagcccgggaaggccacccgggttgcgacaggcaagacgatgtagcgcaggtcctgccagtagctcaggcccagcgagcggctggccagacgcaagctgcccggcaccgccagcacaccgccgcgcaccacttcggtgaagaaggccgcggcatagatgcccagcaccacgcagccgacggtgaaggcgctccagtccagcccgacgatgcttttcagcgcgttgaacaggacgaactggatcagcagcggcacgctgcgaaatatgtccaggaaccaggccagcggcacgctcgcacgcgggaatagtgcgcggatcaggccgaagacgatgccggcgagggtgcccagcagcatcgcccagaaggtcaacatcaaggtgacgcccgcgcccttgagcaggaacagcagatcggttgaggtcaggctggtatcgaacatgctcggatcctcaatagcggaacagccgccaggccatcagccgggccaccgctacgatcagcttggcgatcaggtaatagatcacggcggccagggcgaaatattcgaaggtgcggaaggtcttgacgttgtattcctgggtcacgccggtgaggtcgttgttcagcccgacgatcacgcccagcgaggtcatcagcacggcccagaccatctggttcgagagcggatggaagacgatgcgcagcaattgcgggatgacgattagccggtacgcctggaatgcgctcatgcccagcgagcgggcggcgcgcatctgcgtgtccggtaccgccttgaggccgccgcgaaagttctccgccaggtagccggcgttgttgaaggtgatgccggcgagcaaggccgcccaggaactgatgtgccagccgaaggcgccgaggccgaagtacagcgcgtagatctgaaacagcgaaggcgtattgcgcgccaccgagacccaggcgctgccgaagccattgagcagcgggttgcgggtctcgcgcatggcggtcagcgccagggcgatgagcacgccgaagatcatcgacagcgcggcggtctcgaaggtgaccaccgcgccggcgagcatgtccggcaatgcacgcagcgcagggcgccaatggaaggtgtagtcgaacatcgctcagtgcactccttcgctatcggccgccgccagccagcgcggcagacggccactggcccggccgctgcacgcggtttcgatacagtcggcgaggctgccgaagcgcacctttctgcccaccagaccgggcgcgtaatgggcgtatttaccggaattggtcatcagggtgcgcgccgtcagcggcacgaccggctcctcgatcatgcaccagcaggtgtcggtgatgatccgcacgccgaagcgctcgagtgcctgcagatgaccggcttcgctcgcctgccgttgaatctcgcggccgcaggtcaccagcacggcgacttcggcatgcttcgtcctgccttcgcagagctgcgccaggcgagcgaattcgcttagcgagaaatgcggattgcccaggctgatcagttcgacgtccacagattcaccactatccagctcgcgccagctgccgagcaggtccgcacgctcgacccgtagagtgcgatctggcgcccggccgcccagggcggcctcgaccgtcgacgcctctggcgtgacgccggcgatatgaaacatcggtgccgccgaggtggtggcgaaggcggcaccgaaggccttgaggtcgtctagggttggtgaggcctgctcgagtccgcagatcaccgggatttcgctaccgcagagcagaccgaggtgatagcccagcagcgggtagaaggcgtcgtccaggttgtgcagcggcggtagttcgatacgcagcgtggcgtggcgctggtcggccagatggcatcccaccagcggcgcgcggccggtcagggcgatgcagatatcgaggaaatccgggtacttcagcgtgcgggcgcccagcacgctgttggcgtataccacggcgttggattccgcccagacgacttgttcgccggccttcggcgcgctgtcgagcaggtagggcgcacaggtgaaactggcgctggcgcccatctcgacataggcatcagccaattggctggcgggctcaccgaaggcggcggcgacacccatctgccgccagcggcgctgatccaccgagatcgagttgagcgtggtcggcacctgcacccgtccgccccagtcggccagttggcgggcgaacctgaggctcgccggtccggtgtaaatgcagccgtcgatatgcgcttgggtgatgtctaccaactcacgcgcaccctggagttcagccatgcgcagtaatatctgcatggccgcctgggtggctttgccctgctcaccggcaagcatcgcctggtcgtgctgattcaaggcgatccggctgggtggaaagtcgtgtgcagcagtcctttcacaggccgaccaatcgtcgactggctgctcggcaaaggcatgcacctcaccgttttcgatgcgtagatagcgggcgtcgcgcagcgccgcgaaggcctgtggaccgacgcttaccaccggtaacgagcggtcgaacagttgctgcgccaccagcacgccgagcgtgaggatttcctcggcttcggcgaagaccagcgcggccggtgcgtgaccgttgagaatgagttccagcaggacgctgctgccggtgcaggagccgcgtccgctgggaatcgccaacaccttgccggcgatgacctggccgctgagcgggtggtgacgatcgatcacctccccgctgaacgggtcgaccccaccccagaagctcaggcccacgtccgcatgcaggcatgcagcctgggcactgcccggaaccaggcaacgaccgctgctcgtcgcctgcaggtgtcgagccgcgtggtctgggtcgctacgaagcatgcttaccccgccgatcagtagtagacgccaggcacggtcaggtccaccggcttgccgccgacccacttttcatacagctcggcgtagcgaccggagcgcacttgctggttgacgaacagattcaggtaattgaccaggccgtactcgctgcgcttggcggccagcgacacgtagtcgatgacgtacggggcgtcaccggcaattttcaggcccttgtacttgcccgatttgatggtggaagcggcgacggtattcgtcactaccgtggcgtccacgtggccttgggcgaccgcgaggatggtgtcgttctgcgactgataggcgcggaagctgccgttgccccaggccttgacgtccttctctagggcgatggcttcgaaggtgccgctggtattgccgaccgggcggcccttgaggtcgtcgtaggtattgattccggtgtcttcgcgcgtcagcaccaccatgttgaaggcgaaataggggatgctcatgccgactgtcttggcgcgctcgagggtgtccgaggtggacgcgacgatcacgtccgcgcggcccgagacgagcgccgggattcgatccgggaagggcgtttcgaccacttccgcatcgacgccgaggaccttggccaggtcgttgcagtagtcgacgtcgaagccggcaggcttgttgccttcgtcgcgaaagcccatgggcgggaagtcgagggtaacggcacagcgcagcttgccggagccgatgatgtcgtcgagtttgtcggcttgggcaatggaggtgatggaggcggcaagcagagcgctaacggccacagctagggttttcttcatacagtcctcgtcgatgcggttgatcgtccagttgattcaagcagctgtttcgagatttcgtatacgttatccgcaaagcaatagccgtgccggccacctaaagcgcgacgagcggatgaactgagtcaatggcagattgccgaaaggcgcggcctagagcaggtacatccgaggcagttcgatctatggcagcaggcttaccgttcgtcggaaaacccagggcggtgcgttccgggtctgcttgctacaaatgggagcagtgcgttaccaagctgcccgctgatcggtgggtagtgcgttgcgataggcactgggggacaacccggtcagcgcacggaactggcggctgaaggcactgtgatcggcataaccgcaacgcaaggcgatctcggtgatgggcagcgctccgccgagcagctcggttgctgcgtccagccgggccttgtgaatcatctgccgtggggtgagacggaagatccgtttgcacaatcgctccagctgcgcgaccgatagcccggcgatggcggtgagctcggacagcctgatagggcggaaatggttcttgcggatatgcgcatccaccgcggcgagcttgagataggcggggttgttggccgcaggcgcctgcaggtcgatggacaccccggccatgccgatgatcatgccttcggggtcgcgcaatgccagtttatgtgtcatgcaccagcctggttgccggcccgggtacaggtgcagttccaactggtcctgcagacgcaggccctggctgagcacgcggcggtcctggtcggtgtattgcgcgccgaagccggtggggaagacctgctcggcggtcaggccgatcagcgcatccggctcgccatgcccgcagcgctcggccaacgtgcggttggccaggctgtagcgggcgtcggtgtccttgatgaagaacaccacgtccggcatggcgtcgagcaagggggcgatcagcttcaggctggccagcagcgtgggcagatctgcgggtgtgtcggtcggaagcagggagagcatcgggcgcgctacgagctggggagtctcgagaatacgatcggcaacccgcgaatggtaggcgcggcttaggtctgtgcttcgtgctggtccatctgttcatcatcggacagggcgacgagcgtgccgatgcgtgccgggctgatcggctgtcgcggttttggcggttgccagccaaacaggaaatggctggctgcgccgcagatgcggccttggcaggcgcccatgccgcaacgactctccagcttggcctcgacccagctgccgtggctggccatcgccgagtagggcacgtcctcgcagcggcacaccagcgtgtcgggctcagccagggttttcaattgttcgttcagctggaaggttcgtcccagcaaatcggcgaagccctgccaatgttgccgctcggcgaatcgcgccttggcctgttcgagctcgccgatcgcggcataaccggcgatgctgccctcgacccgtgccagttcgctgccgccgaagccggtgcattcgcctgccgcaaaatgatccggcaggctcgtggcctggtaggcgtcggcctggatggcccgtccctcgagcgcgcagcccagtacctggccgagctcggtattgggaatcaggccgaagccgcaggccaggcggtcgcaggcaatttccgacagcttgccgttgtggctcaggcgtacggcttccaggcgatcattacccagtgccgccagcacctgagtaccactgcgatagcgggcatcgctcagcgtgatcgcctgcaggactttgcccggccagcgtggcaagcgtgcggcgaaaccggcgagtgccgccagcggggcctgctcggcgatgcacaggaggtgtgcgccggcagccttggcggtggccgcgctggccaacagcagcggaccggtgccggcgatcaccagacgctgatcggccactggcatgccgcctttgataagcgcctgcagcccgccggcaccggtgacgccgggcaacgtccagccggggaagggcagcagcagctcgcgcgcgccggtgcacaagatcagtctgtcgtagccgatcagatgtccctgctgggcatcttcgaggagcaatcgtttgccgccgggggcggcgaccacccgtgcgccgttgtgcagctcgatattcgcggcgtccgccagcgcctggcgttgctgccgagccaaggcgggcaactgggcctgggggccgtcccgccagatctgtccgcccgggagggggttgtcgtcgaggatcgcgatactggcgccactgggcgcggcggccagggcggcagccattccggcagggccggcgccgacgatgaggatgtcgtaatgcgctttcatgggcgggtttccacgcgcatgccggcgacgcagggcgtctggcaggccaggcggcgttggccgtcgatgctgacccggcactcctggcagatgcccatgccgcacagtggcgcgcgacgttcgccggataccgaggtgcggctgcagccatcaccgcccagatacagcgcggcggccaccgtggtaccgggcacgacctgcagtgcacggccatcgaggatgatttcaatcatggcccggccctccggcggcgctggcagatatcgacggcccgacggacgactgaaggaagcgcgtcgggcgatagggctcgacggccagcacgggctgtctgcccagcagctgtgcgaccagcaattcggccgtgccgggtgctgtggtcacccccaacccctcgtggccgaccgccagccacaggcccggctgctgcgggtgttcgcccaccagcggcaggccatccgggcttgcggcgcggaagccggtccagctgcgaatggcattcaagcgggccagtccgggcatgtaatcgacggcgcgcttgagcatccgcgccagcatccagctgtcgatctccgggtcctgggtgccgaactgccgcgaggagccgatgaacaattgcccggtcgggcgcggttggatgttgcaggccaccgatggcccttcgctgttgtgggcgctggtgacataacccagttcgaccagggtgtggctgaccctgccggggtagcgatcggtgatcagcagatggcctttcttcggctggatcggtagctccggacagagctcggtcgcgtgaatcccgttggccagcaccaccgcctctgcgcgcaggatgctgccgtcgctcagctcgacctgttggccctgtacgcgcgtcacgcacgcctgcctctggacgatgcgtttgccgccctgggtaatcagccagcgcgccgcattgggtgcatagaggatgccgtctccgctgaccttcagcgcgccatgcaggccactgcgcagctcgggttcgacggctctgagcgccgcgccgccgagcagttcgcagctcatgccctgttcggacaaggtgttcagcttgttttccgccatcgccatttcgtcatcgctggcggcgagccagagggtgccgttgttgcgatagccgcagctttcatccatcagtcggcccagttcccgccaacgctggatcgaatagttgctcagcgccagctcggccgggttctcatccagcgccaccagatgtcccatgccggccgccgtcgcaccgccgcgctgggcatcgagcagcagcacgtccaggccgttggcggccagttcgtgggcgcaggcggcgccgatgatgccggcgccaatgatgacgacatccgcattcacgggcgaatgccccaggcgaagggatcgtcctcctcgatcagcagtgtggcttcggcgctcaggtgcgcgcggccgcggatggtggggatgatgcgctggccatccggctcgtaactggcggtgaactggctaccgatgacgctggcctggcaccagatttcgccgggctgcagcttgccgtccgctgccaggcaggccagcttggcgctggtgccggtgccgcagggcgagcggtcataggctttgccagggcacaggacgaagttgcgactgtcggcttgggcatcgtcggcgaacagctcgatatgatcgacttcgccgccgtcttcgccgcgtatgccctgggcttgcagtgcctggcgcaccgcccaggtgtaagccgtgagcgtctcgaggttgtcgccggcgatgcgctggccatgctcggcaatcaggaagaaccagttgccgccccaggcgatatcgccggtcaccgtgccgtggccaggcacctcgaggctcactgccttgcggtagcgataggcgggcacgttgcgcacgctcaccgagcggtcgtcatgcagggtcgcctgcaccgtacccaccggtgtttcgatgcggtgaacccctggctgaatgcgccccaggtgcgccagcgacaccaccaggccgatggtgccgtggccacacatgccgaggtagccgctgttgttgaagaaaatcacaccggcgcaggccgtcgggtctaccggctcgcagagcagtgcgccgaccagcacgtcgttgccgcggggttcgagcatggttgcagcgcgccagtgatcatgctgttcggcgagcaatcggcggcgttcggccatgctgccggctccgagctgaggaaatccatcgatgaccagccgggtcggttcgccaccggtgtgactgtcgagaacctgaatgcgcttcatggccgccctgcctgtacggggaatgagtgacaagcatccaacggctgcctgcttacggcttgaacgttttcgcctgcgtggatgacgaaatcggcacagaccaggcgggtatttcgatgtcggtccagcgatgcccatggggcaggtgttcgaacagtgcgcggcagacgccaatgatatggcgctcgatcagttcggcagccaggtccacgtcgccgctgcgacaggcgcgcagaatctcgcgatgttccagatcggcgccgtgtttgccttcgtggatgctcatctgtacccgcaggtagcgctcgaccttgtcatggatggagcggatcagttgcatcatgaacgggcgttgcgccggctcgtagaggcaggcatggaaggcccagttcaattcggcccagcgcgccgcgttgtcctcatgcacgaactcggcgcagatcgactcggcctcggcaaaggtggcgtcggtcatgttgggcacggcgagccggatgatctgagtctccagcagcacccgcacttcgaatatctgcgcgagttccggctcggtgagtacggtcacgaccgcgcccttgttgcgctggaacgacaccagtccttcggcttccaggcgtttaagcgcttcgcgcaccggaatcttgctgacgttgaacaggcgcgccacgtcatcctgacgcaccggctcgccctcggcgaactggccgctgatgatcgcttcgcgcaggtgcttggcgatgacttcggaagccgagggtacgatgcccaggttcggggcgttgaaggatttcaggggcacggccaagcgctcggtacaggaatgggtgcttgagaatatcgtatacgccgattcgcttcatgttttccgacgaagcacgcggcgagcttcttcacgcccgaccatccagtcaaaactgatcggctccgctgaaacggcgctccagcgcgttgatccgttggcgttcggtgcgcgcgaaggcgaagaaggtctgcgctactggtgacaggtatttgccgcgggggtggaccaggcaccagctgcgcatcagcggtagctcttcgaccggcagttcgatcagcgcgccgctgtgcaattcgcgcagcacggcgtggcggggcagcaacgccagtcccagcccggccagcaccgcttcgcgctgggcttccagcgagcccagctcgagcgtctgggcgaagtgtgcgcgccgctggttgcagtactgttccgccgcacggcgggtgccggaaccttgctcacggatcagcagcggccaggcggtgaggtcctgcaactcgagcgattcacgctggcacagcggatgatccggtggcgcgacggcgacgatggcgttgtcgaggaagggtagaaattccaggtccatgtccgctggcacctgcgagatcagcagcaggtcgtcgcggttggcattcaaccggtggaccgcctgggcatggttgaccaccaccagttgcaggctgacttccggatgccgatcacgaaacagcgcgaacaggtgcgggacgaaatatttggcgctcgactcgatcgccagcttcaactggccctgcagggagccctgcaaagtggacagctgcatgtcgaggctttccagccggccaaaaatatcctcgctggtccgtttgagcgcttcggcggcatcggtgaggtagagcttcttaccggtgtattcgaacagcggctgcccgagcagctcctccagctggcggatctgaaggctgaccgcaggttgggtcaaggccatctcttcagcggcccggctgtacgagtggttgtcgcagaccgctcggaaaacacgcagctggcgcaatgtcattcgcatcaaggactttcgcatggcgactccaatccggcgcgatccggtgatttagggcggttttggcgcgactataagcaatagattatgcacaaccaaacaattattcattttcgttaatcaatgctcgcggagtagggtaaaacgcatcgcctgaaggcggtatcacacggcccactgggccatctgctcactgatccgagggaagacagcgtgatcaagaagctgctgatcgccaaccgcggtgaaatcgccgtccgcatcgtgcgggcctgcgccgagatgggcgttcgctcggtggcggtattcgccgagcccgaccgccatgcgctgcacgtcaagcgcgccgatgaggcgcacttcatcggtgaggatccgttggccggctacctgaacccacgcaagctggtgaatctggccgtggagaccggttgcgatgcgctgcatccgggttatggattcctctccgaaaatgccgaactggcggaaatctgcgccgagcgcggcatcaagttcgtcggccccagcgccgaagtcatccgccgcatgggcgacaagaccgaagcgcggcgcagcatgatcaaggccggcgtgccggtcacgcccggtaccgaaggcaacgtggcggatgtcgacgaagccctggccgaggccgagcgcatcggctatccggtcatgctcaaggcgacctccggcgggggcggccgcggcatccgccgctgcaactcgcgcgaagagctggcgcaggcttatccgcgggtcatctccgaggcgaccaaggcctttggttcggccgacgtgttcctggaaaagtgcatcgtcgagcccaagcacatcgaggcgcagattctcgccgattccttcggcaacaccgtgcatctgttcgagcgcgactgctcgatccagcgccgcaaccagaaactcatcgaaatcgcccccagcccgcagctgaccccggagcagcgcgcctacatcggcgacctggcggtgcgcgcggccaaggcggtgggttatgagaacgccggtaccgtggagtttctgctcgccgatggcgaggtgtacttcatggagatgaacactcgcgtgcaggtggagcacaccatcaccgaggaaatcaccggtatcgacatcgtccgcgagcagatccgcatcgcctctggcctgccgctctcggtcaagcaggaagacatccagtaccgcggcttcgccctgcagttccgcatcaatgccgaggagccgcgcaacaacttcctgccgtgcttcggcaagatcacccgctactacgcacccggcgggccgggcgtgcgcaccgatacggcgatctacaccggctacaccatcccgccgtattacgactccatgtgcctgaagctgatcgtctgggcgctgacctgggaagaggcgctggcgcgtggttcgcgcgcgctggatgacatgcgcgtgcagggcgtgaagaccacggccagctactaccagaagattctcgaaaatccggatttccgcagcggacagttcaacaccagcttcgtcgataaccatccggaactgctgaactactcgatcaaacgcaagccgggcgaactggccctggccatcgccgccgccatcgccgcccacgcgggtttatgaggcggcaggctccaggccacaggcggcaggctgaccgagctcgcctgcagcctgcagcttgtagcctgcagctctgaggagaaagaacatgaatcagaagaaaatcacggtaacggacaccatcctgcgtgacgcccaccagtcgctgatcgccacccgcatgcgcaccgaagacatgctgccgatctgcgacaagctcgaccgtgtcggctactggtcgctggaggtgtggggcggcgcgacgttcgacgcctgcgtgcgcttcctcaaggaagacccttgggagcgcctgcgccagctcaaggcggcgctgcccaatacgcgcctgcagatgctgctgcgcgggcagaacctgctcggataccgccattatgccgacgacgtggtcgaggccttctgcgccaaggcggcggagaacggcatcgacgtgttccgcatcttcgatgcaatgaacgacgtgcgtaacctcgaaaccgcgatcaaggccgtgaagaaaaccggcaagcacgcccagggcaccatcgcctacaccaccagcccggtgcacaccgtcgagctcttcgtcgagcaggggcgggcgatgcgcgacatgggcgtcgattccatcgcgatcaaggacatggccggcctgctgacccccttcgccactggggatctggtgcgcgcgctgaaggccgagatcgatctgccggtgttcattcactctcacgacaccgccggcgtggccagcatgtgccagctcaaggccatcgagaacggcgccgaccacatcgacacggcgatttcctccatggcctggggtaccagccatccgggtaccgagtcgatggtcgccgcgctgcgcggtaccccgtacgacacgggcctcgatctggaactgatccaggagatcggcctgtacttctacgcggtgcgcaagaagtaccaccagttcgaaagcgatttcaccggcgtcgacacccgcgtgcaggtcaaccaggtgcccggcgggatgatttccaacctggccaaccagctcaaggagcagggcgcgctcaaccgcatggacgaagtgctggccgaaatcccgcgcgtgcgcaaggacctgggttacccaccgctggtaactccgacctcgcagatcgtcggcacccaggcgttcttcaacgtgctcgccggtgagcgctacaagaccatcaccaacgaagtgaagctgtatttgcagggccgctacggcaaggcacccggcaccatcgatgccaagctgcagcgccaggcgatcggcggtgaagagatcatcgaagtacggccggccgacctgatcaagccggagctggacaagctgcgccaggagatcggcgcgctggcccacagcgaagaggacgtgctgacctacgccatgttccccgacatcggtcgcaagttcctcgaggaacgcgaggccggcaccttgcaaccggaagtgctgctgccgatcccggatggcagcgccgtcagcgcggccggtggcgaaggcgtgcccaccgagttcgtcatcgacgtgcacggtgagacctaccgggtcgacatcaccggtgtcggcgtcaagggcgagggcaagcggcatttcttcctctccatcgacggtatgcccgaagaggtggtcttcgagccgctgaacaacttcgtcggcggcggcagtggcggtcagcgcaagcaggccagcgggccgggcgacgtcagcaccagcatgccgggcaacgtggtggatgtactggtcaaggagggcgacgtggtcaaggccgggcagccggtgatgatcagcgaggcgatgaagatggagaccgagatccaggcgccgatcgccggcaagatcaaggcggtgcacgtcgccaagggcgaccgggtgacccccggcgatctgctgatcgagatcgaggcctgacagatgtcccttggggagccgaaaggctccctttttttgtctgctgaacgaatgcgggagttgggtcgatggggctagcggtcgagacggcgctgattgcgcagggctttcaggtcgccctgggtgcaagtgagcggctctgcaccggtcaggtcataacagcgctgaccgaaccccatcggccaatagatgatgccgcctggcggccagaaaatggacgcgacacgaaagcgcgcgcgcaacttaccctgctgcaacagttcgccgttgtcgctgctcagcgtgtaggggataccgccggctgccgtccagaagaacggacgcgtcttgaccagcccttgcggatattgctgcggccgctcatagacggagactttgctgttctcgggcagcttgaagtaggtcgcggtggagcatccgctgaccgctattgcgagcgccagcaggcccgccgcacgttcgagtttcatcggttttctttccttgtcgtgacgcccggggcacaggccgtgccccgtgaagcgggcggcaatatagctgaggccggcgcaagtggggcaattccggctaagtcgatggccgcccgagacgcctgccgcatggacgtgctcgatcaaccgctggccggaacaaggtcgtggccggtaggcacggttcgcgcgacgccagggtggggtttcggcgtgcggtattccctggcgagcgcgcgtggcgcatcggccgggcgccggtatcgcagacgagggctggcgaaggctgtgatggggtcgatgcggccgacgtctagtagctgtgtcgtgtccagcgcatccgcctccgtggcaccgatgatggactggaacgaccgacatccgtgtttttctcacgacgagacctgcatgcagaacctgttgaacgagatactcgaagaggtccgcccactgctcggccaaggcaaggtggccagttacatcccggcgttggcggacgttccggcaaaccagctcggcattgccgtttgcagcgccgagggcgagctgttttacgccggcgacgcgaagacgccgttttcgatccagagcatctccaaggtgttcagtctggtccaggcgatccagcacggcggcgagtcgctgtgggagcggctggggcacgagccgtccggacagccgttcaattcgctggtgcagctggagttcgagcgtggccggccgcgcaatccgttcatcaacgccggggcgctggtgatctgcgacatcaatcaatcacgtttcgccgtgccggcactgtcgatgcgcgacttcgtgcggcacctctcgggcaacccgcaaatcgtgtccgatacccgtgtcgccgactccgaatatcagcatcgcgcacgaaacgcggcgatggcctacctgatgcaggcctttggcaacttccacaacgacgtcgaggccgtgctgcgcagctatttccatcactgtgcgctgcgcatgaactgcatcgatctggctcgcgcattcggtttcctggcccgcgacggcgcctgtctggacggcggcgagccggtactcagcccgcggcaagcgaagcaggtcaacgcgatcatggctaccagcgggctttacgacgaggccggcaacttcgcctaccgggtcggcctgccgggcaagagcggcgtcggtggcggcatcgtcgcggttgtgcccgggcgtttcaccgtctgcgtctggtcgccggagttgaaccaggccggcaactcgctgatcggcatggccgccctggagaaactatcgcagcgcatcggctggtctatcttctgaaggccggtcgctatgaaattcctcaggccggggcaggacccggcctggttacggtctgtcacaccttcgcggtgtctggccttgaacgtgcaatgtcgtatccaaacccaccataaagagagatcgccatgagtctcgaagacaaaacgaccgaaacggcgcaggaggcgctcgataacctgatcgcgggagtcatgcagttccgcgaggaaatctatccccagcaacgcgagctgttcagcaagctcgccaacgagcagacgccgcgggcgatgttcatcacctgtgccgactcgcgcatcctgcccgaattgatcacccagagctcgccgggtgatctgttcgtgacgcgcaacgtgggcaatatcgtgccgccgtacggggtcatgaacggcggtgtgtcgaccgccatcgagtttgccgtgatggcgctcggcgtgcatcacatcatcgtctgcggtcactccgactgtggtgcgatgaaggcggtgctcaatccgtccagtctggaaaagatgccaaccgtgaggacctggctacggcatgccgaggtggcccgcacggtggtcgaggccaactgtggttgtgcagaccacaacaccttgggcgtactgaccgaggaaaacgtgctggcccagctcgaccacctgcgtacgcacccctcggtggcggcgcggctggccagtggcgacctgttcattcacggttgggtgtacaacatcggcaccagcgaaattcgcgcgtacgatgcctcgcgcggcgagtttcgcctgatcggcgacggcccgctgccgatggcgacgccgaaatcgcgttacgtctgacaatagtggatgcggggcgccgtcatggcgccttgcggtcgcggatcaggtagcagaggtcgggtgtcttgctgcagccggcatagccttcgctgatgacctcgttcagcgccgcctgcaagcgcgacaccgcttcgtccggggtgtccttgtgcaacgccaggtagaggtcggtcggctggaagctcagcacagtctccaagccctccgcgccctgttgtttggcgtggtagcgccagaccggatcggccgtcgcccacaggtcgatgcgaccgctgagcagtttgcgcaggttttcttcttcgctcaggctgtcgatcggctgcaggccctggctgctcagcagctggctgatcccgctgcttttctgagcaccgatggagtaggccttggcctggctcagcgcggtgagtgatatgccggtgttcggggcggccagtagaacgctttcatagcgagcgagggggccgacccacttgaattgcgcttgattctgttgcgtgcgggcgacggagaacagcccgtagccggcgtcgtccagcgtctggctgtagatccgatcccagggcgaacgcagggtcaggctgtaggcgattccggcacgcttgaagatttcgcgcacggtatcggtgccgatgccttgcacctcggcatctcgggcgaagtgcttgttgttcgggcccatgttgaagggcggaaagttatcggtttgcagaatgatctggaagttcttcggcagctcggcctgggcaatgccggccacaagtgcgaggcatagcaatagagcggctttatgggatgcccccatgatgtctgctcccttgacgctatttttattgttggcgattcaagggtagtcgcgcggcgccgcccatgccagcgtcgaaggccgtcagggtgaaccctatcgcgttgccggcgtggatcaggacgaggggagtgacgaggagattgcgccacgcagcggcggcgcatatagggatggacgcagcgcggcgcggcgctatttgtgcagcacgaactggccggtgaagcgcacggcgtcacgaccatcggcagataggattcgactatgcaaggcgatgcgcgaacggccacggcggcgatagatcgtctcgaagcgatcccaggcgtcttcgctcggtgccgagcagatggcgatggcgtcgtcgaccaccggaagcgggtaatcgatctggccctcgtgaatgacgatgtgaccgtcttcgattcccgcctcgcgcagccgcaggtgcaaccagccccagccggccagcaccgacgcgcaatacaggctgccgccgaacatgctgctcttgtggttgatgttcgcttgcagcggaaccctcaggcgcagctcatggttttcccattgctcgacacgcaggcccatggcccgggtcagagggatatcgtggtgcaggatggcttccagatagcggctaacgcggctcatgcccggtggattcctaaacgtttgcagatacaggcagacgtcaagcatgactgctgagtcacgagattgccagtttccatcggcgcttttttgcctgtcgcagaacccctcgccgcggttgggttgtcgtctcagcgggtagcggctttttgctgataagcgcagtagccggggcgcgggcctacgcgtggatggttgcggcaggtgtccggtcgcttggcatagaccgtgcaaaggcgagtctggcgatccaggtaaagacaatcgccgttggccaggcgagtcagggtgaagatgccgtgcttctgattgaaatgctcgatgatcccggccttgctcaggcgtttggcgacctgtttggccggctcgtcgcgctcgaaggcgtcgatcacctccaggcggatcaggtcttcgagacgcacctcgaccggcaaggtgcagcaggttgcccggcaatcgccacacagaccattgctgtagcgagcccaggtttccaggcggtcggggtcggcggaagcgatcagtcgagttttcacgggggcaggcaatcggtcatgacggcgcgcgatcataacgagccggagtggaatttccagcgaatccgacgagtcgaacgacggacaaacggtcgcgcagaaccagccgaaacctgcaaacctgtctacattgcccttttgcgaggcggcccggtgctgccatctacccctcactctcaattttcccgcttctcgaggtctgctcatgacgcaagaatccattgcttccaatgccgatgaagtcacagccttccgcaacgccatcatcagcaagctgacctattcgatcggcaaggatccggagcacgcctccgaccacgactggttcgaagcggttgcgctggcgacccgcgaccgcatgatcgaccaatggatggatcgcacgcgccagggctatcgcgaagggaagaagcgcgtgtactacctctcgctggaattcctgattggccggctgctggtcgatagcctgagcaacctggggctgctggaagtggcgcgtgaggcgctggccggcgtcgaggtcgatttcgagcgcatccgtgtgctcgagccggacgcggcgctcggcaacggcggcctcggccggctggcggcctgcttcatggaaagcatggcgacgctgggcatcgctgcccatggttatggcattcgttacgaccacggcctgttccggcaggcgatcgtcgatggctggcagcacgagcagaccgagacctggctgaatttcggcaacccctgggaatttgaacgccccgaagtgagctatctgatcggctttggtggcagcgtcacggccatgccgcacgacgcgaccgggccggatcaacccaagcatttctggcactgggccgaaggcgtccgtgccatcgcctatgacacgccggtggtcggttggcgcggggcgagcgtcaatacgctgaggttgtggcgggcccgcgccgaggcggacttccatctggagcgcttcaacgccggcgatcacatcggagcggtcgccgaggaagcgcgcgccgagagcatctcgcgggtgctatacccggccgacagcaccgaagcggggcaggagttgcgtctgcggcaggagtattttttcgtcgccgcctcgctgcaagacctgttgcgccgtcatctggatcagcgtggcaccctgctgaacctgcctgagttcgccgccatccagctcaacgacacccacccggcgatcgccgtggcggaactgatgcggttgctggtcgacgtgcacgacattccatggcgcaaggcctgggagctcaccgttggcacgctctcctacaccaaccacaccttgttgcccgaggcgctggaaacctggccggtgggcctgatggaacgcctgttgccgcgccacatgcagatcatttacctgatcaatgcgcagcatctcgatgcgttgcgcgagcgcggtatccacgacctcgatctgctgcgctcggtatcgctgatcgaagaagggcatggccgacgggtgcgcatgggcaatctggccttcctcggttcgcattgcatcaacggcgtgtcggcattgcataccgggctgatgcgcgaaacggtctttaccgacctgcattcgctgtacccgaaacgcatcagcaacaagaccaacggcattaccttccgccgctggctgtatcaatccaacccgcagctgacccgcctgctggtcgaccatgtgggcgaggaattgctcgactcgccggaaaccctgctacgtcagctcgaacccttcgccgaccagccggacttccgcgcgcgtttcgccgcgcagcggctgagcaacaagcaactgctggcgcgcatgatccaggagcggcttggcatcagcgtcgacccgaatgcgctgttcgacgtgcacgtcaaacgcatccatgaatacaagcggcagctgctcaacctgctgcataccgtggcgttgtatcaggcgatacgctccgacccgggcggccactgggtgccgcgggtgaagatctttgccggcaaggcggcggccagttaccacacggccaaactgatcatcaaactgaccaacgatatcgcgcgaacgatcaacgacgatcccaccgtacgcgggctgctcaaggtggtgttcctgcccaactacaacgtcagcctggccgaacgcatcattccggccgccgacctgtccgagcagatctccaccgcgggactcgaggcctccggtaccagcaacatgaagttcgcgctcaacggcgcgctgaccatcggcaccctggacggtgccaacgtcgagatgtgcgagcagatcggtgccgagcacatgttcatcttcggcatgaccgcgcaggaggtcgaggcgcgcaaacaggccaacgaatacaacgccgaggccaccatcatcgattcaccgcggctcaacgaggtgctgatggcgattcgcaacggcgccttctcggcggacgatcctgcgcgctacacggggctgatcgatggcctgaaatggcacgacaccttcatggtctgcgccgacttcgaggcctactggcaggcgcagctcgaggtcgaggcgcgttggcgcgacgccgacagctggtggcgctcggccgtgctgaacaccgctcgcacgggctggttctcctcggaccggaccatccgcgagtacgccgaggagatatggaaggtgttgtaaagggcatcctgggcgctgcgacaggcagggcagagcggccgccgtatcggcgcggccgcttcgctgaactccgcggatatcggtcggtctgagggagggttagtttccccttggcctgctaaactgcgcgggtttccccattctccggagccattccatgtcacgcgtaaccctgagtcgctacctgatcgagcagacccgcagcaacaacacccctgcagatctgcgcttccttatcgaggtggtggcccgagcgtgcaaggaaatcagccacgccgtatccaagggcgcgctaggcggcgtgctcggcgcgacggaaaccgagaacatccagggcgaagtgcagaagaagctcgacgtgctgtccaacgaaatcctgctcgaggccaacgagtggggtggtcacctggcgggcatggcgtcggaggaaatggacaacgcctaccagatccccggcaagtacccgaagggcgcctatctgctggtcttcgatccgctggatggctccagcaacatcgacgtcaacgtgtcggtcggcaccatcttctcggtgctgcgctgcccgggtgagtgcttctcccagaacgacgcgctgggggaagaagccttcctgcagccgggcaccaagcaggtcgctgccggctatgcgatctacggtccgcagaccatgctgatcctgacgctgggcaacggcgtcatgggattcacgctggaccgcgagctgggcagcttcgtgctgacccacgagaacctgcgcgtgcccgagtcgacggccgaattcgccatcaacatgtccaatcagcgtcactgggaagcgccggtgcaacgctacgtcagcgaattgctggccggcaccgaagggccgctgaccaagaactacaacatgcgctggatcgcctcgatggtggctgacgtccatcgcatcctgacccggggcggcatcttcatgtacccccgcgactcccgcgagccgggcaaggccggcaaactgcggctgatgtacgaagccaacccgatgtccttcatcatcgagcaggccggcggtgccgctaccaacggcactcagcggatcctcgatatccagcctgactcgctgcaccagcgtgtgccggtcttccttggttccaaggaagaagtcgagcgcgtcaccggctatcaccagggctgatcgatgccggcgccctggctggagctgctgaactggtggttcggtgagggcgctactgcccgcgacatcgccagcgacaagcaaacactctggttcggctacaagcccgagcaggacgccgaggcgcgtcgtcgctttggtgaccttgtcgaccaggcactggctggcggtttgagtgaatggaccgaatcgccgcatggttggctggcgctggtgctgttgctcgatcaactgccgcgcatgatccaccggggcaccgcgaaagcgttcgcgggtgatgagcgcgcattgcagctggttcgtgaaggcatggctcatggcggcgacgtactgctgtcaccggttcaacgggtgttcatctatctggtgctcgagcatgcggagaatctgcaggtgcaggagcagtcggtggcccagttccagatgctgcacgggctcgtggcgagcgaagagcaggagctgttcgccggcttcctgagcttcgcggatcggcatcgcgacgttatcgcgcgtttcggtcgctttcctcatcgcaatgaaatgctcgggcggcattctaccgaggccgagcgggcgttcctggccgagccgggttcgcgcttctagcctattgacgcggaacctcccgcctcgttcgtttcctaacctttacccaggcggcgtgttcgcccgggtcagccacagccgactcaaggaatccacaatgtcgctgcgtcccttttcgttgatcgttgcagtggcgctgctagccgcctgtagcccggtcactcaagagaatttcgccaagctggaagccggcatgtctcgtgcggaagtcgagaagatcctcggcaagccgggtgagtgcgccggcgcgctgggcatgtccagttgcacctgggggcagaagaaccgcttcatcagcattcagttcgccggtgacaaggtgatgatgttctccggccaaggcctgaaatgagggatttccgatgcgtacactgatcgcgttgttcgctgccgtactggttgccggttgcgccggctcgaagcccgaggacgcgcccgagacagtcgggcaggtcgacctgcagcgttatcagggcacctggtacgagcaggcgcggctgccgatgtttttccagcgcaactgcgtgcgctccgaggcgcactacaagctgcagcaggacaacagtgtggcggtcaccaatcgctgcgaaaccgaagatggcgagtgggagcaggcgactggtgaagcggtgccgcaggagccaggtcgcacggatcggctctgggtgcgtttcgacaactggttcagcaatctcttcccgggcctgaccaagggccactactggatcctgtatctcgacgacgcctacagcgtggcgctggtgggcagtcctgaccgcgactacctctggctgctgtcgcgcgagaaggagatcgacaagggcacgcgcgaccggctgctggaggtggctcggcagcgcggctacgacaccggtgagttgatctggcgcggcaagtcttcctgacgccaagcgatcctggctgccgcggcgatcggcggccgtcttatttccaatccagacgggccagcttccactggccgtcttctctccaccattcgagttccacttcatagtggccgacacgctgcggtagcaggttttctgctccggtgagagcgacctgggcttcgctgtggcctcggtccgggtaggtcgagtcgatccagttgcggctggccaatctcagcaccttcacgttgcggtggcgcaggaacatcagcgtcgcggttcgctgcgcccagtcgcgaccgtattggccgttggcagcgaagtccgcatgaaggcagtccatcagcgcgccggtgtcgcgctcctcgatgctccgttgcagcgtttcggccgcggcatccagcgcggcctgcgggtcgtcagccttgcaaccggccaacgccagtgcggcaaggacgacccatagtgctaatttccatacgggcatgccgaacctctcgaacctcgttatgatgccggaaacgtcaggcgggtcgccgaacccgcgcaccgaccacggagtgtgccatgcagaccttgtatccggagatcaaaccctacgcccggcacgagctggcggtcgaatcaccgcatgtgctctatgtcgacgaaagcggatcaccggaaggtcttcctgtggtgttcgtgcatggtggccctggcggcggttgcgatgcgctgagccggcgcttcttcgatcccaatctgtaccgcatcatcaccttcgaccagcgtggttgcggtcgctctaccccgcatgccagcctggaaaacaacaccactgcgcacctaatcgaggatatggagcggattcgcgagtcgcttggcgtcgacaagtgggtgctgttcggcggctcctggggctccacgttatcgctggcctacgctcaagcgtttcccgagcgcgttcatgcgctgattctacgcggcatctttctttgccggcccaaggagttttcctggttctaccaggagggtgccagccggctgttcccggattactggcaggactttctcgcgccgattccggccgaggagcgtggcgacctgatgcaggcctactacaagcgcctcaccggcagtgatcagatcgcccagatgcacgcggccaaggcctggtcctgctgggaagggcggaccgccacgctgcggcccaatacccaggtggtcgatcgtttctccgacacccaccgagcgctggcgatggcgcgcatcgaatgtcactacttcgtcaacggcgcctttctcgaacccgatcagctgctgcgcgacatgcataagatcgcgcacctgcctggcatcatcgtgcacgggcgctacgacgtcatctgcccgctggacaatgcctgggagttgcacgaagcctggcccaacagtgaactgcagatcgttcgcgaggcggggcattcggcgtcggagtcgggtatctgcgatgcgctggtgcgggcggcggcggatatcgccaagcgcctgctcgacgtgccgcccgaggaggcctgatgagggcgctgatccagcgcgtgcagcaggcgcgggtcgaggtggcgggcgaggtggtcggcagcatcgaccagggtttgctggtgctggtcggcgtccagcgcgatgacgaccaggcccgcgccgacaagctgttgcataaaactgttgcgctatcgcgtgttcagcgacgagcagggcaagatgaatcggtcgctgaccgacgtcggcggtggcctcctgctggtctcccagttcaccctcgccgcagataccggcagtgggttgcgcccgagcttttccagcgcggcgccaccggcgctcggcgagcagctgtacgagtacctgctcgcgaaggcgcgccaacagcatccgcgggtcgcctgcggccgtttcggcgcggacatgcaggtgcacctgcagaacgacgggccggtgacctttctgctggagagttgaccccgggggcgatcagcgcttcgagggttccaggccgttttcgtgcagccaggtgatggcatagtcgcgcagctgcacggcctggtaatcgagccaggcctggcggaccgtcgggaaatcctccagcttgaaatcgaaggtgcgtagcggcttgcgtccttgcagggcgtggctcagtacggcatgggcgttggggtcgtgctgggtgaagagaaacgcctcgcgcatggcgatcgattgcgccagccccaagggttcgatatgcagaaagcggtcgtcctgcacgtcatacttttcgtccgcgccgggcacggtttcacctgggaacacggcgcgaatttcacccgactccagatcgagataatgctcactggcgtcgcggttttccaacgcgtactccaggcggtgaaggtcgatggtcagaggtcgcatggcggtgactgctgtttttggggttcagtagctctgaccggcctgccgcgaatgcgtgcattacgttcatcggtacgttgccgctacgcgacgtgcgtaccgctgtggctcagaacaggcgcgccagcagggcgctgaccgccgtttccacacgcaagatgcgctcgcccagttgcaccggctgcaggcccgcctcggtaagcttttcgacttcgtagggaatccagccgccttccggtccgatcgccagggtcaccgggtcggtgatcgcgcgcgggcagctcgggtagtcgcccggatggccgaccagtccacgggtgcccgcggccagttgcggcaggcggtcttcgacgaagggcttgaagcgcttttcgatgctgacctcgggtagcaccgtgtcacgcgcctgttccagaccgagcagcaactgttcgcgaatcgcctccggttccagaaatggcgtctgccagaaactcttctctacccggtagctgttgagcaggacaagccgcggtacacccatgcaggcgaccgtctgcagcacgcgacggagcatcttcggtctcggcagggccagtagcaaggtgatcggcaatttggccggtggcggttgggtcagcacgatttccagctcggcttcgccggcctccaggcgcagcaggcggccctggcccatcgcgccgcccagcaggccgacgcgcagggtttcacctgcttcggcgcggtgcacgtcctgaatatgggtgaggcggcggtcgcgcaggaccactcggtcggcggccacgaaatcggccgcctccagtagcagcagattcacgggcgcgaggcggggggctggtcgccgcggtgtgtctcgtcgtcggcgtcgccgcggaattgcgcctcgcgcttctggaccatgctgccacagatcagcccggcttcgaacagcaaccacatgggcaccgcaagcagcgcttgagagaacacgtcgggaggcgtgagcaccatgccgaccacgaagcagccgacgatcacgtaggggcggctcttgcgcagggtggcgacgtcgacgatgccgacccagatcagcaggaaagtcgccaccgggatttcgaaggccacgccgaaagcgaagaacagcgtcagcacgaaatccaggtactggccgatgtcggtcatcatcgccacgccttcgggcgtcacgctggcgaagaagccgaacatgatcgggaacacgacgaaataggcgaaggccatgccgccgtagaacaggacgatgctggaaatcagcagcggtaccgcgacgcgcttctcgtgcttgtacaacccgggggcgatgaagctccagatctggtgcaggatcaccggcatcgacaggaacagcgccaccatcatggtcagcttgaagggcgtcaggaatggcgaggccacgcccgtggcgatcatcgtcgcgccttctggcaggtaggcgcgcagcggtgccgccaccagggcatagatctgctgggaaaagtagaacagcgcgccgaacagcagaaggatggcgaccacgcaacgcagcagccgcttgcgcagctccgtcaaatgggcgaccagcggcatttcctgatcatcgatggaagtattgctcatggctcagcaggtctgtccgggcggggtacgggggacgtttcggttggtttggcggtttcggccggggccggcgcttcaagattgctggcgtcgggtggcggcgtggccgattgcggagagctgttgctgccggtgccgggcgaattgggcatgatgctctgcttcatctcccgttccaggtcgaggattcgctcgttatggagctgccgacggatctcgtcggcgccgatctcgcgctcgacctcggccttgatattggcaaagctgcgtttggcgcggccaatccacagcccggccgtgcgcaccgcgcccggcaaccgctccgggccgaggacgaccagcgccaccaggccgatcagtagcagttcggtgaagccgatatcgaacatggcgcctcactgcttcttcgtgggatcttcgaccttgcgggcctcggcatcgatggtgtggttctgcttctcttcgacgctgggcttttcctcatcggtgcccatggacttgcggaagcccttgatcgcatcgccgaggtccgagcccaggcccttgaggcgcttggtgccgaagagcatgaccacgatgagcagaatgatcaggagctgccagacgctgattccaccaaaacccatgctgcgttactccagttgaatgtcaggattgtggacgtgcggccttttccgcatgcccggagagaccgaaacgccggtccagttcgtccagtaccgcctgcggatgctgatccagtgcggccagcatgaccaggctgtgaaaccacaggtcggccgtttcgtagatgagctcgctggcgtcgccactgacggcggcgtccttggcggccaggatggtttccaccgactcctcgccgactttctcgaggatcttgttcaaccccttgtggtagaggctggctacgtaagaactgtccgccgcggcgccctttcgggcttccagcacttcggccaggcgggcaaaggtgtcactcatgcgtgtgctcccggtagatcgcctgcggatccttgaggaccggttcgacggttttccagccgccgttctcgaacaccctgtagaagcagctctcgcggccggtatggcaggcgataccaccgatctgttcgacgctcagcacgatgacgtcggcgtcgcaatccaggcgcagctcatgcagcttttgcacgtgtccggactcctcgcccttgcgccacagcttgccacgcgaacgtgaccagtagatggcgcggttttccgtcgcggtcaatgccagcgcctcgcggttcatccaggccatcatcaggatgcgcccggtctggtgatcctgggcgatggccggcaccaggccgtcctcgttccagtttatctcgtccagccagttcatcgaattctccggtcaatgcgcgcagtgtgccagcctctcagacggctggctatcggcgtaccacgatgtaaattccggcgctcagcatcagccaggccggccaggtggtcactgcggtgaagctgtcggccgccgcggccacggtcgcaccaccgcccagcagaacggcgccaacgaggcgcagcggccagtgccgatgatgttcgcgccaaggtggcggcgggttgttcgcgtgggggttggacatgcgctcgagcagctcgcgcgtcatgcccgccaggtggggcagctgctcgatctgcgcctgggcattcttcagcaactgtttcgggctcatgcgctcgcgcatccagcgctcgaggtacggttggccggtggcccagaggtccagctcggggtagagctcacggcccagcccctcgatattgagcaacgtcttctgcaacaggaccagctgtggctggacttccatgttgaagcggcgggcgacctggaacagacgcaccagcaactggccgaaggaaatgtccttcagcggtttttcgaagatcggctcgcagacggtgcgaatcgccgcctcgaactcgttcaccttggtctctgctgggacccagccggaatcgatatgaagctgggcgaccttgcggtagtcgcgcctgaagaaggccatcaggttgcgtgccaggtagtcctggtcttcgggcgtcaggctgccgacgatgccgaaatccaccgcgatgtactgggggttccacggctggtgagtgctgacgaagatgttgccgggatgcatgtcggcgtggaagaaactgtcgcggaacacttgcgtgaagaagatctcgacgccgcgttcggccagttgcttcatgtcggtgcgctgctcggccaggcgcttcatgtcggttaccggcacgccgtagatgcgctccatgaccagcacctgcgggcggcacaggtcccagtagacctggggaatgtacagcagcggcgagccctggaaattgcgcctgagctgactggcgttggcggcctctcgcagcaggtcgagctcgtcgtagatggtcttggcgtaatcgtcgacgacctcgaccaagtgcaggcgacgggcttcggtggaggcgcgctcggcggttttggccagcaggaacaaccaggcgagatcctggctgatcaccggacgcaaattcgggcgaaccaccttgaccaccacttcctcaccgctgcgcagcttcgccgcgtgcacctgggcgaccgaggcggaagccagcggcttgctgtcgaagcgggcgaagatctgggcaaccggcgcgcccagctggcgctcgatcaatgcagtggcgacggctgaatcgaagggaggtacgcggtcctgcagcatcgccaactcttctgcgatatctggcggcagcagatcacggcgggtcgagaggatctgcccgaacttgatgaagatcggccccagtccttccagcgccagacgcaaccgcgcgccgcgagacagcgcggagtggcgccgcggcagccagcgccagggcagcaggaagctggtcgcgcgcagccaccagggcatcggcaggtcgaggatgatgtcatccaggcggtagcggatcaccaccagcaggatgcgaaacaggcggcgggccgcggcgaacagcttcattcggatcggtctggtttcagggaatgggcgagccgctcgactcgggcttcgagtcggtcgaggtcgagcttgaggcgatccagttcggcgaagcgggtttcggcttcggcgctgcccaccagggttcgcgattcttcgttgaggtaatcggccaggtcctggcgcaggctgccagcgctatggcgcacccattcggcctggctgcgcatgccggagccgagcacatgcgtggcgaccgggccgagtaggcgggacagttcatattcccagtccagctccaggtcctgcagcacttcggccaggctcatcaacgcgctgctgtcgccgtcgatctcgacgtccgggccgtgcagaatcgctgtcttgttccgactggtggccaggcgaatgaggctgctggcgggcgcgcgcagacggcagtcggcttcgctgccccagtcggcggccaggcgcagaccttcaccatcggcgagcacgaatacgcgccacgccggagcgctgcagtcgatctcaatgatccgaccgccaaggcgggccaggcgcggcagcgcggtggggtccaggcgcagcgcgcggttaatgccgcgctcggcgccggccagcagggcagtgcgcagcatcagggcttgatgccgcggtgcagggcgacgatgccgccggtcatgttgtggtaggtcacgcgctcgaagccggcgtcggccatcatgcccttgagcgtttcctgatccgggtgcatgcgaatcgactcggcgagatagcggtagctttccgagtcgttggtgatcagcttgcccatcatcggcagcaggctgaacgagtaggcatcgtaggccttggagaacagcgggttggtcggtttggagaactccagcaccagcagccggccgcccggcttgagcacgcgcagcatggaggcgatggcgtcttccttgtgcgtcacgttgcgcaggccgaaggcaatggtgaccacgtcgaagtagttgtccgggaagggcagcttctcggcatcggcctggacgaacctgacgtttccggccacgcccttgtcaagcagacggtcacgtccgaccttgagcatcgaggcgttgatgtcggccagcacaacttccccggtcggcccgacgatgcgcgaaaactggcgggtcaggtcgccggtgccgccggcgatatcgaggatgcggttgccgtgacgcgccccggacagctcgatggtgaagcgcttccagaggcgatgaacgccgccggacatcaagtcgttcatcaggtcgtacttggcggcgacggaatggaatacctcggccaccttctgcgccttctcgctttcacgcacatttttgtaaccgaagtgcgtggtgggctctgcgtcatgctctttgcggggatcggtcatgtcactgtcaccggaagaatgtgcccggcattctaaacctaaatgcgtcgtcgagcgcgaagcggcgagcggcaagtcagcgcagcaggacgggtgcgcagcgctggccgacagccggctggtgtccgcgcttgaggccacgcgcgtggccccgctgttgtgggagcggtcttgaccgcgagcttccagcgaagcctcgctgccaggatatgccaccaacatctagcggccatcccgcccggcgatggtccacccacgtgtcaccgctttcgtaggagcggtcttgaccgcgagcttccagcgaagccttgccagcaggatgtggccaccaacatccagcggccatcccgcccggcgatgtaccatccacgcgccactgctttcgtgggagcggtcttgaccgcgagcttcccagcgaagcctcgccagcaggaggggcaccaacatccagcggccgtcccgcccggcgatggcccacccctcggcccgcagctcaacgcaacaacgtcgagaaaccgtacccgttcggctcggcacgcctgccgccaactccgcttcgtcagcgcaggcaactgctatagtgcgcgccttttttatcccgcagccaggagttgccatggcccgcatcgtagtcgagcgcacccacacccttggtcgccaggccgcccgagaaaaggccgagcaattggcggcgaaactggtgaatgactatggcgtgcgctgcgagtggcagggtgatgtgctggcggtgcgtcgtagcggcgccgatggccgcatcgaggtcggggaggatcgggtacgggtgctgctgaatcttggcctgctgctgtcggcaatgggcagcagcgttcaggcgcagatcgaacatgcgctggacaaggcgctgcaggcgtgaggaccggcctgtgccacgagctcagagcatcagcttgaccggtgagatatccgggtcacgggatttgccggcggcggcgagggcatcgaggtaatcggcccacatctgttgctggttggtcgccagccgatggaggtagtcccaggtatacaggccactgtcgtggccgtcgctgaaggtcagcttcaacgcgtattggccggccggctcgagcccttccaatgcgacgttgatcttgccggcctgcaggatcggattgccgtgaccctgcacttcggcggatggtgagtggacccgcaagaattcggccggcagcacataacgctggtcgggaccatattccagctccagcgtcctggaagccttgtgcagcttgatggcggtggggatgtgcatcgttgggctccaggcttaaggctacaagcgccaggccaaaagcagccggaccatgccgatatgcctgtagcttggagcctgcagcccgtagcggcttttataggatataccgcgacaggtcttcgtcttcggccagctcgccgaggtggctgttgacgtagtccgtatcgatgcggatcggttcaccgttctgctggccggccaggtcgccggcgctgaacgaaacctcttcgagcagccgctccagcaaggtgtgcaggcgacgagcgccgatgttctcggtcttctcgttgacctgccaggcgatctgcgccaggcgcttgatgccgtcctcggtaaattcgatgcccagcccttcggtcttcagcagctcgcgatattgctcggtgagcgaggcatgcggctcggtgagaatgcgctcgaagtcctcgggagacaacgccttgagctcgacccggatcggcaggcggccctgcagttcgggcaccagatcgctgggcttggagaggtggaaggcgcccgaggcgatgaacaggatatggtcggtcttgaccatgccgagcttggtgttgacggtgctgccctcgatcagcggcagcaggtcgcgctgcacgccctcgcgggagacgtcggcgccgccggtattgccgcgcttggcgaccttgtcgatctcgtcgatgaagacgatgccgttctgctccaccgcttcgagcgcacgggccttgagttcttcctcattgaccaggcgcgcagcctcttcgtcacggaccagtttgagcgcatccttgatcttcagcttgcggctcttcttcttgcccttgcccatattggagaagaggctttgcagctggttggtcatctcttccatgccgggcggggccatgatctccacgccgcccggattctcggcgacctcgatgtcgatttccttgtcatcgagctgaccttcacgcaagcgcttgcggaatagctgccgggtattggagtcggtgctttgcacgggctcgtcgccgaagcctgcgggacgcgcctggggcagcaaggcgtcgaggatgcgctcttcggcggcgtcctcggcgcgatggcgcatcttcaccacttcctgttcgcgcagcatcttcagggcggcatcggcgagatcgcggatgatcgactcgacatcgcggcctacataaccgacttcggtaaatttggtcgcttccaccttgatgaacggggcgttggccagcttggccaggcgacgggcgatttcggtcttgccgacgccggtgggcccgatcatcaggatgttcttcggggtgacttccgggcgcagctcggcggagagctgcatgcgccgccagcggttgcgcagggcgatggctacggcacgcttggcgtcgtcctggccgatgatatggcggttgagttcgtggacgatctcgcggggcgtcatggacatggtgcggtactccggggctcgagggcgatcagttcgcgctgtcgagctcctcgatggtgagattctggttggtgaagacacaaatgctgccggcgatgttcagcgcggtctcggcgatttcctgcgcgctcatgtcatcaccgcctttgcgcatcaacgccatggccgcggcctgggcgaaaccgccaccggagcccatggcgatcaggtcatcctcgggctgcaccacgtcgccgttaccggtgatgatcagcgaggcgtccttgttggcgacggcgagcatggcttccaggcggctcagtgagcggtcggtgcgccaatccttggccagctcgacggcggcacggacaagatggccctgatgcttttccagctggccttcgaagcgctcgaacaaggtaaaggcatcggcggtggcgccagcgaagccggccagcacctggccgtgatagagacggcgcaccttcttggcgttgcctttcatgacggtgttgccgagggaaacctggccgtcgccgcccatgacgactttgccgttgcggcggactgaaacgatggtagtcaaaagagaactctccacgcagcggggcgatgaatgcccgaatgcgcttgatatgggggactctcctgcgcatttcaaccaagtgggcgcgaaaggtcggagctggacacggcaccttgcctggttgcgccttccataggagccatggcgctgcgtcgatggctccgaacgggcgccgcgatggatcactgcaaggcgaaatccagctgccgccaggcctcgtagacggcgacggcgacggtattggacaggttcaggctacggctgtcgggacgcatgggcaggcgcagacgctgttcgttgggcagtgcatcgcgaatctcgggtggcaggccgcggctttccgggccgaacaggaaggcgtcgccgcgctcgaaccgcacctgatgaaagggttgcgagcccttggtggtgaaggcgaacaggcgcggctggccgaggctcgccaggcagctgtccagatcggcatgtcgcttgagcggagcgtactcatgataatcgaggccggcacggcgcaggcgcttgtcgtccagctcgaagcccagtggttctatcaggtgcagactgcagccggcattggcgcagagcctgataatgttgccggtattcggcggaatctccggttgaaaaaggatcacgtggaacatgcgcggcaccgactctgaaaacgaccggcattctactgcggcaggcggtcctgcggcaggcgaccctgcggctgatgatccgctacctcgcctgcgccgtcgctttttcgctgcgctggttctgctcgggttgctgttcggctcgttgctcggccatctgttccgccccgggccggtggagctgctgcgcgtcgagcccgtggccagcgggttgcagctgtggttcagccgcgagccggagctctatagcgagaatgtcgacggtgccgtggggatgttgtttcaggctaaaggtggggctgatagcggacgagtgaaggtcgatggcagcgatgcccgttggcgcgtgcaaggcacggagaagggcctgctgctgcatgtcgttgcgacacgcccgctgcaagccagctggacgggcgagaaggtcgacggccagtggcgtctgcagttaagggtcatgccgcgctagggcgcagccagtaggccacgcccttgcagcctgtcagccgtcgtctccttcgtcctcgtcggcggcgtcaccgcccatgcccagttccttgatcttgcgcgtcagggtattgcggccccagccgagcagcagcgcggcatcgcgacggcgaccggcggtgtgcttgagtgcggtctcgatcatgatccgctcgaacgccggcacggcctcgtcgagcaggttggactggccgcgagacagcgccaggtcggcccactgatgcaaggcctgctcccagctctttgccggcagggtgtcggtaggctggttgagcagttccggtggcaggtcgctgacgtggacctcacgcccggaggccatcacggtgatccagcggcaggtattttccagctggcggacgttgcccggccagggaaggttgcgcaggtactcctcggtttcggctttgagcagcttggtctcgaccgccagctcctgggcggcgctggcgaggaagtgtttggccagcgcggggatgtcttcgcgccggtcggacaggcgaggaatatggatgcggatgacgttcaggcgatgaaacaggtcttcgcggaacttgccggcctgcaccagcgtttccaggtcctggtgggtggcggcgatgatccgcacgtcgaccttgaccggcgtatggccgccgacccggtagaactctccatcggccagcacacgcagcaggcgagtctgggtgtcggccggcatgtcgccgatctcatcgagaaacaaggtgccgccgtcggcctgctcgaagcgcccgcgacgctggttggctgcgccagtgaaggcgcctttctcgtggccgaacagttcggattccatcaggtccttgggaatcgccgccatgttcagcgcgatgaacggggaggccgctcgtggactgtgacgatgcagcgcatgggcgaccagctccttgccggtaccggattcgccgttgatcagcacggtgatgttggagtggctgaggcggccgatggcgcgaaacacctcctgcatcgccggcgcttcgccgatgatctccggcgtgtggtgctggcgtgccggctcctgcaggttctgctgttcctgcgcgtgctggttggctcgcttgaccagcgctacggcatcgtcgacgtcgaacggcttgggcaggtactcgaaggcgccgccctggtaggaggcgaccgcactgtcgaggtctgagtgcgcggtcatgatgatgaccggcaggcgcggatacagctcacggatctgcttgagcaggtccaagccgctggtgcccggcatgcggatgtcggaaatgatcacgtccggctgctgccgcgacaggcgggcgagcacgccgtcggcgctgtcgaaactttgcgtggccatgccgtcctgctgcagagccttttccaatacccagcggatggagcggtcgtcgtcgacgatccagacgttttcgcttcggctcatacggatggggctccttgttccagtggcagaaagatcgagaacgcggtgtggccggggtggctttcgcattcgatcaggccctggtgctggctgatgatgttctgggtgatggccaggcccagcccggttccgtccggacgaccgctgaccatcgggtagaagagcgtgttctgcagttcggccggaatgccggggccgttgtcgatgatctcgatgcgtgccaccaggcgatggcgtacatggccgatggtgaactggcgcagcgtgcgggtacgcagcgtcagccggccgaggcccagttcgcactgcccggccagcgcctgcatggcgttgcgcatgatgttgagcaccgcctgaatcatttgttcacggtcgagcagcacttccggaatgctcggatcatagtcgcgcaccaaaatgaggctgccctggctttcggcctcgatcaggctggccacatgttcgagcacttcgtggatattggtcatcgacagggacggcagtttgttcgaaccgagcatccggtcgaccaggttccgcaggcgatcggcctcctcgatgatcacctcggtgtagtccttgaggtgttcctccggcagctcgcgcgacagtaattgcgccgcaccgcgaatgccgccgagcgggttcttgatctcgtgggcgaggccgcgcaccagcagtttggtggtttcgtgcgctgacagttgcgcctcttccttggtgatgcgcagcaagcggtcgcgcggcagcacttcgagcagcagcttggtttcctggcgggtcaggatcggtgtgacggcgtagtcgacggtcagcgcctgaccgttggtcgaggtcagcgtcgcctcgcgcttggtgaaggggtgcgcctgctcgacggcctggcgcagcgcggcaagtgcctcggacgattcggtgaacagttcgctgatgaactggccatggctgcgctgaccgcttacggccagcagcatttcggcggccggattcatgtattccaggcgcagccgcgaatcgagcaacagcgtcgcggtggtcaggttctcgatcagcaggcgctgtagggcttcgttgatcatggctgtctgcatccgatgggtaaggcgggaaatgcaagaagcaaaccaaggtgcctgatttcggcgcaaagccgcaggtactagcgctccagcgcggggcatcgcgcaaaacagatcgggctgatcgggcgggcgttgcttgtgcaccattcaggtgcatagcatgatcacagaaagggcacgaagggaatatccctcttttccttcggcttgtccttcaacggacactcggggcgaacgccgtaatcgtcctttttgcaaggccgggccatgcgtcgttgagccagcgaggtgcgcatcatatggaaggtgcgcggtgggctgctctgcaaggaggctccgctttcgtcgatcacctgcacggtgagctggtgggtgccgcgatcgatgttctgcaatgcgaactgtgggccgccgccgccgagctcggtgtcgctgccgtccagcagcaggcgataggcatggcccggcaacagttcgggtgtgctggcgacctccaccagcaagccgcctgcgttgtcgcgaatggtggcgtctggctgaggcgtcaggacttcgagttggctgtagcggatcgtcgcgctatcggttgtcggagcggctactggttccggtgcctgtatgggccgtgtttcggcgggaggcatgctgttggtcggctgcggtttcaccaactcgaccgcccgcccgccggggcgatcagtgaacacgcgattgccctgttcgtcggtatagctgtagatctcggcggcggccggcagggcgcatgccagcagcgcggccgcgagcgctcggcgggcagcgttcaagaggcgggcttcggcttgggcggcacggctggcttgggtcgcaatgccgggctcgaggtgttgacccgctgcacggtgaactgctccagcgcgcgctggataacctggccgccgctcagcacttcaacctcgatcacgtgcgttccacggtcgacattggtcagttgtagcgatgtcgagttgctcggctctccctggggttcgccgtcgagcagaaaacgaattcgatgattgcggcgtagcggcggatcgagctgggctttgaccacgaaggtgccgttgttcgcacgcagcgcctgctcgtcaggaatgccgtcgatggacaggctgcggtaagcctgctgtcggtcgccggcctgttcttcggtcaggggaggcggcgcgtccgggaccttgatgtccacggtattggcgggcggtagatcgacggtttctgccgccaccccttcgggcggctggttggtgaacaccgtgttgcccttctcgtcggtgtatttgtagatctgcgcctgggccggaatggtgagtacgagtagcaggctgaacaatgcgatgcgcatgggaagctccgcggagtgagtacgggaagccttgcactgtggcggcgggcaggcaagtgccagcgttgcgatttgcgatcggcgccactgcggtcgcttccggcggcgtcgttggcagggtggcagcggcgcgcaaacgaaaaagcctcccgaaggaggccttttctgtcacgcggactggcttagacgctgtagtacaggtcgtattccagcgggtgaacgaaggtgcggaccttgatttcttcctcgctcttcagctcgaggtaggcatcgatgaagtcgtcgctaaacacgccgcccttggtcaggaacgcgcggcccttgtcgagttcttccagggcttccttcaggctgccgcaaacctgcggaatcagcttgccttcttccggcggcagatcgtagaggttcttgtcagcggcatcgccggggtgaatcttgttctggatgccgtccaggccagccatcagcagtgcggcgaagcacaggtaagggttggcagccggatccgggaagcgcgcttcgatacggcgggctttcgggctggaaacgtaagggatacggatcgaggcggagcggttgcgtgccgagtaggccagcatgaccggcgcttcgaagcccggaaccagacgcttgtaggagttggtcgacgggttggtgaagccgttcagggccttgccgtgcttgatgatgccgccgatgaagtacagggcggtctcggacaggccggcatagccttcgccagcgaaggtgttcttgccgtccttggagatcgacatgtgcacgtgcatacccgagccgttgtcgccatagagcggcttgggcatgaaggtcgcggtcttgccgtaggcgtcggccacattgtgcacgcagtacttcagggtctgaacttcgtcagccttgttgaccagcgtgttgaacttgacgccgatttcgttctgaccggcagtagccacttcgtggtggtgtacttcgacgaccagacccatttcctccatggcgttgcacatggcggtacggatttcgtggtcgtggtcgcacggcggaaccgggaagtaaccgcccttgacggcggggcgatggcccttgttgccgccttcgacgtcctggtcggtcatccaggagccctgttcggagtagatcttgaacatggagccggagatgtcggacttgaacttcacttcgtcgaagatgaaaaactcgggttccgggccgacgaatacggtgtcgccgatgccggtggacttgagaaattcttcggcgcgcttggcgatcgagcgcgggtcgcggtcgtagccctgcatagtgctcggctcgacgatgtcgcagaccagaatcagggtcggctcttcggtgaacggatccagtacggcggtttcgtcgaccggcatcaggatcatgtcggaggcttcgatgcccttccaaccatgaatggaggagccgtcgaacatcttgccgtgttcgaagaagtcttcatcctgagcgtcacgcgccgggacagtcacgtggtgctgcttgcctttggtatcagtgaagcgcagatcaatccacttcacatcgtaatctttgatcagttgaagcgacttcgacatggtgttctccaagtggtggaagcgtgacagggttgcttccgaatcagggtgaagccgggcggcgatgttccgccatggcgacctgcctcacaagggagcaaattgcatgccagtgctccgtattgggtctggacgcctatctagggtgtttgttcgacggttgccgttgcgtggcagggccggcttgtgaaaatgcgcaccttattggtgcgctgaaaggtggatttgttcaatttaggtgcattgggctcggcttggagaaaactgtctaaagcttgatcaatttccgatatactccgcccccctctttttacgccttgccggcgcacgcgctgtttccatgaaactgatcgtcaaagtcttcccagaaatcaccatcaagagcccgccggtgcgcaagggcttcattcgccagttggcgaagaacatccgcaccgtgctgcgcgacctcgatcccgaactgcgggtggaaggggtgtgggacaacgtcgaggtggaaaccgcctgtagcgagccgaagcagctgcaggaaatgatcgagcgcctgcgctgcacgccgggcatcgcccattgcctggaagtgcacgagtatccactcggcgacctcgacgacctggtcgagaagtgcaaggcgcatttcgccgatcggctggccggcaagatattcgcggtgcgctgcaaacgcgccggcaaacacccgttcagttccatggacgtcgagcgccatgtcggcagcgagctgcgcgtgcagtgcggcgccgcaggtatctcgctgaaggcgccggaaatcgaagtgcggatggaaatccgcgaccagcggctgttcatcgtccatgcgcagcacgacggcatcggtggctatccgctgggcgcgctggagcagaccctggtgttgatgtccggcggtttcgattcaaccgtggcggcctaccagatgatgcgccgtgggctgatgacccacttctgcttcttcaacctcggtggccgcgcccatgagctgggcgtgatggaagtcgcccactatctatggaagaagtacggcagctcgcaccgcgtgctctttattagcgtgccgttcgaggaagtggtgggcgaaatcctcgagaaggtcgacaacagccagatgggcgtggtcctcaagcgcatgatgctgcgcgcatcgacgcagatcgccgaacggctgcatatcgatgcgctggtcaccggcgaggcgatctcgcaggtctccagccagacgttgccgaacctgtcggtgatcgactcggccaccgacatgctggtgctgcggccactgatcgccagccacaagcaggacatcatcgacaccgccttcgagataggcaccgccgagttcgccaagcacatgcccgaatactgcggcgtgatttcgaagaatccgacgaccaaggccaagcgctaccgcgtcgagcatgaagagaagcagttcgacatggcggtactcgagcgggcgctggccaacgcccggcaggtcgccatcgaccgcgtgatcgacgaactcggccaggacgtgcaggtagaagaagtggccgaggcgagtgccggccaggtggtgctggatattcgccacccggacctggccgaggacgaacctctgcagctgaagggcatcgaagtgcacacgctgcctttttatgcgctgaacagccgcttcaaggaactggatacgaatcgccagtacctgctgtactgcgataaaggtgtcatgagccgcctgcatgctcatcatttgctgagcgaggggcatgtcaatgtgcgcgtttatcgtccgagctaagcagcctggcctgctgggtggcagtatccgccaccgccctcccgaccgttgaagtcaccgggggttgccccggctccgtcttccggattcgcctagcgaaccaaccatttttttagcggcaggcctacagccagacgcttttacagagaaacagacctgtgatcgagaatctccgcaacatcgccatcatcgcccacgtcgaccatggcaagaccaccctcgtcgacaaactcctgcgcctgtccggcaccctggaccgcaaagaagcggaaaacgagcgcgtgatggacagcaacgaccaggaaaaggaacgcggcatcaccatcctggcgaagaacaccgcgctgaagtggaaggactacaacatcaacatcgtcgacacccccggccacgccgacttcggcggtgaggtcgagcgcgtcatgtcgatggtcgactccgtgctgctggtggtcgatgcccaggacggcccgatgccgcagacccgcttcgtgacccagaaggcgttcaaggccggcctgcgtccgatcgtcgtggtcaacaagatcgaccgcccgggcgcgcgtccggactgggtcatcgaccagatcttcgacctgttcgacaacctcggcgccaccgatgagcagctggacttcccgatcgtctacgcctcggccctgaacggcatcgccggcatggattacgagaacatggacgacaacatggacgccctgttccaggcgatcgtcgaccatgtgccggcgccggtcgtagacgtcgatggtccgttccagatgcagatctcgcagctggactacaacagcttcctcggcgtgatcggtattggccgtatcgcccgcggcaccgtcaagtccaacaccccggtgaccgccatcggcgccgacggcaagaagcgcaatggccggatcctcaagatcatgggccactccggtctgcagcgcgtagaagtacccgaggcccaggccggtgatatcgtctgcgtcagcggcatggacgagctgtacatctccgacaccctctgtgaccagaacgccgtcgaggccctgccgccgctgaccgtcgaccagccgaccgtgtccatgaccttccaggtcaacgactcgccgttcgccggcaaggaaggcaagttcgtcaccagccgcaacatcaaggaccgtctggacaaggagctgctgcacaacgtggcgctgcgcgtcgagcagggcgactccccggagaagttcaaggtctccggccgtggcgaactgcacctctcggtactgatcgagaacatgcgccgtgaaggcttcgagctggccgtcggccgcccggaagtggtgatcatcgagaacgaggccggcgaaaagcaggagccttacgagaacgtcaccatcgacatcgaagagcagcatcagggcccggtgatggagcagatgggcctgcgcaagggcgatctgaccaacatgatccccgacggcaagggccgtatccgcctggaatacaccatcccggcgcgcggcctgatcggcttccgtaacaacttcctgaccctgacctcgggttcgggcatcctgacctcgaccttcagccactacggcgcgatcaaggccggcgaagtgaccaaccgccagaacggcgtgctggtgtccatggccaccggtaccgcgctgacctactcgctggaaaccctgcaggcacgcggcaagctgttcctggcaccgggcgacgagatctacgaaggccagctgtgcggcatcaacagccgtgacaacgacttggtgctcaaccccaccaagggcaagaagctcgataacatgcgtgcttccggcaaggacgaagtcatcgccctggtcccgccgatcaagttcacactcgagcaggcgctggaattcatcgccgacgacgagctggtggaagtgacgccgaagtcgattcgcctgcgcaagaagctgctcaacgagaacgaccgcaagcgctacgagcgcgccaaggtctgatgaccgagcggtagtgaagaaaggcgccttagggcgcctttcttttttggaggttcgcggatgccgacgtttcgtgatggttccgttggttatcggctctttttgtgagaaatgagacctcgctcctgtttttggcatagtcagagaccaatggcaattgtcctgtagtggcacaacgcccatcatcgcgtcctctgctttaccgaaccaaggatggttgcgatgcgcccgctgttgttcgccacgttcttctccgctatttcatcgttcgccggttccgcttcggctcaagtccccccctccaatacaccactgcctggcgaccgtgaccttatacgtgatcgtcaggagcgcctgttggaagagcagcgtcgacgtctggaagagcttcaacaactgcctggtcgtgaaaccgtaacgcccgcgccagcaccggaagatgagcgctgcttcgacatccagaccatcaatctgaaaggggccacgctcattgcggataagccgcgagcggcgttgcttgaaccctatctgggcaagtgcctgggggccaatcagctcaatgcgctgttgaaggccatcacccagttctacatcgatcgcggctacgtcacgtcgcgggcctatctgccgcagcaggatatggccgatggcgagttggaagtgctggtcgtcgagggtcgactggaggggctcgatcagtcggcggtggccagcgaccgcgagttggcaatggcttttcccgggcgagctggagaggtggtcgatctgcgcgaactggagcagctggtcgatcagctgaaccgcctcccgtcacgccctgctcaactggagctgctgcccggcgaacaggttggggggagtcgcgtacagctgaagggcgaaccgctcaaaccgtggcgagtgagcctcaaccgacacaacaacggcgaatccagcaccggcgagcagcagtggggtgcaggtctcgattgggacagcccgctggggctggcggaccaactcaggttgtacggtggtggcgatgcggtgagcgacgaatatcgtcactctgccagtcagggcctgttctacagcctgccgtatggctggtggacgttcagctacaactacaaccagagctattaccggacccagggagagacgtcaggctttctcttcgagatggatggcgagagcaagagccatcaactcagcgccgagcgcgtgctgcaccgcgatgccgtcagcaagacggccatcagcttcggcatttcccatctgcaaacccgaaactacatcgaaaacagcctgctcgatgtctccagccagcgactgtccgagacgcagctaggcctcaaccatgggcgtcgcatcggtacggccttcgtcaacgccgacatcggctggcagcacgggaccggtagcttcgacgcccagcgccgtggcgacccgcatcacggtgagccggacgcccgttatcacaagtacagcctgacgctgagtgcgctgcagccgtttcagctgtggggcgagtccttcagtttcgattcgctgctaaacgcccagaaaagcgaagacgtgctctacagcccgcagcgcatcagcatcggcgggctggcctcggttcgcggcttcaaggaacagtcgctgtccggcgacaccggcggttattggcgcaaccagctgcgctggcgtcggccgatcggatgggaaccgctgcgccccttcctgcaggaatacggcctggcctacgcctatgacgtcggggtgatccatggcgggcgatacaacccggatctgcgcggtcggctatccggccatggcctggaactgagcgcccgcggcgcgcatgtggcgacctcggtcaccttcgcccgctcgctggagcggccggatgcaatcaccgagcgcgagcacccggtgtatttccgcgtggacctgtttttctgatcgcaagccttgacggctgatcggagtgggcgggcgcccgctcctgccaattaactgattcgagtcaaagctggagtgtcgaacatggacgtacgcagccccttcttccagaacgtcgccgccgtgctggtcggcgtgatgttccttaaccccatcgtcagcgttgcggcggacctgaccgttgcggcgggcagtgcggcgaccgtgggaaaggcgggcaacggcgtaccgatcgtcaacatcgccgcgcctaacggcagcgggctgtcgcacaacaaattcaaggactacaacgtcggccagcaagggctgattctcaacaacgccaccgagcgcacccagaacacacagctgggcggcatcatcctcggcaacagcaatctcaacggccgcgcggccggcatgattctcaacgaagtgaccggcagtaacgccagccgcctgcagggttacacggaagtggccggcaagtccgctcatgtgatcgtcgccaacccccacggcatcagctgcgacggctgcggcttcatcaacacccctcgcgtcacgctgagcaccggtacgccaatcgtcgagagcggccgtctcgaccgcttcgacgtcaacggcggcagcatcgccatcgaaggccagggcctcaacgccagcaacgtcgaccagttcgacctcatcacccgcagcgccaagatcaacgccgagctgcacgccaacaagctgaacatcatcgccggtcgcaatgtggtcaaggcagacaacctcagtgccaccgccaaagcaccggatggcagcgacaagccgttgctggccatcgatagctctgcgttgggcggcatgtacgccggcgcgattcgactggtgggtaccgaggccggcgtgggtgtcaagctggctggcgacatggccgcaagtgcgggggatattcagattgatgccaacgggcagttgagcatggcgcagaccgcggccagtcagaatctgaaactccaggcccaaggcgtagacctcaccgataaaacctatgccgctggcaatgtcgatatcagctccagcgccgaattggccaaccgccagagcctggccgcggctggcagcatcgtcttgcagggcgggcagctgatcaaccagggcgtgatcgaagcgggcgtcaatccggacaatagccgcaatgccctgggcgatgtgcgcctgagcggcgagagtgtgcaaaacagcggcacagtggtcgccaatcgcgaccttaaggtacaggtcagccagttgttgaacaaccaggctggcaccctcaacggtaaaggccatacgcagatcgacgccgggcagatggataaccgtgccggccgcgttctcgccggcagcaccctgaatctgaccgcggacgccatcgacaaccgcgaggctggtctgatccatagtcgtggcgctgccgatgtgcaagtggccggcgcgcttgataaccagcaaggccaactcgtcagtgaagccacgctaggtttgcaggcccagcagctgaataaccagagtggtcggctgatcgctggcgatgcgctgcaactgagcgcgcagactatcgacaacagcgtcgccggggttatctctgcgcaggccggcgtgcagatcaaggcacaaagcctgagcaatgcccagggcggcgaagtctccgcgggtgtcaacctggggctcgacgttaaacaattggataacgccaataacggcctgatcagcagcggcggggcgctggcgttgcaggccgatgccatcgataaccgcaaccaaggtactatcagcagcgagcaggccctgaccctcaacgccgccagcctggacagcagtgccggcggacgggtcgaaagccgtggcgatttccaggcgaccttgggcacgctcaaacaacaaggcggcgtgttgctcagcgaagggcaattgacggtcgatgccggcgatatcgataacagccagtcgggcctgatccatgggcgtcagggcctgcaactgcaagccgggcaagtcgacaatagcgacaaaggtcggatcagcagcctgggcgcattgaccgccaacctgagcgggctcgaccagcaagacggagggcagctcgtcagcagcgacgccttgaccctcgacctggccggcgggcgcttgaacaatagccgtcagggtttgctcgccacacccggcggcctgctgctgaaaaatgtagccgccatcgacaacagccagggcggtgaaatctccagtgaccgcgcctttactctgaacactgcggagctgaataacagcgccggcaagatcctcagcggcgaagcgctggagctgcgcatcaccaccgtgttgctgaataaccttggcggcctgctttcggccgccaagcagctgaatctgagcgcggccagcctgaacaacagcggcgccggccagatcagcagcgtcggcgacatgcagctctcccttgccggcgacctgaataacagccagcaaggtttgatcggcagccaggcggccttgcgcatcgacgccgcccatatcgacaaccacgaccagggcgagctttccagtgccggcgccttgcaggtcaaggccgccagcctgaataaccagggcggcgtggtggtcggcgacgccaccctcgacctcgaaaccagcgggctgctcgataacagccagcaaggcgtgctggcggcaggcgcggcattcaccctcaaggctggccaattgatcaaccgcgacaacggcctgatccaaggtgacgccggcttgcaggcgaccatccagggcgccttcgacaacagcgccggcagcctgcgcacggggagcgatttactgctggtcagcggttcgctggacaacagcagcggcagcctgagcagtggcggtagcttgaccctgaccagcggcgcgctgaacaacgccaagggcacaatcgccagcgccgggaccggccgggtaaccagcagcggcctgaacaacgatgccggcacgctgagcagccagggcgatttgcacctgatcagcggcgcggccagcagccgcgatggcggcgtgatagtcacggctgggcagttgcaggtgcaggccgagagtctggacgccggcaatagcgggcgtgtagtggccaatggtgcagccgatgtccggctcgacggtcagctcgacctgaacacgggcggtcaattgctcagcggcgcggcattgctgctgcgtgcgcacacgatcgacaacagcgatcacgggctgatctccggcaaaggcgcggcctcggtcgaggcggccactatcgacaatagcctgagcggcgaaatctccagcacgctcggcctgacgctggtcaccgatgagctggataaccgcgagcaaggacgggtaatcgccgaagccggcctcaagctggtggccgatcgcgtgcttaatagtgccctgggtgtgctcagcgccgcccatggccttgatctgcaaacccgcgtgctggacaacagcggcggccgcgtactcagcggtgcgctgctcagcctgagcgcggagcacatcgacaacaccctgcaaggccgcatcagcgccgacggcgatctgctgctggtaacccggcagctcgacaaccagcaacagggcgaagtactcagcggcggcgatctcaagctgcacgccgacactatcgactcccacgaccaagggctgatcgctggcgaaggggcgatggatatccacgtcaccgaggcgcttgatctatcgcaagggggccaactgatcggcgaaggcgcgctcgacctgcaagccgctaccctgagtacccgccagcagggcctggtcgccgccaatggcgcactgcagattactgccaccagcgccgataactccgagggcggcgaaatttccagccagaacagcctgaccctggccgccgacagcctggacaacagcgacggcggacggatcatcggcgaaaccggcgtagacgccagcctcgaacaactggataacagcggcaacggcctgctggccagtaatgccggtttggttctgcaggccaaacagatcgacaacagcgctggcggcaccctcagcggtgtgcaactgctgaccctgaatgccgagaccctggataaccgccacgctggccgcgtgcttagcggcggcgccctgcaactgaccctcgacaagctgaacaacagcaatgccggcctgctcagcagccgcggcgacctgctactgcaaggtactgagctgaacaaccgcggcggcagcgtcctggtcgatggccagggcaaagtcgtagccgacagcctggactccaacggcggcggccagctttccagcctgggcgaccttgaagtcgaggtcaaaaccctggaccagcatgatggcggcgaactgctcagcaacggccaactcgacctgcgagccgacaccctggacaacagcaacggcggcttggcctccggcctgcagggcttgagcatcagcgccgacaccctgaccaaccagggtggcgaattgtccacagatgccgacctgagcctccaggccacccgtctagacaacagtgccgagggcaaagtgatcgccggcaacgcgctgagcctgatggtggcgcaactgctcaatcagaccaagggcgtgctctccgggcagcacagtctgagcctgagcggcacttcattggataacagcagcgcggggctgctggtcagccagggcgctatcgaggtggagcttgctggcgccttgaacaatagcgaaggcggctcactgctcgcccaggggccactgaaacttcaagccgccagcctggacaacagccaggacggcctgctgtcgagcaaggctgggatgggcctcacactgaccggcgagctgaacaaccaggctggcgcggtgattgccgacggcgcgttgcagatcagcgcgcagcaactggataacagccagcaaggcgttctcagcagcaagggcgacctgctcctcgacgtgcagagcgtcgacaaccgcgacgctggcagcatcgcctccgacgccaagctcgacctcaaggccgagcgtctggataacaacctgggccaggtggcgagcaagggcgacctcaaggtcgaactggacgaactcgtccagcagggcggcgagctgctgagccagggcaagttgactctgagtgccggcaatatcgacaacagtcaggctggcttgatcgccgccacccaaggcatcgatatcgtcaccggcgacctgaacaacagcgccggcggggagatttccagcagtggtgcggtacacatcgacgccgtggagctggacaacagcgatgccggtttggtgatcggcgacggcggcctgtggctgaccgtgcagcgcctgttcaaccaaggcctgggcctgctgtccggtcgtgatggtttggtgctgaaagccggtagcctggacaacagccagggtggcaccctgaccagccagcagatgctcgatgtgcaactgagcggtgtgctggataaccacgaccagggcgcgctgctcagcgaaggcggtttgcagctgcacgcgggcgaactgaacaacgccagcggggtgctctccagcgccgatgaactgaagatagtcaccggcaccctgaacaaccagggtggcaagctggtgaccgatgaccaactgaaggtgaccagcacctccttggacaacagccagggcgggcgcatcagcgccaagcaggcgctgaccatcgccaccggccagctcgacaaccagcagcagggcctgatcagcggcggcgccacgcttaccctgacggcagggcaactcaacaaccacaaccaggggcttatcgccggcaaaggcgccgtgcaggtcaccgcgaccggcctggaccaacacgcgggcggcgaactgatcagcgaaacctcgctgaacctcgacctgcaagacggcacgctgaacaacagcgacaagggtctgatcgccacccccggcgcgttgctgctgaacaacctcggcgcggtcgacaacagcaccggcggcgagatctccagcagccagggcttcctactcaaggccagcgagctgaacaacagcgccggtcgcgtgatcagcggccaacaactgcaactgcagattacccaggcgctgctgaacaacctcaagggcgtgctttccgccgccaagctcacagtcgaagccgccagcctggataactccgcagccggcatactggccagcaagggcgatatccagctgaccctcgccggcaagctggacaaccacgaccaaggcaccctctccgccgccaaagcgctgaccctcaccagcggggcactggacaactccggcgacggtctgctggccagcggcgacgccttgcaattgactaccggggcggtgaacaaccagggcggcagtatcctcagtcagtccacgctgaacgccaggacggccgcactcgacaaccgcggtggggtgttgagcagcctgcaggcgctgacgctcagcgccgacggcatcgacaaccgcgataacggcctgatcaccagcgctgctgaactgaccctgaccgccaccagcctcgactccagccgcgatctcggggacagcggcggcgaagtctcggccaagcaggatctgcaactgacggtcagcaaactgattcaacaacagggccgcttgatcggcgaagccggcgtgcgcgtcgacttcaagggtggcgatctggacaaccgcggcggcttgctcagcgccacaggtccgttgaccctgctcaacctgggcaaattggataaccgtaatgctggcgaagtctccagcggccagagctacaacctcagcgccagcgcaatcgacaacggtgatcagggccgcttgatcagtgccggcaacctcagcctcgacgtgggcagcagcaccctgcgtaacgccgccggtggcttgatttccggttggcaaggtttgacggtgaacgccggtaatctggacaacagcgcgctgggcaccctgtccagccgcgatggcgcacttacggtcgaactgagcggcagcgagcgcgtactgaacaatagcggcgaaggcgcgctggtcagcaagggcacgcttaccgtcgatgccgctagcctgaacaacagcgacaagggcatcctctccagcgaaggcgaccttgaactgagcctcagtggcacgctgaacaactcggcctccggcttgatcgacagccaaggcgcactggttgcaagcgctaatgcggtaaacaaccacgccggccagatcggcagcctgaaagccgccaacctgaccgccgccagcctggacaacagcgccggccagctttccagtggcgcggggttgaccttgaccctgctcggcgacctgctcaacacccagcaggccacactggccagcgccggcccgctggtgctcaaggccggtgccatcgacaaccagggcggcagcctggtcagccagggcctgttcgacctcaccgccagcagcctgtacaacgccaacggcggcactctggctgcccgtaatggccttagcctgctgctcagcggcgcgctgaacaacagcgccgatggcctgatccacagtgaactgggtgcactcgatatcgatgcgcaaagcctgaataaccagagcggtacgctgagcagtcagcaggatctgagcctcactctggacgcccaactggacaaccagggtggccatatccagagccaggccggcaacctcgatttgcaaaaatccagcgcggtggacaacagcgccggtgtgctcagcagcctcaccggttggctgaaactggtcaccgctgggctgttcgataacgacgatggcattacccaggcgcaatccctgaccatcgacgccaagggtgtcgacaaccgtggcgggcatatctccgcgttgtccggcgacaccgcgatcaacattggtactgccgcctttaacaaccagggcggcggcctctatgcccaccaattgctcgaagtagttgcaggcgactttaacaaccagggcgcagcgcccgggcaaggcggcaaagtggctgccgggcagatcgacttcagcctctccggcgcgttgaacaacagctacggcattctggaaagcgccggtaccctgagcctggccgccgccagtatcgacaaccaaaacggtagcctgcgtgccctcggcaccagcggcgataccagcatcgacgcaaccagcctggataaccgcatcggcaccatcgaaaccgccaacgccaacctggacctgaacgtcgccggcctgcagagcagcggcggcagcatcctgcatgtcggcaccggcaattttggcctgagcgcagcccaggtcaccggggctggtggctatctcagcaccaacggcctgctcaccctgacggccgacaactggaccaacagcggtgtgctgcaagccggcaagctgatgctcaatatcggcaacttcacccagaccgccagtggccagttgctggccggcacctccctgactggcaagggcagaacctggatcaacgacggcgtgttggccagcgacggcaatctcagcctgaacctgactggcggctacagcggcaacggccagctcaccagcctcggcgacctgagcctgaaggccggtagcctcggcctcgccagcagcgcccgcattgccggcggcggcctgaccagcgtcagcgccactggcctgctaaaaaacctcggcaaactcacctccgcgggtgaccttaccgttaccgctaatacgctgaacaattacggcactctgggcagcgcggagaaactgcgcctggttgcgccgacgctgtttaacgagaatgggctaatttttagcggcgacgatatgacgttgggggtgaataacttcaccaataaatatgcggatgtgtatagcctgggaacgcttcttgtcgctaaggacgatgccaacaattggtcagcttcgttagaaaatatttcaggctccatcgagagtcgcggcaatatgcaattgtatgcggctgctcttaataatcggaaggaaaaattcgagctttcggaaagattggtttccggtgacataacttacgagtgcaaggagcatggtgggcagtgtgcgggcagtcactacgacattatgtattacgtcgatgaggtgatcgagcgggtggttaactccgactcggccgctgcaaatataatttctggtgaagatctgctgatgtggggcaactcgttcaccaatagtcatagcctagtttccgcagcaggcaacctttctatcgatgtcagcaattttagcaaccaaggtgcagcggcttcgacggttgtgcgtcatcggatgttccgtaatccggttgactcggaaagtgataatagattctgggaaatggtcgagccagatggagcacttaccgcatacgccaaatacaactctttgtatgtgatcaactactggaaatatgagcaagacaatgatgggtatgagtggaaaactactctttatcgtaaagaacaaaaaactaatcagctgaatgcctattacgatcctgaccggcaacaacctgtgcctagcagaattctgggttacagccttatgtcctctaccgaaactgtaacacccacaggcgcagcctctaatggtgtagtgcaggccggtggaagtgtgcagattaaggccggtacttcgtttaataacagcgttctgattgataacgccaacgtagcgcttagcgacagtaaggtcggtaatacagctgccagtggcaccggcaagagttttgtcgtgctgctaaatgcgcaattgccgcccgacctgcaacagcagcaagtcaaccccctgaccctgcccggctttactctgccgcaaggccagaacggcctgttccgcctgagcggccagcaggttcaaagcaccgcgatcaaccacgcgcaaagcgctatcgttgaccgcacccaggccggcagtaacgtcgtgcttgggcagcaggagcagagcctggcggcggtcgacagcaaaggccgtagtttctccattgctacccaaaacggccaagccgttgcgccggtatccgcaagcgcttggcagttgggtactagcgacgctgatctacacgctagcggcagcgtcgcgacggtcgacaccggcacagaccaggcgcactccgcattcggtgctcaaagtttgcctaccgcagcgacttcgccaggcgcttccgagcagattcagcgcgctggcaccccatcggaccccggcgcctttagcgtcgatccgcaggttctggctggcgggcaggttgttggggcagaggcgcctagcgcccagacctcgagcttcggtgcacccgtggtaccgcagctggtccaggggcaggtccttggcggtaactcgcccggcagccataaatacctgattgaaaccaaccccgagctgaccaatctcaagcaattcatgggctcggactaccttctcgccaacctcggctacgagccggacaaggcgcagctgcgcctgggcgacggtctctacgagcagcgcttgatccgcgaggcggtggtcgcccgtaccggccaacgcttcctcgccgggctgactagcgacgaggcgatgtaccgctacctgatgaacaacgccattgccagcaaggaccgcctcggcctgagcctgggcgtgactctgagtgcggcccaagtggcggccctgacccacgacatcgtctggctggaagagcatgaggtcatgggcgagaaggtattggtgccggtgctctacctggcccaggccgaaggccgcctggcacctaatggcgcgctgatccagggccgcgacgtcgcgcttatctccggtggcgatctggtcaaccagggcactctgcgggccagcgaggacttcagcgccgtggccggcagcaatcttggcaatagcgggctgatcgcagccggcaaccgcctgcaattgctggccgccgatagtatccgcaatgcccagggcggcatcatcgccgggcgcgatgtcagcctcagcgccttgaccggcgacatcatcaacgaacgcagcgtgacccggcatgaggtcaatttcggcaatcgccacctcatccaggacttcgccgacagcgctgcccgcatcgaggcgtcgaacagtttgggcatcgttgccgggcgggacgtggccaatcttggcggcgtgttcgacagccgcggcgacctcgacatccgcgccgggcgcgacgtcaccattgcctcggtggaagagcgtcgcctgcaggcgcgcggtaacaactaccggaatgaagcggtcagccagcatggcgcacaggtcagcgccgggcgcgacatcgagatcagtgcgggacgggatttgaccgcgattgccagcaacatcgagtcgcgccgcgacgtcagcctggttgcggggcaggacgtgaccttggccgctgccactgacgaaagccatttctattcgaaaagtaaaaaggtcacccgtagtaccgatcgcgtgatgcaacaagccagtatcgtccaggctggccgggatattgccatcgatgccggcgaagatctgacggtcgtcgccagccaagtgaaggccagcaatgacatcgcgctggatgccgggcaggacatcgatatcctctccgccaaagacgaaaacgcctccttctacttcaagaaaaagaaaggctccttcgggcgcagcagcagtaagcaacgggagagttacgacagtactaacgtcgcctcggttatcgaggcgggcaatgacctgaccgtcaacgccagcaagtccgccgacggcagcatgagcatcgatggtgggcgtgacgtaaccgtgatcggcagccagctcaaggcggggggagatctcatcgtcgcctcgacaggcgatgtggccgtgctatccggcgtcgaggaacatggctcctacagcaaaaagaccaagtccggattccttggtctgtccaagtcgggcaagagccaactcaagaccaaggcgagccaggtatccagcgagctggaggccggcaatgacgtcgtgattgccgccggtaacgatgttcgcctgcgggccagcgagaccagggccggtaatgacgtcgagctgcatgcaggtcttgtaaccgaaacgggcgatatcaatctcgtctcggccaacgacgaggcctacagtcggagcgaggcgtacaagaagaaggttggcttgtcgttctctgacgcggtcggcctcgccgtcggtacgcctggtttcggtggcgacatcaccttggcctctgcaaagaaggccggtaaggaagccatcagctcgaccaacgtgggcagccaggtagtcgcttaccgagatgccaccctggccgccgagcgggacatcaatatcgttggaagcggcgtaagcgctggtcgaaacgtgctgctcgatgccggtcgtgatgtgaacgtggtggctggtacagagcggtcgcaaaccacgtcatgggaaaacaccaagacgttcggcatgcaacaggacttcgaccgcaacggctacaccaccttcattggtcaagaagcgctcaaggacaagcagctcaacgctcagcaaaccgcggcggccagccagatcgaagcggggctgaacctggacgtcaaggccgggcgggatgtggtgcagcagggctcggacatgtctgctggctacgacctgaatgttcaggcaggtcgcaacatcctcgtcgacgcggccaccgagcagtcggcgtacgagcgtgaaaccagcaagacccgtaccggcaccaccaccaccgtcaaccacaacttcggcaacatggtcgacggcctcaacggtgctggcaaaggtgacaacaccgtcagccaggcatcaggcgtgctgaaagcgatcgatggcgtcagccagttcatgtccggcccgacatatgacgctcatgtcggcagcacgagccaaagccagaccgtcagccagagcggtaccggtaaccgtggctcgaccctggacgccggtaacgacgtcaccctgacggctggcgacagcgtcgtggtcaaaggcgggcaactgcagtcgggccgggatatcaaggtcgccgcacaagacatcgtcttggacgttgcgcgtggcgagcagcgttatgagcaagagcaaacccaggccaagggcggtttcgtgggtggcaccacgggtggcttcaaggttggtattggcggaagccaaggcaccgccacgcaggagggtagccaaggcaccgccagtggcacccagctgcaggccgggcgagatatcgttctaggtgcccgtaacgacctgagcctgattggcacccaggcgctggctgagcgtcacatcaagctcaacgccggtaacgaccttttgatcagcgcagccgaaaacgcgcaaagcgctgaagagcggcgtcgcagcggcggtggcgaagtgggcctgacctttggctcggaaggcattggcgtctacgccagcgtcaacgtcggtcgcggtgagctcgatcgcgacggtgggcaacagcaggaggcctacctgtacgccgggcgcaacgtcgacatgaagagcggccgcgatacggcgataacgggtgctcagatcgagggcgaaaacgtcaccggcgacgtgggacgcaacctgaccgtgagctcggtgcccgacacgggcaaggtgagcggcaaagagttcgacgccagcgcgaccgtcaccgtgggttacggcttcagcgtcagcggctcggttggctatggccagaccaacggcgaaacgaactgggtgggcaaccagacatcgatcaccgcccgtgaccggctcgatcttcgcaccgaagatcacacccagatcgacggcgcgctgatcgcctcgaacaccggcaacctcaaactagacaccgataccctcggtttccgcgacatccagggcgaggacaaggagcacagctactacctcaatgcaggcggtagttacggcaccggccaacaggatcagagccagcagggcaagggtgaggcgggtgtaaatggctggagcgttaacggctacgagtatgaaaaagagcgcgagcaaatcgtccgtgcgacggtgggcgcgggagagatcatcgtccggggcgatgcggagtccggcaaggattcgacagccgggctgaatcgcgatgtggagaaggcttacgaggtcacgaaggacgaggaggagcggaccgacctttatgtgagtaagtcgtcggtggaggcggtggcgcatccgctcgagacgctccaggcctggggcgaggcgctggtcaactacgatgggcaagcaaaagccaacctagaacagcttggcgtcctggccaatgccagcctgaacgaactggagaaactgaccggcaggacactggcagaaggcgcggtaaaagccggtggtgccgagattgctgagcaggcgctatatggtctgattatgtcgggcatgagcctgacgcaggccaaggcattgttggctgatcgggggttccaagaccaggtgctggtcgagcttcgaggaatcaacaatgctttctcgacgcagccagaactcattaagcaggcagagcaagggttggctgaagccaacctactgtcactggctgatgccgtggtcttaccagagcagacggttactccgggaagtttgcgtccagagcaggcgatactgggccgcgtctcggagataaacgcttatatagaggctcacccggatcagggtgaagctgttggctttgtgctggcagctgcccaagggccgaaaggcttgatgatgtgggccgcagataaagctctttcagagacatcgttcggcgagaaagtagcgcaatatcaagcccacctagagggggtactgggtaaagccattgcggaaggcgttgaacgcgaggaactggacgtcgaatacgacgatgacgcttacctgcttggcggtggcggtctcatcgctacgttgctggtaggctcggcggttggtggtgcgggtagcaaagtcatcaaggttaaggggagcaacccgccggctcctaaccatattccgcatagtgggcaagcggattcggaggctgggataccgtatgagcatccggttaaagtgggggagggtccaaaaggggaagtgaaactggctagtgttgaggtcgatatgaccaaagccagtaaaggtacactcgaatacaaaatcttgaatgacccaccgcccaatagcaaagtcaagctgagcaatggcactgagtttaagaccaattcaagcggttatgtcgatgaactcactttcactccatcactggaaaaagggactcgtgatgcacgacaaacagcagttggtaaggaagggctgtcaacggacgttggtgggcacatccaaggttgccaacttggtggaacctgtgatcgattcaatctttttccgcaggatggcaattttaataattctgcgtttaagagctgggagatgggaatcaaaggtgcactgaagggcggcgaccaggttggcccagttacggtgcgcttttcgagagctgatcctgcgtcagcacgaccggactcactagtgattgattactcaattaatggagagaaaatgcgtaagtcgttcaggaatggggcagggcaatgagcattgagcaacaagtagaagtcttaaatgcactcacgcagatcatgcacgactctgcgcatgggcagtatgaagaaatgcgctgtgaatttgactatgaagtttatggcggaggatggtccgtaggttctaaatattcgttcgttcgagatgggttaactgtcagcgagcttttggatgaccctgaagatagggcttctggtttcgtacataaattgcacgaactgatgaagtcacacacgggcggcgactggaaaaaatttgtgcttactattgggcctagcggtaaagcaaatacgaaattcatttattgattaggtccaaaaggaactggtcaagctctgcgcgaagtagaagttagctctggtggcaagggctcatggactaaggagtccaataaaccagagccgaacactatttataaggtggacggaaacaagacctatcaaacagatagtcttgggcgtgttgagaaagttgagtccaatctctcgctgactaagaatgatcgaaatacttatcagcagtgcattgctggtaaatgcggggttggtggcgatgaaggcggccatctgattgcaagcgtcttcaatgggccaggtgagaagttgaacctgcttcccatgaatgggaatttgaataaaggtgcctggaagtccatggagaaaacttggtcatctgcgctcaagcaagggcagacggtcagtgtgaaaattgagcctgtctattctggctcagctgtgcggcctgatagatttactgtcagatacactattgatggtggtcgccctgttattgttgatttcaaaaactcaccgggtggtatctgatgggcgatcaagagttatatcagaaaattggacagcttttagttgatgctggcccagcggatgctagggaaataatagttcgagcggagcttttctcagagggtgatggcgggaagtatgagttcgactttgttaatcagtctggtgagttgaattggtttgatccggatgggcgcgctgtaggggatctgacagagttgctggtccacttgcgagattatctttcagccaacaatttgaccgctggagaggaggcttggtctgggtgtgtaatcacattggacgttgatgaaatgaaatttggtattgagttcaactacagtaagtagtgttgtttcttctcaataaaaatagccccggcactgccggggctatttatttcactccgccgtaatcaccaaacagccctgcattaccctgatgcgtatccgttcgttgacctcgaacccggcctgttgcagccagtagccgcgtagcttgatgccggggatgatcctatcgccgacgtggagttgttccccgagcggcggatagtaatcggcggcgatggtggcgaaacgttcagttctatcggcgctaccgcgcccgtcttcgggtcgccaaacccgtccacgggattgaccgtggccagcgcaggattggccgcacgaggcgctcggcgcagcgccggggctacttgccagtttggccagctggggcatagggcatgtacaccctgcggctcagcgtgtcgcgaggatcgctgagcgcagggtgtcgagcagccgtccgctcgtatcagggatgctgctgggactccatatacaggcgtaatagtttgttgatacgggtctgatatccctggccttgccccttgaaccactccagcacatcggcgtcgagacgcagtgtgacgggctgtttagcgacttggcgcagttctgcgcgggcaaagaacgtttcgtcgagttccgggatgtcgctggtgtcgatctcctcgtcggtcagttttgccagccgtttccagtcggttttcgttttagccgatgcgttgctcatagtgtcgtacctcgcttcgggttgcttttcgggcactgatgatgcgaatcacattgccctttcgttccgtataaaccaccacgcccagcagcgctttgatccagccgagggcaatccagcgctcttcgccataaccttcacgctcatccggcaaggccagcaacgggtggttgaaaatgtccaccgcatcattgaagtcgatgccgtgcttctggatgttgattcggtttttggcctcatcccactcaaagcgcatgctgcgttccgtatttacatatgtgcgtacagtatgcgcaagtcccgtggggcgaaccacccccgcgccattccgcgcaagcgcgtcgcggtaatgtccgcagcgctgtgattcaatgcgtgccgttttccatttcccatcgatctgcacatggacgtccgcaaccgctttttccagaacattgcccacgccttgatcggcgtgctgttgctcgaccctatcgccgccacagcggcgcggctggctgtggatggtgcggcaggcggcaatgtcgccattcaggcgacccaaaacctggaaaacagcgttatccgccaggattacgtgcatagcgttggcggcaatctggtggctgacacgaatgccgccggcacgggcaaaagcacggtcgcgcacctcaacccgcaattatggatccggataagaagaaaggcctgttggtgatgaattcgcaggtgatcggtgtgttggcagcagctgcgcaaggcaacgatgatacggaaagtctgcaaactggagcttgggtcgctgggaacgccacgaaatataaccacttcgagcttccggcggggttgacgcagtatggccaggccgctacttcacttgctcagcacatgcaagagcagggagcttccccggaagcaaccgtcgatgcgttgcagtcaatggctcgcggtgaaggattagttttggagcagttgctggctctgctgtttctgaaggtataggcggaatggtggctggggagaccaaaacacaatgaagagtaaatttggttgggctatttggggggtaaggacattcatcgtttcggtgtgcgcttctttccttgctttcttcattgcaagaattttagtttggtttgtaaaaagacagggtccattggattttaatgaagtgatttttttttcagttaatgcctcttggcgtttaggggttatattaacgattgtggctattgttttagttttaatcggctcatttaatggttctcgggagtgagtgagagaaagaaaaaaggggacagatttgaatggcacttacttatgtgttaaccgattgatctaaaagaagaaaggctgctcttggtctacggtgatagttgcgaacacacaccgagtacaataataaagaataatagggggcagaccagaattggcacttacttaaccttccttggatgtccgtttttcctgatttccttgcgctccgcttggcgtgctcgggtcagcaatggatagggtttctgccttcgctttactgctctcggctccattcggcccgaccggccgcctacacgctgctgggcaatgagcatcaggagctgatggaagcgctcgtcgatctcagatccatcgcattgtcgccaagcaagccacagttgcagggtgtgcttgaagctcagctggcgtggcagacagtccgcgattgatgccgattgcaccataagcagccggatcaggttgtgcgccaatagataaacccacagctccttcactgccatggcggctgttttgcaattcagcatctccagtcccatggtgctcttgagattgcgcaggtccagctcgacgtgccacctgtctttgaacagagccttcaaagccgctttcgggatttcgcgtgcacagcccagcgtcgtaaccaggatcttgtttcccgctttcagctcccggacttccaactgatcaggcgcttgctcgtagctggcctgactcatccaggtgggccgcttgcagggcttttccagggtgattaggtggtcgcgcgggcccaaacgcttacctcgtcggaagtcggtactccgtcggcgagcaccatattgttcgaacacgccatcaatgcctctgcgctgcaattcgcagagtaaaaagtaggtcgcgtaaaaggcgtcccccagcaaaacttcaccagtattcaaggtgtcgagcatcgagcgcagcagcgtctgttcgtcgccacccttgcctcgaaaacgcccgagggctgcgtccagcacggctccgctggagagacagacgatgccgaccagccggcaaatgggaaagcctagtcctggcttttgcccgcgcgattgcgggtaggcgtcctggttcgcctgagtatcgggcataaccactgtcgtgccgtctaccaaccgaacggggcgtcccatccactgcccggaccgggcgttgctgctgatcaagttgccggcgttacgtaccagagtggaaaccatctccaccggcaagggctgacgggcacggcagtaaccgccggtgtgcgtactgcatggcttcaaacctgcccgtaactgcttgaccgccaactcattgaccgccctctggcaggaccggtcagcgctcagggcctgagccatgaacatggacagcgtctcggtcggcggaaacaggcgctccctatgctccggcaacagcgattcgatctggtcaaacagctccggaccggtcagcagattaaagaacgcataggcatcggcattggatgcgaggtgatgtgtgcggcgttgttgaaggatggcagcttggcgcctaggattcatctgggctgctccttgggctcggtgtgtgttcgcaactatcaccgtagaccaagagcagcctttcttcttctagatcaatcagttaacgcgtaagtaagtgccattcaaatctgtccctttttcgctttttcgtcccgtttttccttccacctcaaataggaacgcccgatcaaagaccgggcgttctcatcactcaaggctaacggcttacaacaaccacttgtagttcagtgccagccagtaatcggcgtctccgccttcgctggtgccgttgagcatcacagagccaacgccgccacaaagtgcggcttccgctccgattgctgcccgaacccagttttgccggtagtcctggcccggaagttcgaatgtagatagcccgattaactcgccacttgcgctgttgctctcatcgtcaaaccgatgcacgccttcgatccgtcccagcaagctgatggttgggttgaaggtatgcacggcgtccatgccgacgcggccagttgtggtccgctcggtgcggtcgttccagcgaaccgggaagccgccgcctgtttcggtgtagccatcgaacttggcttccacgtgacctacgctggtgtaaggcgtaaatgcagtggacgcgacggtaaacgcattaagccaatcgaggcgcagcttgccgccgacaatagtgacatccgtttcgccgtgcgactgaacgatgttgccagcgttgcggtatccgcggtcaatgtcggcatcgcctgatgagtaaaaggcgctaacggttgtataaagcggaagcgtgcccagcttaataatggcttcgggcatcaggtaggtgccgcgtagcttcgtttcgccacctagccctgtttcgctctcggcgtaactgcgtccgagcgcaacgttcagttgcacgccgttaccgatattggtcgccacgcctacttcgagagagccttgatcggcatcggtatcgtcctgctggccgtaatcaccgccggcccagacgctgtagcgaccctcgggaaccaagttgcgcatcgggctgccgtgggctccgttgaggatcatatcggtattggccagcgccgccgctggtgcggctgcagtggcatcaaggctagcgctgaattcctgcagatcgatcatcccgctcgttgaaccacctgagcctggctccgcagcgcgcgcgatgaaggtgtggtcgttcagaaggataccggcaaccacgctcccatcatcgctaatggcctctgcataggcgacctgagaggaagcggggtcgatactcacgccattggcgtccagccattgctcgatggtctgcatcccggtcgcctgcgtccaacgaaaccctcggttacgctggcccagatcgaactcacctaccaccacgcttccgtcagcgttgacggctaatgcaatggagtccccatcaccaagtgtccccaggccggttatccctgaacctgccgtccagtggtatgcgtgccgtgcagttccggtatcacttccacctactatcgtggtgccatcggagctgaggtccgaaaaatacgttctcgaaccgccgagagttccgatgtcgcgcatagcactttcggttgtccagacgaatgtccgcgtctgactgaggctgttatcggattctccagcgacggtttggcctgaggcactgaccgcctgagcgatggagtagcttccgcccaacgtgcctaggtcactcatgtgaccatctgtccagcgaaatgcgcgaacgccgccgctcaacacgctgccgccgacaaccacggcgccatctacattggtcgctagggcgtacgagcgcgtgctgccagcaagcgtgccaaggtctgtaatcccttggcttgtccagcgcaccgcatgttgatcgccgttggcaaggtcgctagcgcctacgattacctttccgtcggcgctcacggcgtgcgcaagtgtacttgcgccacctaagctgcttagcggttcgataccaacccctgcgctccagcgaaacgcgagtgaaccaccgcttcgatttcgcgccgtgccgactgcgacaccgccactagcactcagtccgctgagtatcgtttcatcgcctaatgtcccgatatcctgaaggccgttgttcgccgtccatatatcgctgtggtatagaccgtcggatccaagcctatagatgcttcccaacgtcgtaccgtcggcgctgaggaacgtctcgtcacctagcagcccgaggtcagtcaacccagcccaagcggggctggcagtgataatcgaaatcgcactggctaaacacagacgtttgaacccagcacccagcggcgctgaagcacttattgctgtacccattactcgctccctggccttaggcggcctgatcagttactgcttggctctgggaacggccgcagccgcaccgagcggcggcatcctgtagtaaccaattgtgttgctcaacggggagtagcgtatggcttacatataactgagacatggatcacgcagttggcggatgcccgactgaacggtaatgaacttgtgctgtcagttagcgttcgccgtagctggagtgctgaacgggctagcgttttcaacctgcagctgcgctctcagcggtctcgcttgcggcccattccccgtcccctttccgagcagctccgccgagatgtgaattcgtccaggctgcggaaacacgggcaacagaacttgttatccccctcaggcaaggagaatcagcgtccatgccagatccgcgttcggaacgagaacccgcagcaatacccccgcctcaggacaccgttggacgcctgcggaattccaaacctcgatccggacctggtttttcccacttggtgccaggttacgacgatctgaggcaacgccgaactagtcaccatcccttcgaaatatcgctcaaaacggaaggctcaacgccgtggtgctattccgattgcttataagcggccggcgcagcgcgtgagctactgggtgggacgcaagtctctgctctgttaccccaaacgacatcaccatcccggaaagcgaccccttcgatgctgatccggatagttcagctaaaaacaattgccatgcggtcgacagaatgagagacaggcctgcatggccaggcgccattacctttgtctcaactcggatggaagatgacgatgctcggtatcgcaacggccaggctggccaatatgggaacggccacgaagctcgcccttggcttcggcctggtcttgctgctcaccgccgtggtcgccatcgctgggctggccgccttgcgttcggtggatatgcgattcgacgcactcaagcgtgtgtcgtcgataaaaaccgaagtgctgtatatccgcagcatcgagcagcacttcaccgaaagcggcgacgctgagcatgtaaaggcgctcaacgacaaggtggccgcaaccttggccaacgttgccgagctcaaggcacaactgggggaggcccagcaacaggggctcaccagcgtcgagcaagccctcggtgaatatcaggatgcatttgcccgtttcgtgcaggtttcagatgccaagaccattgcgctggattccgcctactggtcggtggtcagcgcctccaatagcctcgatatccttcagagcgggctggtcgaggacgggctctacgacctcaaggaatcccagggggagcgaggcgccgagatggtcggccagggacagcagatcgctcagctgtacagcctgattctctccgcactcaatgaggcccgccagcgcacccagcagcgcgacgaagcgcctgccacgacgatccagcaggcccaggcggcgctcgatctcgctaacgcgttgatggaaacgctggaccgcggcatgtacggtgcggtgttgaccgaagtactgggcaacatcaagtcgttcaacgacaggctggccgattacacccaggcattgggagacggcgcccgcctttacaccgaaatgaacgctcgtgcggccggtgcactcgaggctgcggacaaggcctaccaggctcagcaagacgccatgcaggccgatctggtcgccagcagcagcttgattctgattgcttccgggttggctttgatcgtcggcgtcatcgcctcgctgttgatcacccgcctcatcgtccggccattgcgcgaagtgatacaggctgccaaccagatcgctcggggcgacctgagcgcgcagatcgtagttaatcgtcgtgatgagttcggccaactgatgctggcgatgcaggagatgtcgaagagcctgcgcggcatcgtcggccgcctgcaaggggcggtgacgcaaatcgctgattccgcggagcaggtcgcgggcgtcaccgccaaggcccgggacggtgtgttgcggcaacgggtcgagatcgatcaggtcgccaccgcgatgaacgagatgtccgccaccgttcacgaggtggcccgcaacgccgaggaggcggccggttccgctcgggttgccgaccgcacggttggcggtgggcatgcgatggtcaagcaaagcatggagcgggtaaatcagctggtcggttcggtccaggaagcggtccgaggcatcgatgcgctgagcgaagaaagccagaacatcggcaccgtgcttgacgtcatcaagagtgttgccgaacagaccaacctgctcgcattgaacgccgccatcgaggcggcgcgcgccggcgagcaagggcggggcttcgcggtggtggccgatgaggtccgctcgctagcgcggcgcacccagcaatcgacggctgaaatccaacagctggtcgatgcgctgcagaacggcgcgaaggcgtcggtcaggcagatgcagcagagcaatgatctggtccagctgaccgccaccgacgcgaaccagacggcgctcgccctgaacgagatcgccgccgcggtatccatcattcagcagatgaaccagcagatcgccacggccgccgaggaacagaccgcggtggccgaagaaattaaccgcagtgtcatcaatatccgggacgtcgctgacctgtcgttcaggacgatggacgaaacgacgaactccctcgatcagttcaggacgctcagccatgaactgcaggcattggcggggcatttccacgtggaggggtagcgcacgatcgggcttcggtaaatcgtggtctgtcccccaaacgcagcccccaaacgcagcccccaaacgcacggacgcacacgccttgctcagccaaatcgcccagtaatatagtcctcggtctgcttctgcttgggctgggtgaagatgatgtcggtcgagccgacctcgatcagttcgcccaggtacatgaaagcggtgatgtccgagcagcgcgcggcctgctgcatgttgtgcgtcactatgaccacggtgaactgttccttgaggtcggtgatcagctgctcgatcttcatggtcgagatcgggtcgagtgccgaggtcggctcgtcgagcagcagcacacgcgggcgcagggcgatggtgcgggcgatgcacagacgctgctgctgcccaccggacaggcccagcgcgctttgttgcagcttgtccttgacctcgtcccagagcgcggcgccgcgcagggcctgctcgacgcgctcctgggtttccccgcgtgacagccgctcgtggtggcgaatgccgtaggcgacgttgtcgaagatcgacatggggaagggcacgggtttctggaataccatcccgacgttgctgcgcaggcggctcagcgaatacttcgggtcgaggatgttctccccgtccagcaggatctcgccagttgccgtctgccctgggtactcggcgtagatgcggttgaagatacgcagcagtgtcgacttgccgcagcccgacgggccgatgattgcggtgatgcggttggccgggatgtcgaggctgatggatttgagcgcgacgtgctgtcggtactggaaaccgacgttgcgtgcgcaaatttcaggcatgtgggtctggagattggtcattacgcacccttccggcgggagaagacgaagcgggacagcaggctgagcagcagcacgaacagggtcagcagcagcgcgccggcccaggccagtgcctgccaactttcgaacgggctcatggcgaactggaagatggtcaccggcacactggccatgggcttgagcaggtcgccgttccagaactggttgccgaacgcggtgaacagcagcggcgcggtttcgccagtgatccgtgccatcgacagcagcaccccggtcaccacgccggctttggacgcgcgcagcaatatctgcagcgtgaccttccagcgcgggatgccgagcgccagcgccgcttcgcgcagcgaggcgggctgcagttgcagcatctcgtcggtggtccgggtaacgaccgggacgacgagcatggccagtgccaggccgccggccaacccggaaaagctcaccgaaccgccggtgagctggttcatcgggatgacgatggcggtgtagacgaacaggccgatgacgatggacggcgccgacagcaggatgtcattgacgaagcgcaccagcgtgcccaggcgcgatgtgcgcgcgaactcggccagccacaggccggcgagaatgccgatcggagcaccgatggcaagcgccagcagcgtcatcagcacgctgccgaacagggcattggcgaggccgccttcggcgccgggcggcggggtcatttcggtgaacagatcaaggctcagtgcgctgccgcccttgatcagcgtcgtcagcagaatccagaccagccagccgagtccgatcagcgccgctccgctgctcagcgccatggcgaacgcatttttcaaccgccgtgtgcggtagagattttcgttgaggttcatcagttgcccgcccggcgcgacatgcgggccagcatcaggcgggccagcatcagcacgataaaggtgaccacgaacagcaggaagcccagcgcaatgagcgatgagcgatgcaggtcggtgtaggcctcgttgaattcgttggcgatcaccgaggcaatcgaactgctcggcatcaacagcgacatcgacagctggtgcgcgttgccgagcacgaaggtcacggccatcgtctcgccgagcgcgcggccaagcccgagaaagatcccgccgacgaccgctgagcgcgtgtacggcaggacgatgtcccagcagacctcccaggtcgtcgagccgagggcgtatgccgattccttcagcgccggtgggacggtacgaaacacctcatacatcaccgaagtgatgaacggcaggatcatgatcgccaggatgatgccggcgctgagcatcccgatgcccagcgccgggccctggaagaacgcgccgatcagaggcagcgcgccgagatactcgctgatcaccggggagaggtactgcgccatgaaggggccgaacacgaacaggccccacatgccgtagatgatcgatggaatcccggccagcagctctaccgccgaggccaccggcgtgcgcagccaaggcggcgcgatctccgaaagaaacagcgcaatgccgaagctgaccggaaccgccagcacgagcgcaataaaggaggtcatcagggtgccgtagatcggcaccagtgcgccgaaccggccattgaccacatcccactcgctgctggtcagaaacgaccagccaaaggtggaaaaggccaggcggccgccccagagcgtggatgcggcggcaccgagcatgaccgccagtaccaacagggcggccgtcagcagaattaatcgaaaccagcgatcgtgccgcgtgtcgctttgggcgcgctgttcgcgttggtcgcgtgtcaacggcagatgggcgaccggcatgggattggcggtgggcatgagggagtcctaaagcaaagcaccccgcgccgttaccggagcggggtggttacgggcgcggccattcagttcttgaaatcggacgaccagtacgactcgatcttgtcgaccagcgagtccggcagcgcgacatagtcgagcgcggcggcatccttctggccgttttccagcgaccacttgaagaaatcgaaggcggccttgctgcgctcggggttcttcgggtccttgtacatgatcacccaggtggtggcggtgaccggccaggcctgctcacccgacgcattggtcatcagcaggttgaagtccttggcgttgccccagtcggcggtgtcggcggcagcctggaagctgtcggagtttggctggacgaatttgccggcggcattcttcagctgcgcgtgggccatcttgttctgcagggcgtaggcgtattcgacgtagccgatcgagttcttgatctgcttgacgtaggccgagacgccttcgttgcccttgccgccgacaccggccggccagttgacggtggtgccgaagtcgaccttctgcttccactccgggctcaccttggctaggtagttggtgaagttataggaggtgcccgagccgtccgaacgatggacgacggtgatcttctcagccggcagcttgaggtccgggttcagcttggcgatggcggggtcgttccaggtcttgatctcgtcgaggaagatcttggccagcgtctcgccgtcgagtttgagcttgccgggttcgataccttcgatattcactaccgggacgatgccaccgatgatggtcgggaactgaccgaggccggatttctgcaggtcatcggtggacagcggggcgtcggaggcgccgaagtccacggtcgctgccttgatctgggcaatgccgccgcccgaaccgatcgactggtagttgatgcggttgtcggagtgctcgctataggcttgcgaccatttcgataggatcggatagacgaagctggagccggcaccggtcacgtcggtggcatgcgcgaaggagctcaggcaaagtgccgacagcagagcggagaggcggaaggtgcgtcccatgtacgtaactcctggtttcgagcggggtggccagcactctagtgtcgctttgtgaaactaaggtgacggtcatgttgcagatggacgcggcgcgacatgcggtgggctgatgaataatggtgtcgcgaggttgggatgaactgcggtgcgctcaagcgttaccctgccgcgccaagtgttccgccaggcgtagcgctaattgcacgatggtgtaggtcgggttggcgaagccgccgctgggaaataccgaggagccggcgatatagaggttgcgttggccgaacaccttgcagttggagtcgacgatgccctggtccggcgtgcgggccatgcgggtgccgcccatgtgatggcagccgccgatctcgtcgtcggccggaaagggttcgcggctggtcagccagtggtccaggcgcaggcgcccaagattgaactcggcgaagtagcgaccaagataccgtgcgctttccagagccgtgcgcttgtcttcgccgtccagcgtccagtgcaggatcacccggggaatgccgaggcggtccttcacctgcgccagcgcgacgcggttttccgcccgcgggtactgttcccagctggcgcgtagcagtgctccgtagcttcgtccctggcgatagtcgtgcagcatcgtgctggcgagccgaggcgcgacccgggccagccggcgaatgccggcgagggtctcggtctcgccgctgcggatgattcgcaggccacaattgagcaatcgctcgtgtgtcatcagctccggtgtcggtgatatgaaactgacgtccttttcatcgaaatgcagcccggcacggtgctcgaacaaggtctcgccgagcgtgaagtgcgggtgctccatccagtaacggcccaacgccgctggctgcttgatcagcgcaccgtgcgccagctgattgctccacagcagcaggcggctgttctcgatgccgccggtggccaggatgtagcgctgcgcggtgacagtcctgcgtatcccatcgacatccacctgcaggccggtgactgtcgcgccgtcggtcagtattgccaccaggctggtattcagcgccaccgcgacgcgtgtcgaggtgaaaaggcgctccttgtatttctggccgaagttcactgtggaatagcgaaagcggctctgcttgagcggcaccccggccagtgctggctcgtctccggcgaggccaagcccgagcagctcgtccgcgcgagccgcatagggctcgaggtcgccgcggccgatcggccagccgctgccggtcaggcccggtttttcctcgaagtccaccgcatccagcgggcgacaccagccgccccagccattcgaggtgccgccgaaagcccgaatccggcagtcgtccagcgggcgataggcatgtcccactactgtgccttggtaaagcgcctgggaggcatcggaaggggattcatcaccgccttcgataagcaggatgcgtttgccggacgcttccagcgccagggccagggtaatgccggccgggccgctgccgacgatgcagtaatcaaatactgacgttcctgagagctgctcgacggtgaccttcatcagtcgtcttctgagcgtaggatccagccgtctctctcgacgaagcgggagaggcgcgcccgcgccacaggaagcctggcgagcagaaggttcaacatgccgatctggatcagacgtcgtcttttcattcttacatcgcccttacaccgccctgtgccggactcgttcgccggtgagctgccgaccggtgtggcgcgggcgcagcccctgatccgccatccataccgcgcggagcttcgaaacatgtggcaagcggtaacggctagagttccgcgtctggcctggccgcatgcaggccgcatcccgacacttgccatacaggtgggccagccattggagcgttagcaatatgtccacttttcgagcaactctcggctgtgtgatcactgtcacgtagcgccataagccatcgactagtggcgattgaatatcgctgccttatccgcgagcatgtgcgcccttatgcgacccgtgccgaaaacaagtcagtgcacgccgtcgtctgtagtcaccggaacggatgccttcctcatgtctcgtcttgttgcactcgcgattgcttttgtcttgctcagtggttgtgcctatggccgaaaggtcgattacgcacacagctatccggcccttgcagccgcacccgtccaagcggtcgaagtgcaagtgaccgacgcacgtccgtacgtgctgtcaggtaacaagaaaggcaccttcgtaggcctcgtgcgcggcagctattacatcccctacgacgtcaatacccgctcgggccagccactggcgaacgatctgcaagctgccttgatcggcgggttcgagcgcaagggcgttgcggtggaaatggctgaggcaaacgcacgggcggcatcgaaatcggacgctttgttgcttgccgtatccgttcacgaatggaaaagcgaagccgccttcggtgagatcctgacctactcgctacgggcggagctgatcgaccaagccggtcagcgcctggcgacggcacaggccagcggatcggaccgtatatacgattacactcaatcaggccaggcggccctcgcttcactgctggcgcagccgactctcatgcaggcgttcggcggtaaaggcgtgatcgatacagcacaagacgagccggcgcagatcgcgccggtgcgcaaggccgcgaccgaactgtatatcccgcgattcgggcgcgatggcgtctattgatcgtcgttggcgcctgcttcatcgagcatctgcttcgagccagcgccccgcgcccttgccggggcgggtgatttgaacagccgcatgttcagctctccccccgagccggtcgtgccgcgtcgccagttcgtgagccggatgccggggctgatcccggcaaggcctgggatcttgtctgggttactggcgaacccaggtctgggtgcggcccagcgcttcgatgccgatgtaaccgcgcatctccagcttttcgccaccttcgagtagcgtcaccttggcacggtaggtcttgcccttggccggatcgagaatggtgccgccggtccagacgcgttcgccgtcgggcttgagtccccagagaatggtcatgccggtgatcggctggtctttgcgctcgccttcgcaggcgctgcacacaggattggggccgtggtccgattgcaggatctgcgcaaccttgcccgtcaatgtgccgtcggcggcttcttgaatttcgacaatggacttgggtttgccggtttcgtcatcgatggtctgccagcgaccagcgggtgactcggcggcgaaggccatggacgtgaaggtcaagggcaatgccatcaatacggcggtaaacagtgcgcgcatggtttctcctgggattattcgagggcagcgactctaccactgctttcgacccgtagcgcctcgctgagtttgcgccgttagtgccaagatcgaggactatcggcgcgcgaagcgctgaataccggtggcacacggtgtgtcatgtcgctgtcaagtcagtgtcataggctcgctacttttcggctaggagcccgttatgcccacccttcgtccgttgttgttcgcattgttatggcccggtttggcgtgcgccgaggtacgggtcgtggggccgatcgaggctggtgtgttcgaaagcgcctatcaggaccagcagcctggcgagcgtgtcctgacccgcaacgaccagcgcatcctcgaggctgatcacataccgctgaaaatcggcaccaagttcggcctgcgctaccgtctggaagacaagcgcgccgacgatacgccgctcacgctgttgtatctgacgcccggggtggtcgatccgagcggccagcggcacgaccggtacgaagtggtacagaagctggtgcccgatgcgccgcaggacgtcatggcgttcgagttcaccgagacgcatgagctggtgccgggtgaatggcatttcatggtgttccagggcgatcgcaaactggctgagcagcgcttccaggtgcgctgattcgccctggcgattgccgcaggtcaaactggtattggcgcactgcgtcccggtcagatgggccggagcatgcttgtcttggcgtcggctccgcgccatgcttgccatcggctcaaagaaggagtgccgtgatgcaaggaaggctaaccgttctgctgttgtgcatgttggcgcttcaggcgcatggggcgttcaagaaagacgacgaggcgtttgccctccggcaggccgagctggagcagcggtgcgaggcggcgcggagcgagaagttggcaccgctgcgcgaagccgccttccagcagtgcatgaacgccaagcgcggcgccgataccgaagccgactgccggcgcaagaccgctggcgagaacggcaatcgggtcggcggaacgccacgcttttatgacctgcccgcctgcgtcgaagccttcgagcacaagcgccagcggcgctgattgttcccctcgtactctcaggacacagcaggcgcagcgtgttcgccgcggaatagcccgctcatcgggcggccgatcggcctccgctggtgagcgatattcaccgagtcgcaacctccgcgcgccagcctgcaagccgtttcctctcatgccattgcgatccgttctccgttcgctcatcagctgacccgacgaggggctctccggaaaccgggttagcgctggcggcgggcgccaccgttcgtcggtgcgcggagctaaggacagcccggcgttcaagtctgtgcccgaagcgccgaaaaaaggagtgcttgaatgctctttgaatgatgtcagtatgatggcgctgcgccgtgcctagctgacgctccgacccagaggtcacccgatgaactcaccatcgttccgccatctgacgcttgccctgtcgttgctcgcgttgctgttcggtggtcagacggcgtgcgctcatgggggccttaccgtggtcaccgaggagttgccgccgtacaacatgaccctcgacggcaaactgaccggtatgagcaccgaggtggtccaggcggtgctcaaggaggcgggcgagacggcgcctatacactcgatgccatgggcgcgtgcgtacgacatcgcgctcaattccgagaaggtgttgatctattccattgcccgcacggcgcaacgcgagacgctgttcaagtgggtgggcgtgatagcaccaacgcgttggtacctgttctctctgcctggcacgcagttcaatctgaacagtctcgaagacgcgcgtcagtatcagatcgccacggtgaaagacgacgtcggcgagcagtacctgatcgacaagggcttcgccatcggccgcaacttgcagtcgagcaacaagtacgaacacaactacgccaagctcaaggccggccgcgtggacctgtggatttccaacgagttgaacgcgcactacctggtccgcaagggcagcggaaatcctcatgaaaacgccgtgccgcagctgagcctcgacgatctcggcggtgccaatggcttgtgcatggcattcagccgcaacacgccggacgaggtggtcgaacgcttccgtcacgcactcgcgcgcgtgcgggccgatgggcgttacgacgccatcgccgccagatggctgaaatgaacgcctatcaacctggctccgccccggtggtgccgcgtcagaccagttcgctcggccggcgtctggtactggtcacgctgggcttctgtctgctgttcaccctggtcacggtaggcgtgcggacctggtcggcctggcagcacggcctggcgacgatgaatgccgaactcgcgctgatcgatcaggtgtttcggagcaatctggccaaagcgatctgggaaatggacagcgacgcactgcaaacccagctcgacagcgtcgcccaggcggcgcctatcggtcgtgtcgagctgcagatcatccgtgccgggcgcgagccagagattatcgagcgcgagcgcgcgcagcagccggccgagcatcgggcgccgcggctgcatcatgttctgacctacgttccctacgccgacgccagcgaaacggtgggcgagctgacgctggaaggcaacgaaggcgtgctctgggatcggctgatcagtgaggtcaccgatatcgtcatcacccagatcatccagtcgctgctgctcgccggcctgatcatgtggatgttcaaccgcaccgtgaccctgcatgtccgccgcattgcccgtcacctgagccggctgacccccgacaacctggacaagaccctgcgcctcgaacgcaggatgaccgagcgcgatgagttgagcctgctggagttgggcgtcaacgggctgcaagccaagctttccacctacctcgagcgccagcaccacgacgaacaggccctggcggcccatcgcgatcgcctggccgagctggtcgcagagcgcaccgccgagctgcgcgccgccaacgtgcggctcgaagagctgtcgcgcagcgatccgctcactggcctggccaaccggcgtcacttcgatgagctcaaggagatcgaattccgccgcgcgctgcgccaaggcctgccgctgaccgtactgatgtgcgatgtggattttttcaagcgctacaacgaccactacggccatgcacaaggggaccattgcctgcaggccgtggccgaaacgctcagcagtgttttcgcccgtgccggcgaggtggtcgcgcggctcggtggcgaggagttcgtggtgctgatgccgggcgtggacgccgaatccgcctggcgcgccgccgtgaggctgcagcaacggctggccgagcgggcgctgccacacgcaggctccgacgtatcgtcccaggtgaccctgagcatcggtctggccgcgttcgagccgggctgtatcgaccaattcgaccagctgcttcgccgggcggatgaggctctctatcgagccaagacccagggccgcaactgtatagccgtctgaccgaccgtgaggaaccatacaatgcgcccgattgcctggatcgcctgctcgctgggattgctcggtatgacgctgcaggccgcgccgctacgggtcgtgaccgaggatacggcgtacagctatctgcaagatggccaggtatccggcaccgccagccaggtggtcgaagcgacgctccagcgcgccgggctgacggactaccatgtcgctctctacccttgggcccgtgcctacgacatggcgctgagcgagcctggtgtgctgatctacctgatcgcccggacacccgagcgtgaagccctgttccgctgggtcggcgagatcatgcgcatcgagtaccacttctacaagctgcgctcgcgagacgacattcaggtacccgatctggaagcggccaagggctatcgaatcggcgtgttgcgcgaggacgtccgccaccagtacctgcaggccaagggctttcacaagatcgtggtcgccgcgcagaacggtgaaaacttcaggcgcctgctcaacggtcaggtcgatctggtgccgatgcccgagcaggacatcgtggtgctgtgcaacgaagccgggatcgatccggccagcgtcgagcgggtgttcacgcccgacgccgccacacaactctatatggcgtacagccgacagaccgatgacgacgtcgtgttacgcacccaagccgcgttcgagcaactgcgggccgagggtgtagtcaccgagctgatggctgcgcaacactgattcggccggccatcgccctggcacgtggcggcggcgcgggttcccgcctgcgcgctggaaccgggtcaaccctgcagatcggccagcatcgccgtggctaccgcttcggccaccttgatgccgtcgaccccggcggaaaggatgcctccggcgtacccggcaccttcgccggctgggtaaaggccgcgggtgttgatgctttgcagtgattcgttgtcgcgcttgattcgtaccggcgaggaggttcgcgtctcgatgccggtaagcaccgcgtcggcacgatcgaagccgcggatctgcttgccgaaggccggcagcgcttcgcggatggcctcgatcacgtagtcgggcagcgacggtgccagatcgcccaggcggacaccgggcttgtaggacggttcgacttcgccaaatgcgctggatgcccggccgcggatgaaatcgccgaccaactgccccggcgcgcaatagtcgctgccacccagctcgaaggcgcgcgattccagccgttcctgtagctcgacgccggccagcgggccgccggggaaatcctcctccgggctgatgcccacaacgatgccggcgttggcattgcgctcgttgcgcgaatactggctcatgccgttggtgaccacgcggttgggctcggaggtcgcggcgaccacggtgccgcccgggcacatgcagaagctgtagaccgcccggccgttcttggcgtggtaaaccagcttgtagtcggctgcgcccagctccgggtggccggcgtatttgcccaggcgcgcgttatcgatcagcgactgtgggtgctcgatgcggaagcccacggcgaagggcttggcctcgatgtagacgccgcgctcgtggagcatgcggaaggtgtcgcgcgagctgtgacccagcgccagcaccacgtagcggctgcgcagctcccccccatcggccatgcgtacgccctgcatgcgcccgtcctcgatgatgaagtcgaccacacggctatcgaagcgcacctcgccgcccagtgccttgatctcctcgcgcatggtcgagaccacgccggtcaggcggaaggtgccgatgtgcggcttgctgacgaacatgatctcttccggcgcgccggcgcggacgaattcgtgcatgaccttgcggccgtagaacttcggatccttgatctggctgtagagcttgccgtcggagaacagcccggcgccgccttcgccgaattgcacgttggattcggggctcagcaccttcttgcgccacagcgcccaggtgtccttggtgcggctgcgcacatcacggccgcgctccagcacgatcgggcggaagcccatctgcgccagggtcagcgcggcaaacaggccgcacgggccgaagccgaccaccagcggacgctcgcttagcccctcgggagcctggccgaccgggtaatagccggtgtccggcgagacgcggatattgcggtcttcagccaggcgtccaagcaccttgtcttcgtccgcgacgtcggcgtcgatgatgtaaacgaaggtgatctcgctgttcttcttgcgcgcgtcatagctgcgcttgaacacgctgaagtcgagcagctcggcgtctttgatgcccaggcgcgcaataatggcctggcgcagggcttcggcgggatgatcgagcggcagttgcagttcgttgatgcgaatcatgacgagtcctggccggtggccccggcagaggtaagggcacggctcgatccccggcgtggccagccgcgaatcgaggtgtcgggagtgagccgcgcagtttagccccgtggatggggcctgtcatgccggtcgatgtgctgcccgaagcgaggtgcctatcaacgcaagagctcgccgctattgcagcacgaccctggcgttgagcggttgcagtgggcggttgttggcatggccaacggcgcgcttcagctcgtcgatctgctcgccggaggcgatgaccggttgcttgagcaccagccagcgcacgccttcggtgcagggcggggtggtcaatgagccgctgaaccggtagtagtccagcgactcgggcagcaactcggtggcattggctacgggtgcgatcgggcggctctcgcctgccgtgggcggcgcgtcccacaggcgggataaggcggcgttggtggcgccttcctcgaacatcagcgccagcaccgcgaggttaccgtccttgtccgcgtgcaccaggtgcccttcgagcggataggatttgccctcgacgcggttctcgctcggtgcgtggaagtggaactgcagtagttcgtatgtattgccgtcgaggtgcagggcgctccccggttcgtataccacctggacggtgtgcccgttgttgacgaccttgctggcgcccgccgcgtaactcaaccgcagtggcgtcagctcggcttcgacgaaaccgctgaggtcgacaggcgactggttcttgccctggcaggccccgaattccggggtcagtttggcccagttttccggccccgcgttgcccgaataagcccagtgggtcccgggcgtgacagcccaggcattggcacagacaagcagggcggcgaggcccgatagggtgtgtttcatgagatctccactgcttttcactattgttttaacggagcgaagcccggggattggctctcgtctgtttgacaagcgtgctgccaggttgctcactcgggttcgggtcgcccggccatcgcgcgaagcctggtttcggcaggctctagccagcagtgcgctacggctcgccggccattcgtcgcgccacctgccaggccggttggcgagccggctgttttgtcatcatcgaggctgcaatcgcctatactcgcgcgccattggccgtgaccccagggcgcggtgctcggcgaccccggttggtttgcctgggtcggtcacctcagaagggaacattcatgctcaacaacgatgtgatgcgcagcctgcgctacatcctcaacgtcaacgacgccaagatcgccgagataacgcggctcaccggttgcgagattcccgattccgaagcggtggcctatcttaagaaggacgacgaggacgggttcaagccctgccccgaccggatcatggcgcactttctcgacggcctggtgatctacaagcgtggcaaggacgagagccggccgacgccgcccatcgagctgccggtgaccaacaacacggtgcttaagaagctgcgcgtggcgttcgaactcaaggaagacgacatgcatgcgatcctcaagtcggttgatttcccggtatcgaaaccggagctcaacgcgctgttccgcaaggctgggcacagcaattaccgcgtctgcggcgaccagttgttgcgcaactttctcaaggggctggctcaacgcagccattgatccgcatccagacacgcgaaagcccggctgaccagccgggcttttcgttcgcagagccttagctctggatcatggcgatgaccttgtcacgcagcttcgggtcgttctgcacggcccggttgatggcgttgtattcctggatgctcaggtcgttctcctgcaccgtgttcatcatcttttcgttggcctgctgctgcagttgctgggcttcggccggatcgccggtcttttccagcttggcggtgaagtcctcgcggatctccatgatttcgcccagcgagtcggcgaacttctccagcttcttgtcgctgatatccgccgcctctacaaccggcgcgggttgcgtcgccggagccgggctggcctgctgagcggacacctgcgaggcgccggcggccatgagcagagccgcgaagccggtggaaacgaggcgggtgtttagcttggtcatgttcggatcctttgctttgagaattcgccagtcgggtttgcatcgcccgtgccagaaacatgatcgatagccaagccattgataaataacggttcgtaccgtccgtcacgcctgcatcgaccgaccgcgaagcgcgctgtagagtgccaatatggcacatgtagcagtatggcaaggtatctcgaccctccgcggcgctctcgttttgaaggtcgtcgtccccctcgtcgcgatcatgttcggcttcagttatctgatgctgtggacggtcgagcgcaacagcgagcggcgtttgcaggaggaggtcgagctggtcgcccgggcggtgcgcctgccgctgagcgacagcctggagcgcaagcacgaccgcaccatgcaacaggtgctcgagtcggtgctgggtgtcggccgcgtctatggcgcttacctctatgacgacgaaggcgagctggtggcttatgccggcgccgtgcagcctgaccaggaccagtcctcgatccaggagctcgctgcggacggcaagcgccggggcggctatcagcgtattcgcggtcaggaggtgtactcctatttcctgcccctggagcagagcggcgggcgcatcaacggcctgttgcaggtcacgcgccgctggagcgacttcgagcgcgatacccgtcgtttgcgcgtcatcgccggcatctcgtcggggctgctgtcgctgctcgcggtcggcatcgtgctgttcggccattggtcggcgatcggccggcatttgcagcagctcacccagagcatggcgcgggtggcggcgggcgagcggcagcaccgcgcgccacgcagcgggccggaggaaatcgcggtgctcggccaagcgctcaatcgcatgctcgacagcatcgccgaagccgagcagcagatggccgagcagaaggctcgggaagccgaactggaatcccggttgcgacgatcgcagcagttggccgcggtggggcggctggccgctggcgtcgcccatgagctgggcagcccgctcagcgtgatcgatggcaaggcccagcgcgtgctgcgcagcgaaacgctggatgacgccccgcgcaaggggctgctgcagatccgcagccaggtgcaacgcctgagcgaaatcgtccgtcagctgctggacttcggtcgcgcggccgggcggccggtgcgccgcatgccggccgacgtgctggcccattccgccgcggcggcggtggccgacgagctggccagcctccgcgtgcaactggacgtccaggcgccgccactcaccttgtattgcgaggtcgacccgtcgcgtttcgagcaggccctgaccaatctgttgcgcaacgccgcccaggccagccccggcggccaggtgcgcctgcgctggtggcaggaagagggttgtctggtctaccaggtcgaagacgacggcccaggcgttgccgaacaggaccgtgccgcgctgttcgaaccctttttcaccaccaagccggtaggcaagggcagcggcctgggcctggccgtcgcgcacggcgtggttgccgaaagcggcggtcgcatcgagctggtggacagcccgctgggcggcgcggcgtttcgtatttccctggcgttggctgacgaggagcacggcgatgcaaacggatgacagcagcccgcagcgggtgctggtggtggaggacgacgacagcctgcgtcagttgctggtcgaagagctggaggatcgcgccctgcaggtgcgctccgtggccagcgccgaagacgcggtgccgctgctggaaagctgggagccggacctagtggtcagcgacctgcgcctgccgggtgccgacggcatggcgctgctgcggcgggtcaaggcgatgcaggcggcgccggcgtttctggtgatcaccgcattcggcagcattcagcaggccgtcgcggcgctcaaggagggcgccgacgagtttctcaccaagccgttggacctcgagcatctcggcttggccgtcgcgcgcgcgctggagacgcgccacttgcgagacgaggtgcggcgcttccagcaactgctcagcgatgatcgctttcacggcatgctcggccgcagccgggtgatgcgcagtctgttcgatcagatccgccagctggcgcgcgcggccgggccggtattggtgatcggcgagagcggcaccggcaaggaactggtcgcccgcgccgtgcacgccgaaagcgatcgggcgcagcggccgtttctggcgatcaattgcgcaggattaccggccgagctgctggaaagcgagttcttcgggcatgccgcgggcgccttcaccggggccaatcgtgcccaccgggggcttttccagcaggccgacggcggcaccctgtttctcgacgagataggcgagatgccgatgccgctgcaggccaagctgctgcgagtcctgcaggagggcaccatccgcccggtgggtggcgaacgtgagttgagcgttgacgtgcgcatcatcgccgccagcaaccggccgctggaaaccgcggccgggcgcgagtcgtttcgagaagacctgttcttccgcctcgagacgttcatcttgcaggtcccgccgctgcgtgaccgcgaggaagaccgcgagctgctcgccgccggcttcgtcgcgcacttcgccgcccgtgacggccgtccggtgcgcgggctgtcgcgcgcggcgctggagcagctcaggcgctatccgtttcccggcaacgtacgcgagttgcaaaatgccatggagcgcgcagtcacgttctgccacgggcgcaacatcgaactcgaacatttgccgacgcgcattgccagctatcaggaaagcgcgcccgaggcggatgcccatgcgctgctcgggctgatgatcgacgggccgctgctgccgacgctggatgagctggagatgcgctatatccgccacgtactcgagcgggtcgaaggcaacaagcgccgtgcggccgccctgctcggcatcggccggcgcacactgtaccggcgtctgggcgaacaggagcgggatgaggactgagcccacatctgccggccgggaggcgctgtgcatcgcggctggcgcggctcagctcggggcgagcgtcggcgcgtgcaatgcttgaagatgcagcccgctttgcgagcgatcgcggacggccacccactcggccagtgccggcaccgagcgcggcggcgagatcaggtagccctggaacaggtcgcagccggcgcgcagtagcgcggactgcttttccagcgtgtccacgccttcggcattgacccgcttgccctgggcctggcagaacgcgacgatcgctccgaggctctcctgcatgtcagggcgggtcaggcgctcgatgatggccatatccagcttgatggtgtcggccgggtattcgagcagctgctggatcgaggtgtaaccaactccgaaatcatcgatggccacgcggaaaccggccatgcgaatggcgcgcaccaccgccatggtgtggttgctgagctcggcggcgtaggtttcggtcagctcgatctcgatgcggctggagcagatgccgtaatgctcggcgcgctcgatcaggtaattgcagaggcggtcatcggtcagctgtgccgaggacacgttgatcgccaggatcaccccctcgccgaacagcctgaccagttccggatagcccgccagcgcatggtcgatcacccagctgtcgattttcggaaacagccccgcccgctcggcgatggggatgaattcgcccggcgataccgtgcccagtagcggcgaatgccagcgcagcagcacctcgcaactgacgacccgcccctcgcgatccaccgccggcatgtagaccaggcggaattgctggtctccgtcgagctggcgcaactggtcttcgaccaggcggatgcgctggttgcgctgttccagcttcgccgaaaaggcgaccgcgacgttcttgccctcggctttcgcctggtacatcgccgtgtcggcacgggtcagcaattgggtgatggagtcggcatcggccggataccacgccgtgccgatgctgacgctgacggggaagaggcgatcgtccaacgcgaagcctccgcggcatagcgcgagtatggcgtcggtcaggctcggcaggctgtcactgccgggatcggccatcagcaggacggcgaattcgtcaccggacaaacgggcaaacgccgtttcggtgttcggatgggctcgatgatggcgtcggagcacgccctgtacgcgtttggcgaagatctgcagcagcgcgtcgccagcatcgtggccgtgctggtcgttgacctgcttgaagttgtccaagtcgagaaacagcagcgccagttgtcgaccgctctgcatgcactggtcgtacatggcgctggcctgcacgctgaagtgggcgcggttgctgatcagggtcaggctgtcggtccaggagatgtcctggatgcgttgcagtgccgccgtgttgcgctcgtggagcgtcttcatgttcaacgtcaagcggccgatctcgccgccgtcgctgggttcatcgagggcgtcgcggcggcacagcagcaggtcggtgagctggctgtccagctggctgatcgggtcggtgacatagcgacgaatcagcaacagcaacaggccgatggtgatcaggccgatcagtgagccaccaatgatgaacgccaggctcagggtccacagccgatcggcgatgtagtctggcgctggggtcagccgcgcatgcagcgagcgcgacagttcgacctcggccgacaacccgccaggcgcgggcggcaggttcggggcgatttccaccgccgcgccgtattcctgttccagacgctgcttgaggctgagcaggcgctccgggcgtacggccagctgcagggcgaaggccgcctcacgctggctcggcagcgggcggctgttggaggccgacagaaggaaatcggtattgagcaacagcggcccgccgtcggcgtcggccagataggtcatctcgccgggatccgtttcacgcctggcgtcgaggattacctgctgctgttgggtgttgatggtggcgaatggcgataggctgctttcgaaatagtaggccacggcgccatcgggctggacgatggcgaaggagacgaacgacagccgactggtcgagagcgagcggatgctttgttgaatgcgcaggccgagcgtctcgttgcgataggcggtgttggactcacggagaaacagccgcagtgcctgactgtcgatgatcgagtagagcacgctgcggctgaacgcctcgtaatccatgtaggcggacttcaaggccgacagctgctgcgtcaggcgtgcctgttcgaggcccagcaacgaggctcgctgggtcaggtaggcggtggtcgcggcgagtagctggatgatcagaatgaccgggaagatcaccagcagggcgcgtttaccgagcgtcatgggcgtttatcagcgcactgatgatgcgccgccgtgtctgcgtcgcttccagggggcgcgactcatagacctggctgcgttccagcacctcttcgggcgggtaaatgctcggatcctgccgaatcgcctcgggcaacaacgcctgggccgcggcgttgggggtggcgacggccagttgcgcggcgttcagcgcggcgatctcggggtcgctgatgaaattcaggaagcgataggccagcgccttgttcggcgtattggccgggatcgacaggcagtcgacccagagcagggtgccttcgtctgggaccacatagcgccagggctctccctcgatgccctcgacctcgttgagtaccagctggtcgccactgtaggccagggccatgtcagcctggtcgataaggcgcgggtctcgtagcgaggtgatcgcgtattcgtaggtcagtacggcgctcgactgcgcctggagcatggcgaaggccgccctgagttcgtcattactggaggtattgatcgaatgctgctggtagatcagcggcgcggccaggacgtcttcgtggtcttccatcatgatgatgtgcggcgcctgatgctcggccggcttcagcagctcggcccaggatcgcggcgcctgatcgaggcggtcggtgcggtaagcgatacccagcgttccccacagatagggaatgctgtaggggccgcaactgtctcgccagcgctttgagacgtggcgcaggttcggcagcttgtcgtcctcgatggggtcgagcagggcgcgctcgccgaagcggccggaactgattcgctcggtcagcgccaggtctatctggtgctccggcttggcgagtacctcgtcgcgtttgtcaccactgtcgaaatagatctgctggatggtcacggccgtttcggcctgccagcgctcaatcaccgcctcgctcagatattcctcccagttcagcagggtcagggtttgtgcagcgcgcaccgccggtgcgggaaccagcaagctggcggcgaccaggacggcaccgcagaggcgccgcacctgaggcgaagccgggatcatgttgttcatcgattgctccatccactgtgtccttgcctggatcgactcgctgaggccggctaagcgtggcgatgccggacgcccgacagttcagctcgacggttgtcgagcagtgctggctgaggacgggcaagttgtcggcgcgccgtggtggcactttaatgacgtcagacgaatggcggcaatgctttttgatggctttttgctttcatccgatcagcgggcggagaccggctgtttcgtagcaggcgtttgcgggcgacgcggggcgtgcagccaggacgccagcaggcgcgtggacagtggtatgaacaggtaggtcatcagcggggtcagggccaaggtgctgagcagtatgcgcgccaccaggctgagctcgccgagcaggttgccgaacagcgcgttgaacagcagcgagaccggaaagaacgccagccagatcgctacactttgcttccagcgcggcggcggtgggctgtccgtaccgccgaaccaggcatcgatacctcgggcgcggtgctcataggggtggccgaacaattcgctgccacgctgcagccaggcccggcgcgaagccgaatgctcccaagtgtcgagggtctgttcgtcagcgaagcggaagacgatctggaattcgtcgtcaccaggcggtggggccagcacgccggagccgaggtagccgggaaaatccgcggccagctgttcgccttcgtgtagccaggcgagtagatcgtggtagcggccatcgcgcacgcggcgggccaccatcagggtgacgggttcggtagacatggtgtatctccagcatcaggccggccacccggatagggcattcggcaaacgcagcgccggggtgatgggctgcggcataagtcaggcaaggatcatgccctggccttcagcacgcgccagaccttgtgaggtcggcacatccgaaggcgacggcgcactatacggagattttttgcacttggaaggggcgtccgctgcagaaatcggggcgacggtggcgcttggcagccgaggccgattagcgcgttccggttgcgcctttcggaaagatatccgtcgccaagcaaaggcagctccgtgcgtctgatgcaggatacggcgcagaaccgcgacgccagctgcgcactttgtgaccgacgcgcttgaaacgatcacgacgctcagtcctactgacggccatggcggggcgagacgtgtcccgatgacgccaatcgccgcctatatacaagcggaaaacttccaaccaaggatggtggaaacaatgagcggttacgtacccaatatccccagagccaagcgcgacgccgagttgaaggacgtccagcccgtcgatatccatgccgagcgctgggctgaatacgagagacacgccagccaaccggccacatctcccgagaagatcaagctggctttgcgtatcggcgtgttcttcgatggcaccctcaacaacgccaccaacgccgcgctcggtctggcatgtggcgcccatcacccgatagcggccgaggatctggattctaactgcaagccctatatggctgagccggatagcagttatgggaatgatgtgaccaatgtgcggaagctgatgagtctgcacatcgaccgcaccgatgctgaaggtgcgagctcacagaagcatgtgtcgctaagggtctatgtcgaaggtatcggtacaaacagcggcgaagaagacagcccactgggttatgccatggggcggggggctaccggcgttcgcgactgcgttcaacgagctttcaccaggattggcgaggctatcggccgggccaaggaggcgaatcccggcggcgaaataaccgcgctgaccttcgatgcctttggtttcagccgcggtgccgcagcggcaaggcatttcgctaacgaagtggtcaaaggccagcaggggccgctcggtgcggctttgcaaggtaatgcgcgcgcgttcagcaagaatttcatcgaccgctacggacatgacatcaacatcggttttatcggcctgttcgataccgtcgcttcggtgggcggcttggctaacctgggcaacgtcagaagcgctaccgcaccggggttgaacctgtatctgccgcgcaagtacttctcaaacgtggtccagttggtggcacgcgacgagatacgtgccaactttccactgagcgaggtcagcccggatcatcctgaaatcatcttgccgggcgtgcactcggacattggtggcggttacctggatgacgccgaggagcgagttctggtcagccccatgcagacgctagtggtagggcagcgcgtcgatgtgacgacaacctccatctaccaggacgcggccgatgccaggcagcggatgatcgcagagggttggcccgcggacatgctggaaatcgtcactcccgaggcgcaatcgctgccggtagatccgcaggaccgcctggcgcctcggcaaaaacgagtgtatgccggtctgcaactcaagcgtcggttgagtggcgggctatcacgcgtttacttgcggctcatgtatgagttcgccaagaagaaaggggtaaggttcaacgagatcgatgggaacgattccagttactcaattccagcggatctagcttcactttcggaacgatttaataatggtaattatcagattacgcccgctgaggatcagctactgaaggtgcgctatatccacttttccgctcattggaataacccgctcaagaagaaatcgcccagcaaattaaatcttatatatattaatgcgccgaatactggtggagtccgccgacttcatcctcacgtcgccgagtggaaattactatgattaagcacatcatgcccctgctgggtatattggttttatttggctgccagtccgcggatccgttatccggggacaaggatcctaaagacccatggtggagtttggagttcttctcaccgctctacatggtggggtgggtcgaggcgagtctggtcgaagatatccagggcagaacgttcaataaaggtagcagcggaatcgtcggcaccggcattgacaattacgaaaccgacttcgcgagaggttggccaagaggcaagtccggtggaattgatggagttgtaggtgcggacctgccgagacgcgtctacgtacggtggcagtcggtggtggagccgcaaacctatcgggcatggatcgatatccccgaagaagctcggcagctcatgcatagatcaacccatcgacgctgtccggaaacaccggagcgaccagcgctttatcttgcggcgttgcatattgggctggcgccgggcggtgtcgtccaggtctggacacgcgatgagtgtaataagcccgttccagtcgctcgtgctcaggccgagatagagccacgtggcccacacctcggaaaatcaggcgggaaatattatccgttatcagacggctccaaacgttatatcgagaagttcggtatcccgtatggaagctggtagaaaacgtacggaaacaggtccgccgggctaccaccaacgcctttggagcaggccgatcaagcccaccacggaacgccttctggcggggggctgtgcgttccggcgttccggcgtggtcaggtgattagcttcatcgggaaaacaggcaacttgatcgcttgtttatagcggagagctttttgagtatccccgaacaccaataacttagtccaagcgttgttattaacttgcttggtggcgagcatgtctgaggagttgttaaaaggcgagcattgaggctaatagttcggcgggtagtttattaacgcaaataaaaaaggcgcctacggcgccttgaattgaagcgttacattcagaccgtaccgagtccggtgcgatcgctaccatcttccgcgagcagttgtccgagcggagtacgttcgaaaccatcgtccgccacttggtccgcttggggtgtcagatcgaatccgtcttcggcgacctggtctgcttgcggcgtgaagtcgaagccgtcttctgcaatctgctcaccgatcggggtgagatcgaagccgtcttcagcaagttgttcacccaatggtgtacgatcgaagccgctttccgaaagtgtgcgatcggcagatatcggcgcctgcacggtcgaggcgccctgcgcttcgcccacgataggttgcggatggcttggcggtatcgcgaaggctgtcgatgcgacgctggccagaattacgcttgcaatgagctttttcatgaggatgtcctcggtagtagttgggtacgggacctatgctacggacgaagacaaattggacaaacgcgagcgtatcgatagtgcaaatcgacggctgtgatattcgttagcggcggggctattgattaaatcagccaataatttaattcaattaaatcgatagttgttagcagcttgcctgtcgttagttgccgcggctgggttggcgatcgcgatcgccgccatgccgactggacggtcagggcaaggctttctcggcgtagctgcgcgttgccaaaccgagctgggcgcggaagctttccatgtcgaatatggtgcagatctcgcgaatctgttgcgcgggcgtcagggtccagaacgccatcgcggagatgctcagcaccttgtcgctggttggatagccgaacgcgggtgtttcgatgatgccgatcagggtgctccaggtcaccaccttgtcgccttcggcgatgcactcttcgacgaccacttcgagatcgggcatggcgctccgaatctcggcgaccatcgcggcaaacgcggggctggccatcgggtggccggcgaaggaactcttgtagagaaaatccttgctgtgcagctgctcggccagcgccatgtggccgcggttccaggtcagttcgatgtgttgacggaccaggcgtttgttgtcgttccgtgacatctgtcttatccggttgagtggcggagctgtaactgtagcagccgatattgacgtccgacatccatcgctggagcccttcgtcttgtcagtcgagcggcaggcaaagtcggaacgccgcgccgccgagctcggagtcatccagcctgagctcaccgccgtagctgtcgatgatgtccttgaccaccgccaggccaatgccctggccgggatgctgggcgtccagccgttctccgcggcgcagaatgcgcgcgcgctggtcgaccgggacgccgggcccgtcgtcttcgatgctcagcatcagatggccgggatgctgctgcaggctgatgcgcacctggtgaaggcagagccggtaggcgttttccaacaggttgccgagcagctccatcagcgcaccctgctccagcggcaggatggcctttgctgggatctgcagctcgacctgcacgcgtttgtcctggtagaccttgtccagcgtgttgcataggcgaaccagcaacggttgcagcgcaacctggtggcgcaccaggccgctctggccgaggctcgcacgttgcagttgatagccgatctgctggctcatgcgttcgatctgggcgcgcatgacgcgggactgctcgcggttgtccggctgggtgctgatcacttcgccgacgctttgtagaacggtcagcggcgttttcaggctatgggccagatcgccgagtgaattgcggtactgctcgcgctggcggcgttcaccgtcgagcaaccggttcagcgagcgggtcagacgcaggagctcgcgtgggtgctggtcgctgagtcgatccagccggcccgcctccacctgatcgagctcgtggctgaggcgtttcagcgagcggaagccccaggtcaggcccagccagagcagcgtcagcaataccagcagaccgccgccgagccagaggtagagctggcggcgaaattcttcgaacaggctgcgatattcgctggtgggctgcatggtgacgaagctgaacgcctggcgttcgtcatcggtcaggcgcagctcgacgtcgtagacgaagtactcgacaccgtcggcgtcgcggacccgcctgaattcggtgatgtggtcgttcaggcgcggttggtagtcgatgctttcgtcctcggccgaacgtgactgccagagccttttgccttgcgggtcgtagatatagcccagcagcttggcatcgggcagatcgaactcttcatccggcagccgatccggcatgatcagccggccgccttcgatgcgcgacgcggtgatcagggtgttggcgtcggccgccaggcgctcctcaatgacacgctcgaaggcgaggctgaacgcggcctgtagcaccggaagcagggcgagcatgaacaggacggcgaggccggttgcccccagcatcagccgcaggcgcagcgacatactgccgttacgtgcggctcttgccagtaccaaccaacggccccagcgacgactcatcggcagcgctcggtgaacaggtaacccaggccacgaacggtatcgatgggcttcagcccgccgtgggcatccagcttgcgccgcaaccggccgaccagcacttcgatgacgttggcgtcacgctcgttgtcgtccgggtagagctgctccatcaggcgttccttggccaccacctgctgctggtggcgcatcaggtattcgagtatgcggtactcgaaggcggtcagcggcagcggctcgtcattgaccagtgcctgcttgcggttgaggtcgagcttcaacgggccggcctcgatgcttgcctgggtaaagccggacgagcgtcgcagtagcgcgttgagccgcgcttcgagttcttcgaactggaagggcttgaccacgtagtcgtcggcgccgacggccaggccttcgaccttgtcctgccagttgccgcgcgcggtgaggatgagaatgggaaagcgctcgccattgctgcgtagctggcggatcaggtccaggccggaaatgcccggcaggccaagatcgatcaccgcgaggtcatgattgaactcgcgggtctggtacagcgcctcttcggcatcggcgaccgcgtcgaccacgtgcccgctttcgctcaggcgagtcagtaggtggtggcgcagcagcgcctcgtcttccaccaccagcactttcatgtgcggctcctgtcatgcagacggccgggacaatccccggccgtgttcctgtcgatgcaagcgtgcagcttagaacttgtagttcacgccgagataggcctgcttggtgctatgcagatcgatcgaaccgaccttgccaacaccgcgctcggagacttcggtaccggcattgctgcgcaggtaacggtatcccgcttcgatcgatgtgttatttccgacgtcttgcaggacaccggcctgcagacccaccaggtaaccgatgtcgctgtcgcggctgtagccgctggactcgttttcgagcttggtcaggccggcactggcgccgccgaacaggcgggtggtgtcaccgaccggcaggaacatgtcgtagctgccgatcaggttctgctgacgcagcttgagcgagctgccgtagtcgtcggatacgttttcgtaggtggcatagtagcgcgcctcgtcggtcatctggccggcacggatgccccaggtgccgctgttcttgatggtgtcatcgaaacggttcgtgcccggcatgttcagcttcaggctgctggagcgatccatgttgacggtgctcttgccccaggtgaggccggcgaaattctcggcggcttgggcgccgagggtgaagacgctcagggtggtggcgatggccagggtatgcagcttgttcatgtgtcgctcctttgcaggcgtggaaaatttacgtctccatcctgcctgcggggcgctgaacggctcctgaaccctggctgaacctgagctgaacgatggcgcagccggtgctagctggctgcgccggcgatccgctagcgtccgcgacgcccgaacaaggcgaccaacgccgccgcgcccacggccacggcagcggtggtcgcgagcggatgttgcgtggcacgggtgtacaggctgcgtgtcagcaccatgccgggatagttgccgctggcgctgccgtcacctgggctgccgacatcgctggcgtggagcgcgccgcgggggtgtcgatccgggcggccgctcttgatggtgtcgtagacgaaggtgcggttgatccagtcggccaggtgcggcgcgttctgcgcgagccgcgaaagcagcttggcattgccgatgtagacgtcgcgctgcgggtgctcggcagcatggaggatcgcgcgggcgaccacctccggtgcgtagacgggcggcggaaataccggcgcgctgggcaggtagttcttggagtggtccatgaactgcgtgtcggtcgaggagggacgcacgagtgtgaccgacaccggcgcgcgcgacttctgcagctccacccgcagtacgtcggtcatggccttgatcgcatgcttgctggcgctgtagctgctgtggaagggcagcgcattggccgactcgacactgccgatgttgatcagcgcaccgcctttgtcgcgcagatgtttgacggcgatggaggagccgtagtgcgtgccccagaagttggtctgcatcacttgttgatgatcttcgtcgctgacctcgtcgaagcgcccccagaccgagctgccggcgttgttgatccaggtgtcgaagccaccgaagcgggcgatcgtctcgctggcgacccgttccagctgcgcgcgctcgccgacgtcagccatgacgtgaagcacgcggctaccggcattcaggtcgcgctcgatgtcaagcagggcttcttcgttgcgcgccaccagcaccacgcgggcgcccctttcgatggcgaggcgggcagtcgccaggccaataccgctggaagcgccggtgatgacgatgacctgctcatgcaagggtttgagagatatacgcatcggatctcctcggtagcggcaactgtgggttggctcggtagaagccatggccccgcttccggttccgggcaggcgatggatggcagaggtgaggtgagcccgacatggagaacgacactgcggtgtgaggcaagcggactaatcccttggggctttgtctggtcagtgaagggtcgggaaatatgtacagatgtttcagattcctcggaactcttttgatggctaattgctctcaatcttgcgcgggagattccccgcttatcccattgaccaggaagcctgcacgtcccctcgtgcagcggtatgcctcggcttcgagcaaggtgaaaggaatgaaacgctttgtcgtactggatagttttcgcggtgtttgtgcggttgcggtggtgctgttccatacccagattctgctgagtttctccgagctcggtttttttcggcacgctgatctgttcgtcgaattcttcttcgtgctgagcggtttcgtcatgttccatgcctacgggacccgcgagttcggcccgcagacgctcaaacgcttcgtcatcagccggacgttccgtctgtatccgcttcatctgctgatgctggtggtcttcatcggcctggagttcggcaagctctttgccgagcaccatggattctcgttcaacgacccggcattcagcggcaagaccgccccgagcgaaatcctgcccaacgccttgctgctgcagagctggatcagcagcttcaacagcctctcgttcaatacgccagcctggagcatcagcatcgagtactacctgtacatgctgctgggcttggtgctgctgtgggcgccgcgttattgcgggcaggtactggcgttggccacgctggtgtctttcgccgcgttgtacgtcgagctggacgtgatcaagccgttcatctggcgtggcgcttcgtgcttctttgccggcgcgctgacctaccagctctatcggcgtctggagccggccatcagccgcatggatgaccagccgtttttcaatgtgctcgaagtgctttgcctgctgctggtgtaccgcacgctcacccatgaaacgccgcatcagggcatcctcgccagcctgctgttctgcgtggtggtgctggtgttcgccaacgagcgcggcgtggtctcacagctgttgcagcggcgcggctttgcgcgcctgggggagctttcgttctccatctacctgacccacgcggcggtgatcttcgccttcaccagcgctgcggtggtgctgtccaaactcaccggaacggactacacggtcatcctgcagcaaccggacagcgaccagatcatgcgttacatcagttcgggcagccagttgatagacgacctgctcacgctgctggagctggcgatggtgctggccgtgtcgaccttcacgtatcactacgtcgagctgaagggtatcgaggtcggccgccgtcttgcgcgcagcgagtcgctgcggctatcgcaggtctgaagcggcgctgacgaacaattcatcgggagggcgaggcccttccgacggcggcaggactggctccggggaggatgccgggccggccggttgggttgcgggataggcctggtgcaggggtgtctgttcttcgccatcgacagcccaggtcagcgtcgcctcgactcgactgtcttcggacaaacctagacggttattcagcgggcattgtgtctcgggcccgctgaccagcttgcccgattggcggctgcggctggtgccggcacgtccgcgggtcagcacttcgagctgataggtcagtgggtggggttgcgcgctgctgaagcacagccgcaagcgcagctggtcgttgtcagggctcagttccagccgcgcctcgacgggtgcggcagcggtggtcagcatcagggtcgccaggatgggcgtgaacatgggcgggcactcatggccggagcgattagccgatgcggcttactgctgaacactactgctgaacaatggtggcctggttgccgctgcccgactgctggatcacggcgtgcatgctcgcggcgctttgagtgattgcggccgcgttcgcagtcccgacctggctgatgcgagcctcgttgtattcggccaactggcgaatgtcggccaggttgccgtcgccggtctgcacgacactggcctggttgccatcgaaccattgcaccagttcgacatcgttgccgttgccaaccgatgagccgcggaaaccgttgccgcgcccgctctgctccaaggccaggcgattatcgtcaccgagttgctggaaaacgacttcgccgaacagtgtgttttgcatgatctgcgcactgttccggttgccattctgggccagttgcaactggccggcatcgccctggtcgatgttggccaggttgttgtcgccgacctggtaaacggccagctgggtaccgtggtagacgccgtcctgagtgagcgtcaccgagttgtcgttacctatctgataggcctcggcctgggcgaagccctgttgtgtggcggagatgaagttgccgtcaccgacgctgctgagtttgaggtcgtttgcgtaccagctctggtcgacctcggcgcggttgccggttccctgctggtagacgctcgccgttgcgaaatagctttcaggaccctggtagacggcgacatcgttgccactgccgacctgcacgacggtggccaggttcgactcggtgaactgggcgaccgaagcgtcgttgcccgaaccgttctgcctgatcacggcttcgttgagcacgccggtctgctcagcgctggccgagttgtcgctgccggtctgttcgatcagggtgcggttgtcggcgtacaggtatggggctgtggtcagcagcacggcgagtgtgaagagtggcaggcggctgcgcatggcaaagtccctttttggtcggctggttattgatgttgcacgatctgaacgtgctggccgcttccgtattgaatgacgctgctactcaagccactgccgagttgctcgatgctggcgttgttgttggcgccgatctgggcgatggcggcctggtttgcgctgccgatctggctgatgttcgcgagattgccttggccgacctgaaggatgctggccagctggttttcgccttgttgcagaatgaaggcctgctggtcgctgccctgctgaacgatgccggccagttgccggtcaccgatctggctgagctcggccaggttgtcgttgccttgctgcagcacctgcgcgctttgcccgtccagcggtaacgccagcatggcgggcgattcgagactgagcggaccctcggcaaggtcgctgttgtccagcaggtcggcggcctgcgaggaggcgtggccgatgatcagaagcgcggcgagcaagccgcggcgaattagcgctagacgatccatgcaggcacctcggaatgatgctcggattcttgactggcagcgagccgctgaacatccatcgaacgggccaaaaccccagtgccgcgatgggctgggaggattaattcctggggcaaattaaagttcatcgcggtccatgtcgaaggtgtcctgcagcaggttttcgagcttgctgcggctgatttcctccacgatgagctgcgccgcctgtgccgcgatcggctcgatttccgccgcgttgggctggaggaagcgccggtaaaccgtgcgttgcccgtactccacccagaccaggctgccccagcgagccgacgggcgctcgcgaaccaccagatcggcgtcgaggtcgctcgcgtcctgcaatctggcgctcaaatagcgatgaaaatcatggccgaagcggctgatggtgttgtcgatgatcagcccgctcagctctgcctcggtctgcgcctgccctgtggccgcttgcgcctgcatcgtggtgagcagcgcaagcagcgccaggccgagcgtcaggcgtgacacgactcggaccaatccagccggccgcgcagcagaaacgccgcttcggcgcggttggaagcgccgatcttgcgcagcagattgtggatatggctcttgatggtatgggggctcaggcacagctgctcggcaatctcggcgttggacagccctttgccggccaggctgaggatctcgcgctcgcgcagggtcagggacggcttgctgccggccagctgacgcatacgccgccactggctgagcaggcgctcggtcaagaccctcggcagccagtcgccgccgtcgagcaggacctgaatgccaccgagcaggtgctcccgggtggcgtggctatagaagacaccgcgaatgccggggtgcttgtcgaccagcagctcggcttgctcgggtgcgatgttcaccagcgccacgggggtgtgctcttcgagctggtcgagaagtttcgagagctggtcggtctggctgttgcccgcgtcgacgagatagaggtcgctggtctcgcgcacgttctcctcgatccgggccagggccacgtcgagctgggcctgttcgccgaggaagtgcctgaagaacaagcccaggagttcattgccggtgagcagagtgacggtaggccgcgtacgttcctggtgggtgaaatccgcttcgtccatggtcgatccttggtctgggtgccgttatgccacatagaaaagttactaaacgaccgacactcatggacgaagttcagcatttacgcgtcgattgggcggggatctgcgctggcatggcaataacccgacgagcggttgactgatcgaatcgaggggatggatggactaaggtgagtcaatcacccgttcgatggagccggcatgagcgaaccccaacgcgaactgacactgcgcgcactggttaccggtctgctgctcggcgccttgctgacgccctcgaatgtctactccgggttgaagatcggctggtcgttcaacatgtcgatcatcgcgctgttggtcggtttcgccttctggcagagcctggcgcgcgccatgcggcgaccggcctggtcgctgcatgagagcaacatcaaccagaccgcggcctcctcggcggcctcgattatttccagcggactggtggcgccgataccggcctatacgctgatcaccggtcagcagttcgatacgctgccgttgatggcctgggtgttctcggtgagctttctgggcatctgggtcgcctggtttctgcggccctcgctgatcatcgagggtgggttgcggtttcccgagggcatggcgaccttggcgacgatgcagcagatctacagccacggcgccgaagcggctcggcgcctgctggtgctcggcgccgccgcgctgctggccgcgctgagcaagctggtcgacagtctgttctggacgctgccgcgctgggcgccgggcatgcagctggaacgccttacgttcagtctggagccctcgctgttgctggtgggcttcggcggcatcatcggcttgcgggtaggcctgtcgctgttgctcggcgccgtgctggcgtgggggctactctcgccctggctgatcgccgagggcctggtcgtcctgccggccgaagcgcgcgggccgcaattcgcgctgctgatcgagtggctgctctggcccggggtcagcctgatggtctgcgccaccttgacatccctcgggctgcgaaccctacgcgcccgccgcttaacggcgtcccatgggcgaacacttcgccggcccgataccgtaccgctgctcggattggctttggccgcgttgctggtggtgggcatgcagatggccttgttcgatatccacccgctgatggccgcgctgtccatcccgttggcggtacttctggcgatggtggctgcgcgagtggtgggtactacgggtattccgccgatcggcgccattggccagctgtcgcagttgagcttcggcgtcatcgcaccggggcaggtggcgatcaatctgatgagcgccaataccgccggtggggcggcggggcaatgcaccgacctgctcaacgacttcaaggtggggcacgccatcggggcggcgccgtcacgccaggtggtcgcgcagtgcctgggcatactggttggcagtctggtaggcgtgatggtttaccagctgctgatccccgatccgcaggcgatgttgatcaccactgagtggccagcgcctgcggtggcgacctggaaggccgtcgccgaggcattgaccgtcgggctcgggtcgattggtcccgacattcgctgggcgatgctgatcggtgccctggtcggtgtcgttctcgggatcctcgaggggctcgcctcggtggcccgtctgcgttggctgcctagctccgccgcgttgggcctggccttcatcattcccgcctcgatttcactgatgatggccttcggctcgctgctggcgtgggcgttcgcggcgcgctggggcagtctcgccgagcggttcgtgatcgtcgcggcagccgggctggtcgctggtgagagcatggccggcgtcggcatttcgctttggcagctgttgcgctgagacggagcgcccgccactgcgcaagttgccgcacaaaacaaggcgacgagcggtcttttccggtaatgggcgacgaacggtttcccgtaccgcgcggcctggcccggagctttgcgcccccttggcaatattttgtcgtgcgttcagtgcaaccccagcgcgtggcggatgccccaatagaggtaacccacggaaacaggagtacacacatgcaaatgacgaaattggctgccttgactctggccggtctgatgtccacgggtgttttcgccgcgggtaccaccagcaccgacagcgccaccagcggagaaaccaaacaagagtcgatggacggaaaaaccaccgacgacaccaatcgctcggggctgaccactggcgcgggcaccaccaccggtagcggcgagcccgcaggcccgggcaccgggaccggcaccagcgtcggcaataccaccgggacgggtaacagtgcaaccggagcgggcacaggatctggaaccggtaccggcagcagcggtggctctggcggcagcaactgatcgggccgcagccagacccaagccccggcctctcgccggggcttctacatgtgacagcactgtcgcctggagtctcgccagggtttgcgtaccgcggctgagctgtccttcgaggagcaggccatggactcacgccttttgtttttcatcgcaagcctggcgctggcaggctcagccagcgcgaccggtaccgggccgaccctgccggaaaaaagccgagagcatccgctggacaatcgcgagccgcgccatgaggtgatcgaccggcaggacgagcgccagcctcgtccgcccacgctcgaggcaccgccggaagtggcgccgcaggatccggtcgagcgcggtcttcctgcggcccagccggagcgccgcgacagtgacgcgcacaccgacaatacgccagccagctgaaatctaccgccaatgaaaaagggaggcctgagcctcccttcatacccgctgcgcggcgatttagaacagtacgcggctgcggatggtgccgttgacctgctgcagtttttccagcgccaggtccgagtattccttgtccacgtcgatgaccacgtagccgaccttgtcgttggtctgcaggaactggccgcagatgttgatgccgttgtcggcgaacaccttgttgatctcgctcatcacgcccgggatgttctcgtggatgtgcagcaggcggtgctttcccgggtgagacggcagcgcgacttcggggaagttgaccgaggacaccgaggtgccgttgtcgctgtacttgaccagcttctcggccacttccagaccgatgttggcctgcgcttcggcagtcgagccaccgatgtgcggtgtcaggatcacgcgatccaggccgcgcagcgggctttcgaattcctcatcgttggactttggctcgaccgggaacacgtcgatggcggcaccgatcaggtgctcatccttgatcgcttcggccagatggtccagttcgaccactgtgccgcgggcggcgttgatcaggatgccgcccttcttcatggcgcggatttccttctcgccgatcatccactgggtagacggcagttccggtacgtgcagggagacgatgtcgcacatgcccaacagttcgtacagcgagccgatctgcgtcgcgttgcccagcggcagcttggtcaccacgtcgtagaaatagacctgcatgcccaggctttcggcgagtaccgacagctgagtgccgatcgagccgtaaccgatgatgccgagcttcttgccgcgaatctcgaacgagttcgccgcggacttgatccagccaccgcgatggcaggacgcgtttttctccgggataccgcgcagcagcaggatggcttcggccaacaccagttcggcgaccgaacgggtgttggagtagggcgcgttgaacaccgcgatgcccagttcgcgggcggcgttgaggtcgacctggttggtgccgatgcagaagcagccgacggcgatcagtttgttcgcggcttcgaagacttccttggtgagctgtgtgcgcgaacggatgccgatgaagtggacatcggcaatcttctccttcagttccgcatcggtcagcgcagtcttgaggtactcgatattggagtagcctgcggccttgagggtgtcgaccgcgttctggtgaacgccttcgagaagaaggaacttgatcttgctcttgtcgagagaggtctggctcatctgcattaaaaccttaaggccgaagggaaggacaaagtgtccagcgaaggctggccagcccggtagcaccggtgccgggagtctgccgtggcacgtttcaaaggggtgcgtatgctagcatacgggccccccgaaacactccctgtcctgagctgaagcgtactcagggtgaccatgaatcgaatgagagttccgatgatgaccgattctgtcctgatcgacgagctgaaggccctggtcgagcccggcaaggtactgaccgatgccgattcactgaatacctatggcaaggactggaccaagcattacgcgccggctcccacagccatcgtgttcccgaaaaccgcagagcaggtgcaggccatcgtgcgctgggccaacgagcgcagggtcgcgctggtgccgtcaggcggtcgcaccgggctgtctgcggcggccgtagcggcgaacggggaggtggtcgtctccttcgactacatgaatcagatcgtctcgttcgacgaaatggatcgcaccgttgtctgccagccgggcgtgatcaccgcccagctgcagcagtttgccgaggacaagggactctactatccggtggatttcgcctcggccggttccagccagatcggcggcaacatcggcaccaatgccggcgggatcaaggtgattcgctacggcatgacccgcaactgggtagcgggtctgaaggtggtcaccggcaagggcgacctgctcgagttgaacaaggacctgatcaagaacgccacaggctatgacttgcgccagctgttcatcggcgccgagggtacgctgggcttcgtcgtcgaggcgaccatgcgcctggagcgccagcccaccaacctcaccgcgatggtgctgggcacgccggatttcgattcgatcatgccggtactgcatgccttccaggacaaactggacctgaccgccttcgaattcttctccgacaaatgcctggacaagatcctcggccgcggcgacatcccggcgcccttcgagacccgcacgccgttctatgcgctgctcgaattcgaagcgaccaccgaggagcgcgccgagcaggcgctggcgaccttcgaacgttgcgtcaacgaaggctgggtggtcgacggcgtgatgagccagagcgagcaacaactgcagaacctctggaagctgcgtgagtacatctccgagaccatctcgcactggacgccctacaagaatgacatctcggtcactgtttccaaggtgccagccttcctcgccgatatcgacgcgatcgttacgcgtaactatccggatttcgaggtgctctggtacggacatatcggcgatggcaacctgcacctgaatatcctcaagcccgaggcgctgtccaaggatgcgttcttcgacaagtgcgccgcagtcaacaagtgggtattcgaaacggtcgagcgatacaacggctcgatttccgccgagcatggcgtcggtatgaccaagcgcgattacctgacctatagccgttcagaggccgagattgcctacatgaaggcgatcaaggcggccttcgaccccaacggcatcatgaacccgggcaagattttcgcctgacgcctgcgcttgccccttgtcgccagcttgccgctccactgaggatttcgcatgaactacaagcaccagtacaccgacggcacgacgattcattacccgttgggcaaggtggtctgcatcggtcgcaactacgccgagcatgccaaggagttgaacaatccggtgccgaccgagccgctgctgttcatcaaggccggcagctgcacggtgccgctggaaggtggattcggcattcctaccgaccgtggcgccgtgcactacgaggcggaaatcgccgtactgatcggcaagccgctgtcgcgcaaaccgaacgaagaggaggtgcgcgacgccatctccggcttcgctccagcgttggacctgaccctgcgcgacgtgcaggccaagctgaaggaaaagggccacccctgggaaatcgccaagagtttcgacggtgcctgcgtgctggcgccgttcgtgccgggtgacgcggtgcaggatctggccgatatcggcatccgcctgaccatcaacggtgaagtgcgccaggacggcaacagcagccagatgctcaacgccatcctgccgctgctgcagcacatcgccgggcatttcaatctccagcccggcgacgtggtactgaccggcacgcccgctggcgtcggcccgctgaatcagggcgaccagctggtgctcgagctggtcgggctgtcccgtttcgagagccgggtgctctgaccgcctcgcgaccgagcgcctcgcgcgccggtcgccgtatccctgccgctcccgaccgtgctgtaatcgagcccctgttgccaagaagccagcaatgactgcgattccagcccggccgtcgcgcctgcgtcgctgcctctacctcttattgttcatcaccgtctgtgcggccttgctgaccggctggctgctgcattggaacgaccagctcggcctctactggcaagagcagtcggtggatgccgaacaacgcgcggccagcgtctggctgcccgactacgaactggtgctggaaacgaccctggtgggtctggaagaagaccagacctcggggctgacctggaatccggcgaccggcaccctgttcaccgtgaccgggcgaaatccgcagctgatcgagttctctccgggaggtgtggtgctgcggcgtatccagctgaccggcttctccgaccccgaagcggtcgaggcgctggatgacggccgcatgggcatcgtcgacgagcggcggcggctggtcgcggtgttccggttgcctcccggtgttgaaagtgtggatctcgcgcagatgtccagctatgacctgggcttcgaagaagccggcaacaaaggtttcgagggcctggcctggaatccgcgcacccggcgcctgttgctggccaaggagcgcgatccgcagggcctgttcgagctgtcgataccggacgatggcggcctggccggtgcgctcgatgcattgcccgagcaaccgctactggtgcgtgacatctcgtcggtgaccatcgatccgcgcaccggtcatacgctgatgctgtccgacgagtcgcgactgctggtcgagctcgatctgcagggtcggccgcgcagtttcatccggctgctcggcgggctcaatgggctcatcgatggtatcgatcaggccgagggcgtcgccatggatgagcgcggcaatatctatgtcgtcggcgagccgaatcgattctacgttttcagccggcgacggtgataccgagcgcgcagcgtggtcatagcgcagcggttgcggctcgtcggttaagtttcggctaagcgaagcggcggacaatcgcgcttcctttccgatagacgagtggctccatgcgtcgtggtttaaaagtacttctggttgccctgatcggcctcgccctgctactggccatcgccgccggccagcactacaagctgttcgagcgtgcctggttcaaccttacccagtggtaccaaggcgacacccgccgggccgcttcgttgtggctgcccgactaccatgcggttgtccaggctcgccaggtggagggcctcaacgatgacctgtcggcgcttaccttcgaccccgaccgccgtagcctgatcgcaatcactaacggctccccgcagctgctcgaactcagcctcgaaggcaaactgctgcgttcgattgcgctggtggggttcggtgacccggaagccatcgagtacatctctcgcggtgtctacgtgatcagtgacgagcggctgcagcgcctgttgcgtgtggaagtcggcgaacacaccgagcggatcgacgcggcagccagccagcagctctcgctgggcctcggacagaacggcaacaagggattcgagcgactggcctatgatgccgccggtaaacggctattcgtcgccaaggaacgcgaccccgtgcgcatctacgaggtgcagggctttcccttcgccgataacggccagccgttggccgtacacgtcagcgacgacctcgagcgcgacgccggtctgttcgtacgggacctgtccagcctgcaattcgacgcgcggaccggtcacctgctagcgctatcggacgagtcgcgtctggtcgtcgagctcgatacccgcggcgaacccatcagcacgctgtcgctgcgagcgggccggcatggcctggacagcgacgtgccgcaggccgaaggtgtcgccctggggccggacggcaccctgtacctggtgagcgagccgaatctgttctacgtgttccgcaaggacgattagctcgtcccgttgcggctcactcaggcttcagcgtctgcaccccgtctggcgttccgagcagcagaatgtcggccgggcgcgcggcgaacaggccgttggtaaccacgccgacgatgttgttgatctgcgcctcgacctcgggagcgaagccgatcatcaggttatgcacgtcgaggatgatattgccgttgtcggtcaccacgccttcgcgatagaccggatcaccgcccagcttgaccagttcgcggccgacatggctgcgtgccatgggaatgacctccaccggcagcgggaaggtaccgagccggtccaccagcttgctggcatcggcaatgcagatgaacgtcttggccacggccgcgacgatcttctcgcgggtcagagccgcgccgccgcccttgatcagttccagatggcggttggtttcgtcggccccgtcgacgtagaactcaagctctgcaaccgagttgaggtcatacaccgggatgccgtggcccttgaggcgttcggcggtggcatcggagctggccacggcaccgtcgaaggcgcccttgtgcttggccagcagatcgatgaagaagttggcggtggagccggtgccgacgccgacgatgctgcggtcgttgagctgcggaacgatgaggtcgacggccgcctgggcgacggcctgcttgagttgatcctgggtcatggcgtaaggctccgcgcgagaggaaacgaggggcgaaagtatagcggggccgcaccggtgggtctgtacgcgatgcggaaacgccgtttgccgttctgattgtcggtggtcggcggctggttcgcggggtagactcgtgggccccgcaacgcccgccaagatagcccacgatgctcgaaaactacgtcaagaagatcctcacctcgcgcgtctatgacgtcgccgtcgaaacccccttgcagcccgccaggcagctttccgagcggctgggcaaccagattctgctcaagcgcgaggatctgcagccggttttctccttcaagattcgcggtgcctacaacaagctggcgcagctgacccccgaggaactggcgcgcggcgtggtaacggcttcggctggcaaccatgcgcagggcctggcactggcggcccgggagctgggcatcaaggcgactatcgtgatgccgcgtaccacgccggagctgaaggttcagggcgtgcgcgcccgcggcggcaaggtagtgctgcagggcgacgccttccccgaggcgctggcctattcgctgaagctggtcgaggagaagggctacgtctatatccatccctatgacgatccgcacgtgatcgccgggcagggcacggtagccatggagatcctgcgccagcaccagggccggctcgatgcggtgttcgtgccggtgggcggcggcgggctgatcgcgggcgtggccgcgtacatcaagtacctgcggccagaggtcaaggtcatcggcgtcgagccggacgactccaactgcctgcaacaggccatggcggcgggtgagcgtgtggtgttgccgcaggtggggctgttcgccgacggcgtggcggtggcgcagatcggccagcacacgttcgacatctgccggcaccatgtcgatgaggtgatcaccgtcagcactgacgagatctgtgcggcgatcaaggacatctacgacgacacccgctcgatcaccgagccggccggcgccctggccgtggccgggatcaagcgctacgtcgagcgcgacggcgtccagaatcaggtgctggtcggcatcgactcgggtgccaacgtcaatttcgatcggctgcgtcatgtggccgaacgcgccgagctgggcgagaagcgcgaggcgatcatcgccgtgaccatcccggaagagccgggcagcttcaaggccttctgcgaggccatcggcaagcgccagatcaccgagttcaactaccgctaccaccaggatcgcgaggcgcacattttcgtcggcgtgcagacccatccggaaaacgatccgcgcgcggcattggtcgaagggctgcgggccaagggcttcccggtgctcgacctcaccgacaacgagctggccaagctgcacacccggcacatggtcggcgggcatgcatccggcgtcagcgatgaggtggtctatcgcttcgagtttcccgagcggcccggtgcgctgttcaacttcctcaacaacctgggcgggcgctggaatatctcgatgttccattaccgcaaccacggcgccgcggacgggcgagtggtcgccggcctacaagtgccagccgaggagcgccatctgctaccggcggcgctggacaagatcggctatcgctactgggacgaaacggacaatcccgcctatcaactgtttctcggctgaatgccgtaccgcgaggatcgatggaacattatcagttgctgaacatcacccacgccgccctggcgattctgctgaccctggggctgatcgcgcacatcgccatgctgtggaaggcctggcgcaaggccgacccggcggtgctgcagcggaagctgcggcgtacccggctgatgtcgctgccgctgctcgccgtgctgggattactgctgccggtcactggcggctggatggcacatctggccggcttgccgctcggccagctgtggctgctggccagctcgatcctgtttctggtgctggtgccgctcacgctgctgctcggcggccggctacgcgcctggcagcaactgggcgagcgtccggcgccggttgcgctgccgcgtctggcgctggtttatgccgggctgatcctgctgattctcgtggccatcatgggcctgatgggcgccaagccggcctgaccggcccgatgcgcccggtcactctgccagtcacgccgcctctggcattctccaacgctgccaccaatacacggcgagcccagccagcagcaggctgccgcctgtgtagagccagccaaagccgccagtcaggctgaacagggcgtacgccaggagcgggccgcccgcggcgccgaggtcctggccgatggaatagcgggtcatgaagcgcaccgcgtcgaggcggccggcggtttccgccgccagggcatcgccaagggtggtcagcgccgtcgcggccagcaaggccagcagagccaagagcagccatagggacagcggcaggctcagcgccagaggcgcgaagctggccgcccccagcagcagggcagcggccagtgacggcagacgccgctgcggcccatccgaccaatgtcccacccgccttgccagccagggttcccaggcccagcgcagcgcttgcaggatgccggcggccgcggtggcgctgagcagcaggccgaacagctccagttcgacgcccagataatggccgatcagggcgctcagtgtggaggcgaagaccccctgcaccagcagcgcgatcaccagcccggtgagcatcaccggccagcggcgcgcctggctgacgacgggatcaagcgccgtgcgcgttcgagggcgggcctcggccgctgcgggcaggtggaaaccgaacagcagcagcggcagcccgatcagcgagagcaggccgaaggcccaagccagtgccggcagcccggtataggccaccagcaaaccgccgagcagcatgccgaacaggctgcccaggcgatacaggccgttgtacagcccgatcgcgtgaccctggccgtcgggttcggcgcagcgcaccacggcggtcagcccgccgatgcgaaacagcgaccaggccacgccccagagcgcacgcaacagcagccaggcgacgaaaccctgggcccagccgtaaccgcaggtgctgatcgcgccgagcagcacggccagcaacaggccggtacgcaacgagatgcgctggtagagcaggccgatcagcgggttgaccggcagccggaccaggcgattggccgccagtagcgcgccgacctgccacaacgagtccagccctgcttcttgccagtgcaggggcagagcgatgtaaagcatggagtcgcccagcaggctcagggcggtggccagcgataccatcaccaccggccgcatgccgggcttttttctgtcatccctgctcacatggcctcccggatcagcgcaggctgatgatctcccagccacgctgttcggcgatggcgcgcagggtcgggtccggatcgactgccaccggatggctgacacgctcgagcagcggcagatcgttgcgtgagtcgctgtagaagtaggcgtcgtccaggctctggtcgttttcctgcagccagcgctcgatccgcgtgaccttgccttcctgaaaacagggcacatcggtcagccgcccggtgtagcggccgtcctgcatctcgcattcggtggccagcagggtatcgacgcccagccgcttggcgatcggtccggtgatgaagcgattggtggcggtgatgatcaccacccggtcgcccgcttcatggtgctggcgcaccaacgcctcgcccttcgccagaacgataggctcgatatggtcgcgcatgaactcggcgtgccattgctgtagctggctcatgtcgctgcggccaagcagctcctggcagaagttctggtactgcaacacgtccagttcgcccgccaggtaatcctgatagaaggcatcgttgcgggcgcgataggcgtcggcatcgaccagcccgcgctggcaaaggaattcgccccaggcatggtcgctgtcgccggccaatagggtgttatcgagatcgaatagagccaggcgcacgctgcgttcctcgggcgatgaaaggagggcgaagcatagcgggattgcccgctgcctggcaccctcgcgccgtatggcaacgggttgggccgggttgatcaatggccgttcagcgtgctttctgcttttcgtctttttgtggaacaatgccgcgacatgcgtttgcgaggttgtatgccgtgatcgactccgatggttttcgccccaatgtcggcatcatcctgaccaatgacgccggccaggtgctctgggcccggcggatcaaccaggatgcctggcagtttccgcaaggcggaatcaatccgcgcgagacacccgaagaggcgctttaccgcgagctcaacgaagaagtgggccttgagcagcaggatgtgaaaatcctcgcctgcacccggggctggttgcgctatcgtctgccgcaacgtctggtgcgaactcatagtcagccgctgtgcatcgggcagaagcagaagtggttcctgctgcgcctgaccggcgccgaggatcgggtgcgcatggatctgaccggcaagcccgagttcgacggctggcgctgggtcagctactggtacccgctggggcaggtcgtcaccttcaagcgcgaggtttatcgtcgcgccttaaaagaactcgccccgcgcctgttggcgcgggactgacgggagaaagcccctgagcatgctcggcacgctgcgcaagattgtccaggaagtcaacgctgccaaggacctcaaggcggccttgggcatcattgtgctgagagttcgggaggccatggccagccatgtctgctcggtctacctgctcgatccggagtctggtcgattcgtcctgatggccaccgaaggtctgaacaagaaggccatcggcaaagtcagcatggcgcccaacgagggcctggtcggcctggtcggtacacgcgaggagccactcaacctcgagcacgcttccgaacacccgcgctatcgctattttgctgaaaccggcgaggagcgcttcgcgtccttcctcggcgcgccgatcatccaccatcggcgggtgatgggcgttctggtcatccagcagagagagcagcgcctgttcgacgagggcgaagaagccttcctcgtgaccatgagcgcgcagctcgccggggtcatcgcccacgccgaggctacgggttcgatccgcgggttgggccggcagggcaagggcattcaggaaacccgtttcatcggcattcccggtgcgcccggtgcggcggtgggtacggcggtggtggtgctgccgccggcggaccttgatgtcgtgccggacaagacgatcaacgacattcccgccgaactcgagcttttcgagtccgcgctcgaggctgtccgcgccgacatgcgtgcgctgtcggagaagctggccacgcagatgcgcaaggaagagcgcgcgctgttcgacgtctacctgatgatgctcgacgactccgccctcggtggcgaggtcaccaaggttatccgcaccggccagtgggcgcagggcgcgttgcgccaggtcgtcagcgaccacgtcgggcgcttcgagatgatggacgacgcctacctgcgcgagcgcgcctcggacgtcaaggacatcggccggcgcctgctcggctatctgcaacaagcccgccagcagaccctgacttatccggacaacaccatcctggtcagcgaggagctgtcgccgtcgatgctcggcgaagtgccggaaggcaaactggcgggcatggtttcggtactcggctcgagtaactcgcacgtggcgatcctcgcccgcgccatgggcattcccacggtaatgggggcggtggacctgccgtattcgaaagtcgacggcatcgagctgatcatcgacggcacccgcggagagatcatcactaatccggccaaggtgctgcgcgagcaatacctggtcctggccgagcaggagcgccagctttccgcaggcctggacatcctccgtgagttgccctgcgaaaccaccgacggcgtgcgcataccgctgtgggtcaataccgggctgctcgccgatgtggtgcgcgcccaggagcgtggcgccgaaggggtgggcctgtaccgcaccgaagtgcccttcatgatcaaggagcgcttccccagcgagaaggagcagatggcgatctatcgcgaacaactgcaggccttccatccgctgccggtgaccatgcgcagcctggatatcggcggcgacaagagcctgccgtacttcccgatcaaggaagagaatcccttcctcggctggcgcggtatccgcgtgactctggaccacccggagatcttcctgctgcaaacccgcgccatgctcaaggccagcgcaggactgaacaacctgcgcatcctgctgccgatgatttccggcacccgtgagctggaagaggcgctgcacctgattcaccgcgcctggggcgaggtgcgcgacgagggcaccgacgtcgaaatgccgccggtgggggtgatgatcgaagtcccggcagcggtctacctgacccgcgagctggcacgccaggtcgacttcatctcggtcggctccaacgacctgacccagtatttgctggcggtcgatcgcaacaacccgcgggtcgccgatctctacgactacctgcatccggcggtactcgaggccctgcaacgcatcgttcgcgaggcacatgacgagggcaaaccggtgagcatctgcggcgaaatggccggcgacccgggggcggcgatcctgctgctggccatgggcttcgacagcctgtcgatgaacgccaccaacctgccgaaagtgaagtggatgctgcgccagatcagcgcggcgatggccagcgagttgctgaccaaggtgatggtcatggacagcccgcaggtgattcacgccaccgtacagctgacgctgcgcaacctcggtctggaccgcatggtcaatccgtcggcggcgctctaagcgcgtccgcctggccgcacggcggcagatcgatccggctgtcgcccagcggaccggttggcccgaaacggcgctcggtgatctgcgtcgcaccattggcatggcggatcaggacggtgcaggcgcgggtaccgtagtcggtgccggcgatgaatacgctggacaatcgcttttcccattcatacggcacgccagtgcagggcagctcttcatcggcggccagttgcggatcgcttagcaagcgcaacagcatctcggcctgcggctcctcgatctgcttctcgatacagtcccgtagtgcctggcgagcgcgcaagagcttcggccatggcgtgtccagcgctgcgttggacacgccgtagatccctgcaggcagctgttccggcgtgccccgctgtgaattgagataccacaggtgatgctcgtctccgaccagcagattgaatcccgagtaatgctcgaggtggcccgacaattcggtcaggtacgcctggggcgataactccccgcgcaaatagcgctccggcagttcaccccgggaacgcgttccgagcggggcgcctggtgcacgaatgttggtcagcgcggcgaaacggccgccagcgccgatcccgagccaggtgccgccggcctgcaggtcgcgcccggcaatgacggtgggcgccgcttcccaagcggccaacggcaggctgggccgtgcgtggaattcgtcacggttggcggcgacgatcagcggcaacgcatgcccggggcgccaggcgaagacgatcagacacataggaaagccgaagaagacgcaggaagctggaggctagacgaaaagccggccggcattccagtccatcgatgccggagcggctcgaaacgctttttgccaagcctccggcttcagccttcagcccgcttttccgctaccatgcggctttgcttttcagggtgtcccgatggagttcgtgctttacctgctgctgggcggctgtgctggtgtgctggcgggattgttcggagtcggcggcgggatgatcatcgtcccggtgctggtcttcagttttaccctgcaagggttcgatccgttggtgctgacccatatggcggtcggcacctcgctggcgacgatcatgttcacctcgttgaattcgatccggacacatcacctcaagggcgctgtgctgtggccggtggtgctgtggatgaccatcggcatcctgctcggcgcggcgctgggcagcgtgaccgccgcggccatccaggggccgatgctgcagaagatcatcggcgtgttcgccatcgccatggcgatccagatggccttctcgttgcagcccaaggccagccgcggcgtacccggcaaaccgggcctgacgctggcgggcgtggtggtcggctgggcttcggcgatcttcggcatcggcggcggatcactcacggtgccctttctcagttggcgcagcgtacccattcaacgggcggtcgcgacctccgccgcctgtgggttgcccatcgccatcgtcggcgcattgagtttcgccgtggtcggctggcaggatgcgcacctgcctgagtggagcctgggtttcgtttatctgccggcagtgctgggcatcgccatcaccagcgtatttttcgcccgtgtcggcgccaacttggcgcatcggctgccggcgctggtgttgcggcggctgttcgcactgctgctgctggccgttggtatcaatttcttgatctgaggaaaaccggatgctgccttatccgcagatagaccctgtggccgtttcgctaggcccattgcaaattcattggtacgggctgatgtatctcatcggcatcggtggggcctggctgttggcgtcccgccggctgcaccgcttcgaccccagctgggacaaggacaaactctccgacctggtgttctgggtcgccatgggcgtgattgtcgggggccggctgggctacgtgctgttctacgatctgccgtcctacctcaacgatccgacattgatcttccaggtctggaagggtggcatgtcgttccatggcggcttgatcggcgtgctgctgtgcacctggatcttcgcccggcgcaacggcaagaaattcttcgagctgatggacttcatcgcacccttcgtgcccatcgggctgggtgccgggcgcatcggcaatttcatcaatgccgaactctggggcaaggcaagcgatgtgccctgggcgatggtctttccgaccgacccgcagcaattggcgcggcatccctcgcagctctatcaattcgccctggaaggcgtggcattgttcgtcatcctctggatttactccagcaagccgcgcccgaccatggcggtgtccggtctgttcgccgtctgctacgggatcttccgcttcatcgtcgaattcgtgcgagtgcccgacgctcaactcggctacctggcgtttggctggttgaccatggggcagctgctctgcgtacccatggtgctgatcggcctcggcatgatcgtctggggctaccgccacgagccggccaaggcgccggcctgatcgcagccgtccggctggtcgccaagtgcgcgacaagccggacgctgccttttactatgtcctgcttccttgtcaccgcgcctcggcgcccgcttcgagcccatcgatgaaacagtatctcgacctgatgcgccatgtgcgcgagaacggcaccttcaagagcgaccgcaccggtaccggcacctacagcgtcttcggctaccagatgcgcttcgacctggccgacggctttccgctggtgaccaccaagaagtgccacctcaaatccatcattcacgagctgctgtggttccttcagggtgataccaatatcaaatacctgcaggaaaacggcgtgcggatctgggacgagtgggccgacgaaaacggcgagctcggcccggtctacggctaccaatggcgcaactggccggcccccaacggcgagtcggtggaccagatcgccaagctggtggagatgatcaagaccaagccggactcgcgtcggctgatcgtctcggcctggaacccggcgctggtcgaccagatggcgttgccgccgtgccatgcgctgtttcagttctacgtcgccgagggcaagctcagctgccagttgtaccagcgctcggcggacatcttcctcggcgtgcccttcaacatcgccagctatgcgctgctgaccctgatggtcgcgcaggtctgcgatctgcaaccgggtgacttcatttggagcggcggcgactgccacctgtacgccaaccacctggagcaggccgatctgcagctgacccgcgagccgctgccgttgccgacgatgaagctcaacccggcggtgaaggacctgttcgccttccgcttcgaggacttcgagctggtggggtacgaagcgcacccgcacatcaaggcgcctgtcgccgtgtaagccgccggtgccgcccggttgggagcggcgccgaagtggtcactggtcgcccagataacgtgcctgcaacgtttgccaggaagcgccattggtaacgtccagaatcgcttggctcaacggctcccgatacgcgctgcccgaggacacggcaaacgcgtaggactggttctcgaaggtgccgggcagcagccgtaacgcttcgccccggcgctcggtgttgcgatatcgaagtatcggctcgtcgtacaccaccgcctctgcctttccatcgatgaccgcttgaatcgcctgggtaaggtccggataggcggtggcgcgtacacggttatcgtgcagatagccggcgctgacggtcccgtccacggtcgcgacgtgggcgctgcgcagatcatccggaccctgcagtccgcttttcaggctgccaacggtcaaggtgctggttacggcggcggtaaaggtcgacaccatgatcaacgcggcgaacatccagacgattgcgatcaggcggcctcccagcgtgacgggcgccttgtcgccatatccaaccgtggtcatggtcactgccgcccaccagaaactgtgaccgagcccctccaccgcactgcccccgaattgctcgcggttgcgcctgtgctcgaatagccagagcagtgccccgaccaaaagcagcaaggcacccaagcccagcaccaggctcgcgaactgccaggaaaacagcgcacggagcgcggcccagcctccgcccgcctgtgcctgcgggacaccgattgcgagtcccgtgcgatagaaaggatgggtgaagtccaccagcgcttcacgctcggcggtcatggtcaaggcgccgaccaccacgtccagctgatggttttgcaagcctggaagcaactgatcgaagggcagcgcttccaactcgtagcgataccccgttcgttgggcgatcgactcccaaagctcgatgctgatgccgctccagctgccgtccggctcctgaatgacgaagggaggcacttcggtaacgcccacccttaataaatcgtcctgcgcttgggcgtttgcttgctggctcaggacggcgaacagcatcgcgatcagtagtctaggcacctgtcttcctcgttggacttgtcgccccaagggtagcaaagcgggtgacgaggctctggacgcaggcgttttcgagcaaagtagcctgaatgacatccgtgttgtatagactcgggtgaaacgtgatcagaggacgacgcatgcgacgggttgtattcaatcagaagggcggtgttggcaagtcgagcattgcttgcaatctggccgcggtcagcgcaacgcaaggctatcgcaccctgctgatcgatctggatgcgcaggccaattccagccattacctgtcgggcctgaccggagatgcggtgcccacgggtatcgccgactacttcaagcaggtgttggcgggtggcgcggccggcaagaaggcacgaccgccgatcaccgaaacgcccttcgaaaacctgcacctgatcaccgcaacggctgaactggccgatctgcaacccaagctcgaagccaagcacaagatcaacaagctgcgaaagctgctggaaagcctttccgaagagtacgagcggatctacctggacacgccgcctgcgctgaatttctttaccgtctcggcgttgattggagccgatcggtgcctgattccgtttgactgcgacagcttttcgcgtcaggcgctgtacagcctgctcgatgaaatcgaagagttacaggaagaccacaacgaggggctcgaagtcgaaggcatcgtggtcaaccagttccagccgcgcgcagcgctgccgcagcagatcatcgacgagctgctggccgaggggttacctgtattgccggtgcacctgatgagctcggtgcggatgcgcgagtcgcaccaggtctgcacgccgctgatccacttcgacccgcggcacaagctgacccagcagttcgtcgagctgcacgagtacctcgagcgccaggcctgaggtcacgcgtcgcgcgagcgttcgatcttgcggcccaggcgtgaggcgtagagttcgccgatgatgccgcggcggaagatcagcacgcagaccatgaagatgatcccggtcaccagggtgaccggcagctccgacgtcgcgaagtagttgcccagcgtggtcaccagcgcggcaccaaacaccgggcctaccaacgtgccgatgccgccgagcagcgtcatcagcaccacctcgccggacatctgccagctgacgtcggtgagggtggcgaactggaacaccagggctttcagcccgcccgccaggccggccagggccgccgacatgacgaaggcccccagcttgtagcgcgacaccgtgtagccgagggaaatcgcccggctttcgttttcccgaatcgacttgaggatcatcccgaagggcgagttgatgattcgccagatcgccagcatgccgagcaggaacacggtcaacacgaagaaatacatgttcagcggctctttcaggtcgatcaggccgaacaggtggccgcgcggaatgccctggatgccgtcctcaccgtgggtaaaaggcgcctgcaggcaaaagaagaagaacatctgcgacagtgccagggtgatcatcgtcgaatagatgccttgcctgcggatcgccaggaagccgatcaccagccccagcaaagcggcgccgacaacgccaaccagaacgcccaactccggcgtcagcccccattccttcacggcatgagcggtgaagtaggcggcgccgccgaagaacgccgcgtggccgaacgagaggatgccggtgtagcccaacagcaggttgaaggcgcaggcgaagagcgcgaagcacatcaccttcatcaggaacaccgggtagaaatgcagcggggccaggaccaggccgacgatgccgatgaggatcaggatcgtctccggattccaggcctttcgctttgctgcgtgggttacggtcgtttgctgcatatcagccatcccttcccatcaagcccgcagggcgcacgagcagcacgatcgccatgaccacgaagatcacgatattggacgcctcggggtagaacaccttggtcaggccttcgagaatccccagcatatagccggtgatgaccgcgccgaggatcgaccccatgccaccgaccaccaccacggcgaacacgacgatgatcaggttcgagcccatcagcggactgacctgatagatcggcgccgcgagaatcccggccagccctgccaggccggcgcccagtccgtaggtgaaggtcagcagcaggggcacgttgatgccgaaggtgcgcaccagcgtgggattctcggtggcggcccgcaggtaggagccgagtttggtcttctcgatcagcagccaggtgctcaggcagatcagcaacgacgccagcacgacccaggcgcggtacttgggcaggaacatgaagcccaggttgtagccgcccgacagcaggctcggcaccgcataaggctggccggatgaaccgtagtagtagcggaaggcgccttccagcgcgagggccaagccgaaggtgaacagcaggccatagaggtgatcgaggttgtacagctttgacagcgccagccgttccaccgccgcgccgaccaggccgacgatcagcggtgccaggatcagtgccggccagtagccgatgcccagcacattcagcagcaggtaaccggcaaaggcacccatcatgtactgcgcgccatgggcgaagttgatcaccttgatcaggccgaaaataatcgccaggcccaggctgagcatggcgtagaaggagccgttgatcaggccgatcaacaactggccgagaaaggcctggatgggtacaccgaagatcgccgtcatcagacccccagagtttcgttgagtatggtcatgcgatcctgcagctcgctgacatggaagctgtcgacgatttgcccatgatcgaccaggtagaagcggtcggcgaccttgctggcgaagcggaaattctgctcgaccagcaggatagtcatgccgcgctgcttgagtgtcagcagcacgtccccgatgcgctggacgatcaccggcgccaggccctcggtgggctcgtcgagcagcagcagcttcgcgccggtgcgcaggatgcgtgcgatcgccagcatctgctgctcaccgccggacagcttggtaccagggctgttgcgacgctccttgaggttggggaacagttcgtagatctcgctggcggacatgccgcccttggcgatgatcggcggcaggttgaggttctcatccaccgtcagggtggcgaagatgccgcgttcctccggtacgaagcccatgccggtgtgggcggcgcgatgcagcgggatgcgcatcatgtcgtgcccgtcgaagtgaatggtgccggtccgtttgcggatgatgcccatgatcgagcgcagcgccgtggtcttgcccacgccattgcggccgagcagggtcacggtctcgccctgatggacgtccaggtcgatgccgtgcagggcatggctttcgccataccaggcgttcagttcgcgaacgctcaacaaggggggcgcgtcattcatcttcggtccccatataggcttcgcgcacgcgcgcatcctggctcacgcttcggtaatcgccggaagtgaggatttccccgcgttgcaggacggtgacctgatgacacagatcggcaacgactttcaggttgtgctcgaccatcagcaccgcgcgatcacgggcgacctcgcggatcagatcggacacgatgtgcacgtcttcgtggcccatgccggccatcggctcgtcgagcagcagcaccctgggctccaacgccagcgtggtggcgatttccagcacccgcttgcgcccgtaggacaggtccgctgccgggctgttgcaggcatcctgcaggccgaccgactcgatcagggccatggcgcggtcgttcagtcggttcagcgcgcgcagcggcaaccagaactgggtcgccaggccgccgggccgctgcagcgccacgcggacgttctccagcacgctcaggtgcggaaacacggcggagatctggaaggaacgcaccagccccatacgggccaccttggccgggtcggtacgggtgatgtcgtgatcgagcaggcggatggtgccgctcgagggttgcaggaacttggtcaggaggttgaacaccgtggtcttgccggcgccgttggggccgatcaacgcatggacccgggcgtggtgcacgtccaggtctacgttgttcaccgccacgaaaccgccgaaatcgcggcgcaatccgcgcgccgagagcacgacgcgcggctgttcgtcagtgcccggggacgtcgcggcgtccccggcgatgctgctactgctggtcgccatgcttattgcttggccaggtcgcagccgctttcggctggcttgatgtaggcctcgtcgcctggcaccgtggcgaggaccttgtagtagtcccagggctgcttgctttcgtcgggcttcttcacctccatcaggtacacgtcgctgatcaggcggccgttggcgccaaccttgccgttgcgggcgaagaggtcgttcaccggcatctcgtgcatggctttggcgaccgcttcggtttcatcggtgccgaccttgtcgatcgccttgaggtactgcatcacgccggagtaagtccccgcgtggatcatgttcggcatccgcccggtgcgttcgaagaagcgcttgccgaattcacgcgattgatcgtcacggtcccagtagaagctttccgtgagggtcagcccctgtgcggcttctaggccgagcccgtggacttccgacagggtgaagagcagcgctgccaggcgctgaccgctggcgacgatgccgaattccgcggcctgcttgatggcattggcggtatccagcccggcgttggccaggccgatgacctgggcaccggacgactgtgcctgtagcaggaaagacgagtagtcgttggtcgccagcggatgccgcacggcgcccttgatctcaccgcccttggctttgacgaactcgctggtctgttcttccagcgagtaaccgaaggcgtagtcggcggtgaggaagtaccagctcttgccaccctgggacaccagtgcgccgccggtacccaccgccaatgcgtgggtgtcataggcccagtggaagccatagggcgagcactgcttgccggtcagttcaaccgttgccgcgccggttaccaggtcgatcttcttcttttccttggagatcccttgcaccgcgagcgccacggaagaggtggtcagctccatgatcgagtcgacttgctcgcggtcgtaccactgacgggcgatgttggaggcgatatcaggtttgttctggtgatcggcggtgacgatttcgatcggcgcgccgtgcacctttccgccgaaatcctcggcggccattttcgccgcttcataggaccacttgccgccgaagtcggcgtagacgccggattggtcgttgagaatgccgattttcaccttgccatcggatatttctgcagctgtcgcggggatcgcggcggccgcgctcaatgttgccgttgcaattgccagaagcttcatcatcgcctatctccttgcaggggttgaccgcttacaggacggcccttggggctgccacgacgggacggtgtgcggggtagcgatcggcaggcgggcctgccgaccatcacggcggtcgagcgccgaccagcgctgcacaggcaagccgatgcaggcaaggacgtgtcgatcgcaaaaggttggggccgacgcagcgacgggtgtcgcagcagatggaggcgcctggcggcatgccgaggcaatgggagttcgatcagcacgggttgggtcattcggcctggcatacgacgcttctaattattgttgtcagcactaaacgtagcaggggatcggccagacgcaactgcgcaagacggtgcaaaccggccgggttggcaggccctctcgacgcaacctgcgggcttgacgctgccgttaaggtcaagcgttggccaaaggatttcgataccgttgccgataggggggaaaggcccgtcgtaaggtcgcgccagcttggccgttgcggcggcattcgagggtccagtcgagcgaccagataccctgctgatcggctgtgcttttttcgatcggccgctgccgctatgctggcgaccattcaagcaggagcgattgatgagcaaggtcagtgtgctggtggtggatgacgcgccttttatccgggatctggtcaagaaagggttgcgcagccacttccccggcatccgcatcgaggatgccgtgaacggtcgcaaggcccagcagatgctcgatcgcgatagcttcgatctgattctctgcgactgggaaatgccggagatgtccgggctcgagttgctgacctggtgtcgcgcacatgacaggctcaagaccacgccgttcatcatggtcaccagccgtggcgacaaagaaaacgtggtgcaggcgatccagtccggcgtgtccgatttcatcggcaagccgttctccaacgaacagctgaccaccaaggtgcgcaaggcgctgggccgcgccggcaagctcgatgcgctggccgccagcgcgccggttcggccgaccaacaccgggatggccaatgactcgctggccgcgcttaccggcggcaagggcgaggtgatcaagcccccatcggcggcgtcgccggcacccggaatcgccgcgccgctggtgaacccgggcgccgccaaaccgaccgcagccagcggtggccgcggccagggccagctgcgcctggcgagcgggacgcttccctgcgtgatcaaggcgctgagcctcaaggaaggtttgctggtgatcaaacgcggcgagagcctgccacaggtactggaaagcgcggtgctcgatctggagcagggggagggcggcgaggtggcccgtctgaacggttacctgcatgcggttgcggcgttggagccgaagccggacagcgaatggctgcagttgaccttccgtttcgtcgaccgtgatccgcagaaactcgactatctgtcgcggttgatcgcccgcggcaccgcgcagcggcatttcgtacccggcgcttagccggctcggtaacgccattcaggcggatggcacgacgggccgttcgtccgaaaagaaagcgcatcggggaacaatttcacagcccgacagtcggtggctcgcgcatgccccgttgcgctgctagtctgcagcgctctgaatacataaccacatgaagtctgccgttatgttggggcgcatcattctgggtctcgggttgtgctggctggcctcgtccgcctcggccctgaccatctacaaatacaccgacgccaacggcgtggtcacctacagcgaccaggccgcgccgggcgcgcgcgtgttcaccttcagcgatcggatggtcgagaagctcgacactcaggtgaagctcgaaacgcgcaagcatgccggcggcgaaaccctcgtggtgcgcaacgatctgttcgccccggtcgatgtggaactcaagctgaccggtgtgcagaacgccgtcggcgcgccggacaagccgatccgctgggtcctgccgccgcgcagccagatccgcctggcgacgctggccccgctggacccgagcaaaccgctgaagtacacccccaagctacgccacgccctcggcgatccgcgcctgctgcccaaaccctaccgatacccgctgccctggcgcggcggcccgttccgcctgacccagggtgccaacggcaagtacagccatttcaccccgaaaggccgttacgcggcggatatcgccatgcccgaaggcacgccgatcatcgcggcgcgcggcggcatggtcgtgaagatcgagaatgcccagagcgggcggggcaacaacccggccggcaatttcgtccgcgtgctgcacgacgacggcaccatgggcgtctacctgcacctgatgcagggctcggtcaaggttcgagaagggcagcgcatcgagaccggcacccagctggcccgttcgggcaacaccggcaacagtaccggcccgcacctgcacttcgtggtccagcgcaacgtcggcctggcggtcgaatcgatccccttcgacttcgcccagccggttaacagcctgcccaatttcgcggtcggcggcgactgagcggagcttgcgggtgttgaacgtcttgctgcgaggcgctgatagccgtcctggccagcagcgctagttcattcacatatcgacacggcactcgttgccatagcggcactgcgctcagtgactaaggccgatgctctgcagggcggggcgatgacgccacaacaacagcgccagggtcacggcatacagcccgatcaccaccaggcccacccactggatctcgaagggggtgaacttgaacagcaacaccaggctgatcagcagaccgacattcaaggcgatgaaacgtggccgtccgagtttctcgacactgatgccgaggttatcggtgtacaggcgcaccagcgagtcaaccgagttgatgacgaagatcaccccgacgccaagcatggcgagcttcgcgaattgaccgacttcgatgctcagcgtgaagtagccatagagcacggagaaccagatcgccagggggatggacgggatcaccagcaacgccagcagcagttgccaggtgcgcaggccaccgacgaagcgcgagacgaactggccgatcatcacgctccaggcgaaccaccagaacagatagaaggcgtggtagtcacccagcggcaggatgaagccgggcagttcggcgaagtagccggtgccgatcttcgtcgccgcctcgccgaagaacgccaggccgagatccgccgcccaccacatgccgacaatcagtgcgaagaacagccaggtcgaaccgacgctgagcagcttcaggtagcggatgtcggtgctcgaatagaccgctgccagaacgatcgccgctaccaccaggtagtttaggctgtcgccgagctcgggcgcgtaccaggcaatgttgaccaggaacaggtaggcggtgaaggcgcaggtggtgacgatcaccaggttgtttacgagcttcactggccgcagctcgaacagcttgacccgcggctcgaccacgcagaagtagaaggtggtgatgaaatagaaggcccagatcaggaagccccagaagccgaactccaccgccagggggttggagaatcgatagatggtttcttcggcgtaagtgggaaattcggtcagtgggaagatgatcaggcccatgtccaggccggacgtgaacaagatggcaagaaaggtgaacaggcccactggttccgttccggtacagcgcaggttgccccagcgcatcaggatcagcaaggtggtcgcgagcaggacaataatcgcgcccgataaaatcatattcataggggctccctcgcgccgctccggttcgtcggctgcgccgggactccgggatcggcgggtattgtatttattggatggcgccgtgtttttggccttcggagtgacgtcggggctgtgtaggcagctgaaggccgaggaccatcctggcgcgctgagccggatgccgcttatctggatgcgtcctcgaaaatcctgtgaccggcctccagggctaggccggcattcggcggctgccgcgttacccttgcccgcgaaatcggcaggatgcctggccgtcaggggctgctagcgaccgtttagccacgctgggactgtctggcgcgcgctgttgcggccaatgaagggatgagcgaaggggcgttcgcgtgggtgaatgccgtgaactggctgtgttcagcggtggccatggcctagagcaaccgcatccagccgtctgcgactacgcgcagcggcgcaaggagggccgctcgaagaagttacacggagggctcaggccggcgaccccagactatagcggcacggcctcatgatccaggcgcagcaccttggccagcacgatcttcggcccgcgcattttcttgatgacgatctgcaggtcgtcgaccagtaatacttcgttttcttcggggacacgtttcaggctttcatagaccaggcctgccagggtatcggcctcgatgtgatcgaggtccacgctcagcaggcgttcgaccttgtacagcggggtgtcgccgcggaccagcagcttgcccggctgataggcgaggatgccgcgttcggtcttgcggtgctcgtcctggatatcgccgaccagcacttcgagcacgtcctccatggtcaggaagcccaccaccttgtggtcgccttcttcgaccagcacgaaatgcgcgccgccctggcgcagctgctcgagcagcgtgctcagcggcagatgccgggacacccgatccagtggtcgcagtagcgcggcgaggtcgaaatgctgcgcgaggttttcgtcgccagccaatgccagcagcaggtccttgatgtgcagcagtccgatgtagtcgccctgttcgctgtcgtacaccgggtagcggctgtacttgtggcggcggatcaggtcgaggatctccgccagcgaggcgtcgtggtccagctgcagcagatcttcgcgtgagttggcccagtcggccacttccagttcactcatctcgaccgcggacgccagcaccttgatgtcctggttggccgggtccagcgcgcggttcgaatgcaggatcagcttcagttcgtcgcggctgtagtggtgctcgtggtgtgctcccggttcgccctggccggcgacgcggaggatcgcgttggcgctggcattgagcaggtagatggccggatacattgcccagtagaacaggtacagcggcacggccgtccacagcgacagcagctcgggcttgcggatcgcccaggacttgggcgcgagctcgccgaccacgatatgcaggtaggaaatgatgaagaacgcggtgaagaaggcgatgccatgcaccaccgcaggcgactcgacgccgacggcggccagcagcggttcgagcagatgggcgaaggccggctcgccgacccagcccaggcccagcgacgccagtgtgatacccaactggcaggcggacaggtaggcatccagctggttgtgcacccggcgcaggatatgtccgcgccagccatgctccttggcaatggcctcgaccttggtcgagcgcagcttgaccatggcgaactcggcggcaacgaagaagccgttgagcaggaccaggaacagcgcaaagaggatcagaccgaagtcggcgaaatacgaagaggcggcgtagctcggggataaagcaggggaagggtccattgaggtatcgggtagtcgatgaggccccaaggatggggccgctcgggggttatttcaaggcgtcaccagggcgccgggcgccgagtggtcgtggccggtcatttcacggtcgcctgcgacagcgggaagtggcaggtgaaggtgctgcccttgccgggcgtgctgtagacgtcgagacggccttcatggcgcagcagcacgtgcttgacgatggccaggcccaggccggtgccgccggtgttgctggcgcggctggagtcgacccggtagaagcgctcggtcaggcgcggcaagtgtttggattcgatgccgatccccgagtcctgcaccgcaagatgagcgccgtgctcgttgcaccaccagcggatctgcacctcgccattgtccggggtgtatttcacggcattgaacacgaggttggaaaaggcgctgcgcagctcgctctcgctacccttgagaagcagcgtcggatcggcttcgacgatgatccggtggttgcgctcggcggatagcgcctgggcgtcgctcttgatcgattgcagcagggcggcgacgttgaccggcagggtgttggtcggcggactggtggcttcgagtttcgccagcagcaacagatcgttgagcagatgctgcatgcgcccggcctgctggttcatctggtgcagtgcccgcggccagcgcggcggcatctgctcggtgtgctcgatcatggtttccaggtagccggcgatcaccgtcagcggcgtgcgcagctcatgcgagacgttggcgacgaaatccttgcgcatctgttccagctggtgcagccgggtgatatcgcgtaccaccatcaggtgctcgctgttgccgtagcgggtgatggtgacctgtagccagaggcggtcgttgaccggcgaggacagctccagcggttcgtcgtggcggccgttgtcgaaatattccttgaagctgggatggcgcaccaggttggtgaccggatggccggtgtcctgtggcttcttcaggccgagcagacgttctgcggcggggttccaccattccaggttaccgtcgctgtcgagcatcaccaccgcgtccttcagtgccgtggtcgagccctggacgcgatcgatcaccgactgcaactggccgcgctgacggatatcgcgacgctgcatctgatagaggttgtcgaagatttcgccccaggggccgtggccgtccggtggtggctcgtccggctggctgcgcttgagccagcgctgcaggcggcgcatctgttggaggatccaggccaggtagccggccaggcccgcagccaaggcccagccgtactggccggagatcagtccgaccagcaggcagccggccaacaacagcagcagctggcgcaccagagcgccttgccagtcttggttcaccgcttgtgctcctcttggcagcctgggctggccggttcaatgctcggcgacgctggctgaagttcgtccctgaacggtcgcggcgtgtgccggccgggtgcggtttcgtcagctcttggtggaaaaacgatagccagtgccacgtacggtctgcaccaggttctcataggtctcgcccaacgccttgcgcaggcggcggatgtgtacgtccacggtgcgttcctcgacgtagacattgccgccccagacctgatcgagcaactggccgcgggtgtaggcgcgctcctgatgggtcatgaagaactgcaaaaggcgatactcggtcgggcccatgtcggccggggtgccgtcgatggtgacgcgatggctgatgggatcgagcagcaggccaccgatctcgatcggcgtttcgttgtcgctgggtgcggcgcgtcggagcacggccttgagccgcgccaccagttcacgcggcgaaaagggtttggtgatgtagtcgtcggcgcccacttccaggccctggatcttgttgtcctcggcatccttggcggtgagcatgatgatcggcgtattggccgtcatctcgtcgcgcttgaggcgccgggccagctcgatgccggaggtgccaggcagcatccagtcgagcagaatcaggtcgggttgacggtcgacgatcagcgcgtgggcctgctgggtattttccgcttcgaggcattcgtagccagccatctccagcgccacgacgatcatctcgcgaatcggcgcttcgtcatcgacgatcagtatgcatttgccgttcatgtccgctctcggtccgtttcttgtcgctcggcattagataacggaaatgttgcagggatgttacatggagcggctttaggctacaggccacaggcggcaggtaaaagcgcgtaagttcgtttcggcgccgccgcgcacactggtcagcctgaagcctgaagcctgaagcctgaagcctgaagcctgaagcctcaagccgccttcatcgcgtaatccataacgatccccgcgagaatcgccagcccggcccagtggttatgcaagaaggccttgaagcagatctgcggcttgcgcgagcgggttttccagaattcccaggcgaagcacgcggcggcgatggtcaggccgaggtggaaccattgccccagctcgaagcgcacgccagccagaatcaggcagaacagggcgaggccctggagcgtggcgatgatcacccgatcggcttcgccgaacagaatggcggtggatttgatgccgatcttcaggtcgtcttcgcggtcggccatcgcgtagtaggtgtcgtagcccacggtccagacgacgttggcgatgaacagtagccaggcttcgggaggcagctcgccgcgctcggcggtgaaggccatcgggatgccccaggagaaggccgcgccgagcaccacctgcgggtaataggtgtagcgcttcatgaaggggtacagcgcggcgacacctagtgcgccgaatgacagccagatggtcgcggcgttggtcagcagcaccaggccgaaactgagggcgacgaggatggcgaagagaatccaggcttccttcggcgtgaccttgccggtagccaatgggcggcccttggtgcggctgacatggccgtcgaagttgcggtcggcgaagtcgttgatcacgcaaccggcggcgcgcatgaggaccacgccgagcacgaaaatcagcacatttttaacgctgggcgagccctcgccggcaatccacagcgcccagagcgtcggccacagcagcagataggtgccgatcgggcgatccaggcgcatcagctggatgaagtcccaggcgcgcgggtggaggcgattgctcgattgcagaagcttctggtacacggcggtctccggtcgtgagggcggttgggcagtttgtgccgggttcaggtcgcgatccgtgcggctcgccacagcgctggcaggaagacctcggcgaccagtacgcgcaggtcgccctggctgaaacaggaacgacgagcccaaaggtcggcctgtcgtgcctgctgcggcagccagtcggccgggtaacggcgtgcttccagcgggccacgggcgaaagccggattgctgaacagcagctcgcccagcgaacggctgcccaggtgcggcaggtccagtccagactcttcgagcacgcagcgcgcagcgacgctgcgcgcgaatacccagggttgctcgtggccgcgaagatagacctcgcgcacccagccctcgctgccattggccacgccgagcgccgcgcattcgtcgtcgcgcagcgcctgccatccttccaccagcggcgtgacgctgaacgcgccttctgccaattgggtgaggcgacgggtgagcgagccccggtcgacatagagccagtcgtgaaggtcggcagggagcggggcgggcaggcggtcggcgggcagccaggtgtggaaatcggacacgagcggtttcgggcagtgaaaagaagcggcgagtctagcatgaggggtaacgacagcctgaagccggaagagtagccgagcccaggacggcgggcggcccatgcatccgccttgccgccgctgcgtttcgttggcgcgcctgctcgcgaatggctattgcgagtgatcccttgagcaggcgaaccacgcctcctgctccgattaggcggctctcggcgcagtggttacgtccaaccctccagtcgcatggtcgcgcgcactaggcgctgctcttcctgctcgatttccttgaggttgtcgcgaatgctgtggatgtgatcgcgcgccgcgcgctgggcctggtccggcagtcgttcggtgatggcgtggaacagccgcgagtgctgtcggtcgatctgccgtttttgcatcggtcggtgataaaggttgttcaccgaggcaaacacagtggacagcatcaggtcggtcagcgactgcagcgtgtgcaccagcaccgggttgtgcgacgcctcgctgacagccaggtggaaggcatgatcgaggcgcgcatgctcgcgcgggtcggcggcttctgcagtatgcgcagcgagcatttcctcgtagcggcggcgcagcaggatgaagtcggcatcggtgccgcgcagtgccgccaggcgtgccgattcaccctccagcagggcgcgtacttcgagcaggtcatagagtgtgcgcggctgcgaattgaacaggtgcatcagcgggctggcgtcgtgttggccggacagctgtgcgacatgcgagccgcggccctgggcggtttcgatgatgccgcgaccgcgcagcacgcgcagaccttcgcgaagggccgagcgcgagatgccgagcttttcgcacaggcgccgctccgacggcagcgcctgaccgaccttgagcacgccgtcgacgatcagccgctcgatacgctcggccaccacatcggcgagctggcgccgttcccctgaattttcaagcagcatacaggcctccttcactggtaggaccagtttgagcgcagtctaccggatctgcgagcaacacgcgccaagtcccgatatccgctggtttggctgctcttgcctgaaaggttgccgaaagaaactggtaggaccagtggttttccagatggacgattcaaagccgcagggctaatgatgcgtcaaaccaccgcagctggccgtgcgcggtgaacgcaaagaagagccccgactgccatgaatatcctctacgacgaacgcgtcgacggtgagctgcccaaggttgacaaggcggcgctgctggccgagctgcaggcgcaactgcccggcatggacatcctccaccgcggcgaagacctcaagccctacgagtgcgacgggctgtccgcctaccgcaccacgccgatgctggtggtgctgcccgagcgcgtcgagcaggtcgaaaccctgctgaaaatcgcccacaaacgtggcgtgccagtggtggcgcgtggcgccggcaccgggctgtccggcggtgcgctgccgttggagcagggcatcctgctggtgatggcgcgtttcaacaagattctcgaagtcgacccggccggtcgcttcgcccgggttcagcccggcgtgcgcaacctggcgatctcccaggcggcggcgccttatgatctgtactacgcgcccgacccgtcctcgcagatcgcctgctccatcggcggcaacgtcgccgaaaacgccggcggcgtgcattgcctgaaatacggcctgaccgtgcacaacctgctcaaggtggaaatcctcaccgtcgaaggcgagcgcatggtgctcggcgccgatgcgctggactcgcccggcttcgacctgctggcgctgttcaccggttccgaaggcatgctcggcatcgtcaccgaggtcacggtcaagctgctgcccaagccgcaggtggccaaagtgctgctggccgccttcgactcggtggaaaaggccggtcgtgcggtgggcgacatcatcgccgcgggcatcattcccggcgggctggagatgatggacaacctgtcgatccgagccgccgaagacttcattcacgccggctatccggtggatgccgaggcgattctgctctgcgaactggatggcgtcgaagccgacgtggtcgacgattgcgcccgtgtcagtgaggtcctgaagctggccggtgccaccgaggtgcgtcaggccagggatgaagccgagcgcgtcaagttctgggccggtcgcaagaatgcatttccggcagtcgggcgaatctcgccggactactactgcatggacggcaccatcccgcgccgcgagctgccgggtgtgctcaagggcatcagcgacctttccgacgagtacggtcttcgcgtggccaacgtattccatgccggcgacggcaacatgcacccgctgatcctgttcgatgccaacaccgagggcgagctggagcgcgccgaggcgctgggcggcaagattctcgagctgtgcgtgaaggtgggtggctcgatcaccggcgagcacggcgtcgggcgcgaaaagatcaaccagatgtgctcgcagttcaacgctgacgaactgacgctgttccatgccgtgaaagccgcattcgaccccagcggcctgctcaaccccggcaagaacatcccgacactgcatcgctgcgccgaattcggcggcatgcacgtccacggcgggcagttgcccttccctgaactggagcgcttctgatgacggtctccttcgacgacagccagcagctgctcgaccaggtcaaccaggcgttggccagcaacaccccgctgcgtatccacggtggcggcagcaaggcgttcctcggtcgtgaagtccggggcacaccgctggacacacgggcacatcgcggcatcgtgacctacgacccgaccgaactggtgatcagcgttcgcgccggcacgccgctggccgaactggaagccgcgctcgacgaggccaatcagatgctgccttgcgaaccaccgcacctgggcgagggcgccaccgtgggcggaatgatcgccaccggcctgtccggcccgcgtaggccctggtccggttcggtgcgcgatttcgtgctcggttctcgtgtgattactggccacggcaagcacctgcgtttcggtggcgaggtgatgaagaacgtggcgggttacgacctgtcgcgcctgatggccggcagctttggttgcctgggcctgctcaccgaggtttcgctcaaggtgctgcccaagccgcgcctgtcgcgcagtctgcgcgtcgagatgccggtcgagcacgcgctgctcaagctggccgaatggggccagcagccggtgccgatcaccgcggcgagccatgacgggcaggcgctgcacttgcggctggagggcggcgaaggttcggtcaacgccgcctgcgatcgcattggcggtcaggatctggacgcagcctactggagcgatttgcgcgaacagcgcctgggctttttcaacgatgcacgcccgctgtggcgcctgtcgctgcccaccgatactccggtgctggccctgcctggcgaacaactggtcgactgggccggcgcccagcgttggctgaaatccgatgccgacgcgcagaccatccgcagcatcgtcagcgaagtgggcggtcatgccacttgtttcaccgccggtgccacggccagcccgttccagccgctggccgagccgttgctgcgctatcaccgccagctgaaaacggcgctcgacccgcaggggatattcaaccctggccgcctgtattccgaggtctgatatgcaaacgaatttgagtgaggccgctaagaaactgccacgtgccgaggaagccgaaagcattctgcgctcctgcgtgcattgcggcttctgcaacgccacctgcccgacctatcagctgctcggcgacgagctggacggcccgcgtgggcgcatctacctgatgaagcagatgttcgagggtggcgaagtcaccgaggccacccagacccacctggaccgctgcctcacctgccgcaactgcgaaaccacctgcccctccggcgtgcagtaccacaacctgctggatatcggccgcgacttcatggaacagcaggtgccgcgctcggcgggcgaacgcctgctgcgcaccggtctgcgcaccgtgattccgcgccctgggctgttcaagagcctgctcagcaccggcaacatgctgcgtccgctgatgccggcgacgctcaaggcgcacatgccgcgccaggttaccccggccaaaccgcggccgcagaccgtgcatgcgcgtcgcgtgctgatgctcgagggctgcgttcagccgagcctgtcgcccaacaccaatgctgctacggcgcgcgtactcgatcgcctcggcatcagcgtgatgaccgcgcgtgaagccggctgctgcggcgcggtggactatcacctcaatgcccagcaagccggcctcgatcgcgcccgtcgcaatatcgacgcctggtggccggctatcgaaggcggtgccgaagccatcgtccagaccgccagcggttgcggtgccttcatcaaggattacggccacctgctgcgcgacgatccggcctacgcgaccaaggccgcgcgggtcagcgagctggccaaggacctggttgaagtgatgcgcagtgccgagctagagcggctgaaggtcgagacggacaagcgcatggcttttcattgtccctgcacgttgcagcacgcacagaagctcggcggcgcggtcgaagacgtgctcacccggctcggcttccacctcaccgcagtgccggatgcgcatctgtgttgcggttcggcaggcagctattcgatcacccagccggaaatttcccatcagctgcgcgacaacaagctcaatgcgctggaaagcggcaaaccggaagtcatcgtcaccgccaacatcggttgccagacgcacctcgacggcgccgggcggaccccggtacggcactggatcgagatcgtcgaggaggcgatgcagtaaacccaaccccaaacgcgccgtgacgcacatcgaatcgacaggagagaacatgaaaaccaaagccatgctgacccagaccgaagtgaccgccatcctggccgccgcgcgcagcgaagcgcagaacaacggctgggccgtgaccatcgtggtcgctgacgacggcggccatccgctggcgctggaacgtctggacggctgtgcgccgatcgcctcctacatcgccaccgaaaaggcgcgcagcgccgcggtgggtcgtcgcgaaaccaagggctacgaggacatggtcaacggcgggcgcaacgcgttcctgtccgccccggtggtctgctcgctggaaggcggcgtgccggtgatcgtcgatggcaacgtgatcggttcggtcggcgtctccggcgtgaccgcggctcaggatgcgcaggtcgccaaggccggcgtagccgctatcggttaaacgcacgagaacagcgctggaggctggaaggcgggacgagaggtagcggcctacaccgcaaccgttccggccacggcgagcgataggcagccacccgcgggtggctgaacaacgaacaagagaggtgttgtcatgagcgaacgcgtaaccctgggccgcctgcacgttgcggccaacctgcaacgtttcatcgaggacgaagtcctgccgggcaccggcgtcgaggcggcggccttctggatgggcttcgatgagctggtccacgacctggcgccgaagaaccgcgccctgctggccgagcgcgaccgtctgcaggtcgaactggacaactggcaccgcagccatcccggtccgatcaccgacatgccggcctaccgcagctttctggaatcgatcggctacctgcagcccgagccgggcgaggtgaagatcagcaccagcaacgtcgacagcgagatcgccacccaggccggtccgcagctggtggtgccgatcggtaacgcgcgctacgcgctgaacgccgccaatgcccgctggggctcgctgtatgacgcgctctacggcaccgatgcgatcagcgaagagaacggcgcgcagaagggcccgggttacaacgaagtgcgcggcgccaaggtcatcgccttcgcgcgcaacttcctcgatcaggccgcgccactggccgacggcagccacgtcgactcggtcagctaccgtgtgcaggacggcgtgctcaaggtcacccttgagaacggcagcgtcaccgggctgaagcagcctgaaaagttcgtgggctatcagggcgaggccgttgagccgacggcgatcctgctgaagaacaacggcctgcacgtcgagatccagatcgatccgaacagccccatcggccagaccgatgctgccggcgtcaaggatctgctggtcgaagctgcggtcaccaccatcatggactgcgaggactccaccgccgcggtcgacgccgacgacaaggtgctggtctaccgcaactggctgggcctgatgaagggcgatctggtcgaagacctggagaagggtggcaagcgcatcacccgccgcctcaacgccgatcgcgaatacaccgccgcggacggctcgaatctgaagctgcatggccgttcgctgctgttcatccgcaacgtcggccatctgatgaccaacccggcgatcatcgacggcgaaggccatgagattcccgaaggcatcatggacggcgtggtgaccagcctgatcgccctgcatgaccagcagcgcaagggcaattcgcgcaccggctcgatgtacatcgtcaagccgaagatgcatggcccggccgaagtggccttcaccgacgagctgttcggtcgtgtcgaagacctgatcggcctgccgcgctacaccctcaaggtcggcatcatggacgaggagcgccgcaccagcgtcaacctcaaggcctgcatcgccgccgcgaagaaccgcgtggccttcatcaacaccggcttcctcgaccgcaccggcgatgagatgcacagcatcatggaagccggcgccgtgctgcgtaagggcgacatgaagggcaccgcctggatccaggcctacgagcgcaacaacgtgctggtcggcctgaactgcggcctgcgtggcaaggcgcagatcggcaagggcatgtgggccatgcctgacctgatggccgccatgctcgagcagaagatcgcccatcccaaggccggcgccaacaccgcctgggtgccgtcgccgaccggtgccacgctgcacgcgctgcactaccaccaggttgatgtgcaggccgtccaggccgagctggagaagatcgatctggccgccgagcgtgacaagctgaccaacgatctgctgaccatcccggtcgcgccggagcgcaactggtcggccgaggaaatccagcaggagctggacaacaactgccagggcatcctcggctacgtggtgcgttgggtcgagcagggcgtcggttgctccaaggtgccggatatccacgatgtcggcctgatggaagaccgcgccacgctgcgcatctccagccagcacctggccaactggctgcgtcacggcgtggtcgacgaggcacaggttcgtgagacgctcgagcgcatggccaaggtggtcgaccagcagaacgccggtgatccggcctaccgccctatggccgacaactacacgggctcggcggccttccaggcggcctgcgatctggtgttcaaggggcgcgagcagccgagcggttacaccgagccgctgctgcacgcctggcgccagcgcttcaagcagcaggtcggttgagcgaaatcagcaagacagtcggcggtcagcatgggctgatcgccggcgcgaattgacgagccccgggcgcctctggcgttcggggctttcgagcaagaggggccggccaacgtgacccgttggtcagtctttcggactgaggtgattcgttcatttcagccatgcgtgggaccgggatttcccggatagatgtggttcacaacaaaaaacaaggaacccaacaatgagtcagacactgctgtccatactggccttcgtgccgctggtgctggcgggggtactgctgatcggctttcgctggccggccaagtacgcaatgccgctggttttcgtgcttaccgcattgattggcctgctggcctgggacatgaccttcaaccgggtcctggcttccacgctgcaaggcctgattctcaccgccgcgatcctctggatcatcttcggcgccatcctgctgctgaacaccctcaagcactccggaggcatcgcctcgattcgtcgcggcttctccaatgtcagcccggacaagcgcgtccaggtgctgatcgtggcctggctgttcggctgcttcatcgaaggtgcttcgggcttcggtacgccggctgcagtggcggcgccgctgctcgtcgcgctgggcttcccggccctgacggcggtcgtgctgggcatgatggtgcagtcgacgccggtgtccttcggtgcggtgggtacgccgattctggtgggcgtcgccggcggtctggatcaggcgacgctgggtggccaactggcaacggtgggcagcaactgggagaccttcttccatctgatcttctcccgcgtggcgatcatccatgcgctgtgcggcatcctcatgccgctgatcatgatctgcatcatgacgcgcttcttcggccgcaaccgctcctggaacgaaggcctggcgatggcgccgttcgccatcttcaccggactggcgttcgtcattccgtacgcggcggcgggtgtcttcctcggtccggaattcccgtcgatgatcggcgcgctggtcggcctggccatcgtggtgccagcggccaaggcgggcttcctgctgcccaaatcgagctgggacttcgccccggccagtgaatggccggtggagtggatgggcaagatcgagatgaagatcgacgacgtcgcaggacgcacgccgatctccgtgccgatggcctgggcaccttacctgctgctggcggtgttcctggtgatgtcgcgggtgttcccgcagctcaaggccgcgctgatgtcggtcagcttcggctggaaggacatcctcggtgaaaccggcgtatccggtaccctcgagccgctgtacctgccgggcgggattctctgcatggtggtgctggtgaccttcttcctgcatcggatgaaggccgccgagcttggcgcggcgatttccgagtcgagcaagacgctgctgggcgccggcttcgtgctgatcttcaccatcccgatggtgcggatcctgatcaactccggcgtcaacggctcggatctggtgtccatgccggtggccatggcacagctggtggccgacagcgtaggcggcgtgtatccgttcttctcgcctgcggtcggcgcgctgggcgctttcattgccggctccaacaccgtatccaacctgatgctctcgcagttccagtacaacaccgccagcctgctgggcatttccggcgcgctgatggtggcgctgcagtcggtgggcgcggcggcgggcaacatgatcgccattcacaacgtggtggcggcctcggccacggtcggcctgctcggtcgcgaaggcatcacgctgcgcaagaccatgctgccgacgctttactacctcgtgctggctggctcgcttggcctgatcggcttctacgtgatgggtatcagcgatccgctggtgggtattgcgaccgcccgctaaggcggcgtgatcagggacgggcggcttaggccgcccgtttttttgtccggtgaatctttccccggcttgcggtctatcaccggctcacgggtgtttggcggttcgccgcgttctggtatagcgtgcagcgcaaccgagactgatcgaggtgaataatgaaaaagtggcaatgcgtggtgtgcggattcatctatgacgaagccgagggctggccggacgacggcatcgctccgggcaccgcctgggaagacgtgccggaagactggctctgccccgactgcggcgtcggcaagatggacttcgaaatgatcgcgattggctgatatgaacgactcgaaccataaaggcgcgccactggtcatcatcggcaccgggctggcgggctacaacctggcccgggagtttcgcaagctcgacagcgagacgccgctgttgctgatcaccgcggacgacggccgctcctactccaagccaatgctctcgaccggcttcgccatgaacaaggatgccgatgccctcggcatgaccgtcgcagggccgatggcgattcaactcaacgccgagatccgcacccatacccgggtgacccggctggagccggagaagcagcggatctggatcggcaacgagcccgtgccctaccgcgacctggtgatcgcctggggcgcgcagacgatcaacgtgccggtcgccggtgatgcgcaggatgcaatcttcccgatcaacgacctgctcgattacggccgtttccgcgaggcggcccagggcaagcgtcgcgtgctgatcctcggtgccgggttgatcggctgcgaattcgccaatgacctgctgcacggcggctatgaggtcgagctggtggcgccttgcgagcagatcatgccgtcgctgctgccggtcgagccggctgcggcggtgcagcgcgggctggaatcgctgggcgcgcgctttcatctggggccggtgcttgagcgtctcgagcggcgcggcgacgcgttgcaggcgcagctgtccgacggccagcgaatcgaatgcgatctggtggtcagcgccgtgggcctgcggccgcgcaccgaactggccgaggcggccggattgcgggttaaccgcggcatcgaggtcgatcgtctgctgcaggcttcggtcgagcacatctatgcactgggcgactgcgcggaagtcgaagggctcaacctgctctatgtgatgccgctaatgagcggtgtgcgtgcgctggccaagaccctcgccggccagcctacgccagtgacctacgggcccatgccgatcaccgtgaaaaccccggtctgcccgctggtggtatcgccgccagcggcgggcagcgagggccgctggagcgtggaaggtgagggcaacgatctgaaggcattgtgccgcgctgccgatggcagcctgttgggctacgccctgaccggaacggccgtgcaagagcggctggcgctgaataaacagctgccgccggtgttggcggaactgcctcaagttctgtcgctaaagtctccagaatgagtcggtaaagcgctggcgggggctggcgcgagtgctagcagcgtgccatgctccctgtggcgctaccgcagtgtagagctgttgtagcgcgtcggaacgctgttcggagaacagcgaatcacaaaaacaataaagtcttagaggctacccatgcgcaaaccggaactcgcagccgccatcgccgataaggccgatctcaccaaggatcaggccaaccgtgtactcaacgccgtactggacgaaatcaccaacgcgctcaaccgcaaggacagcgtgactctggtcggtttcggcacctttatccagcgacaccgtggcgctcgcactggcaagaatccgcagacaggcgaacccgtcactatcaaggccagcaacaccgtggcattcaagccgggaaagatgctgaaagacgcgatcaactgaattcgcgttgcccggggccgcccaggctccgggtcagcctgactgtatagtcccctccagacccgcctgttctcctgctcccatcgctcaaaccagccgtttacaatgccgctttccgtcaacggtcggctaattcatgaaattccgctttctcctctggatgctcggccgcctgatggccaaggccagccgcaacaatcctgacttccagaagcagctcggcgataaagccctgacctttcagctgcataccctcgacggcaaggtcgcgcgacactacgtggtcaaggatcagcgcgtcactagccatggcggcgccgctgccgaaccggccttcgccatcggcttcaaggacagcgcctacggcttcgccaccatgaatgcgaagaacaagcagctggcctttatgcagggcatccagaacgaggacatccagattcagggcaaccccgcgctggtgatgtggttccagggcctgacgaagtacctgaagccgcggaagaagaagcccgaggcggcttgattcgctggctcgtcgcagcgatgaactagatcggtccgcctcaccagcttccgtatggaatgccgtatttggcgatatagcggtgggttttctcattgattgtgtaagcgtagcgcccgttggtcttaccttgggacgggcctaagggctccacttctgctttagcacgagcgaccttcaccgcgtcaccacaactatccacgacccagacttggacgacccctcccggcgctaaaccaaagtacatcgaagccatatagcgtgctgtccgctcaggcgtctctgggcagcgacgctgcacagaggcaagcatgagttctcgagcctgctccggaatatcgacccacgtccaataggtttgtggctcgactatcgactgccagcgaacatatatacgtttcggtaggtccgccccaacgacgcctcgggtattgctgccaactccactcacccaacctttggccgtttcggttgcgtaacccgggtttccgttaccaatgacgccaccgccgccgtgatcaatcagccgtccgttgatgtcctggacgacgctggattcaacccagccggtcatatagttgggcccgataaattcgagactccaccagcgcgctttagggtctttcgcaactgacagggggtcgtgagcctggcaaccgcagagaacgagcattgccaacagcgagaagaatgacttggtcacagaagagtccagtccggtacgtgtggatgggcgacgctaccggaccattcgccatcggcttcaaagacagcgcctagggcttcgccaccatgaaccctcaccagctgccgtagggaataccgtacttgtcaatatagcgttttgatgcatcgggttggggatagtaattaccctgcgatttccccagatgcggccccagcggttccacctcgcccttgccgcgagcgatcttgatcgcgttttggcattggtcacggacccaggcttgtaccgtgccgcctggcgccagccctaggtagaccgcagccatatagcgggctgagcgccctgtatcagcgcagcgtcgccgagtagaggcgtacatgatttttctggcttcttcgggaatatctatccaggcgcggtaggtttgcggctctaccgcggactgccagcgcacgaaaattcgcttgggtagatcggcgccaaccaccgcgcgaggaccgcctgccaacccctgcggccaaccccgagcgaactccgtttcatagccaggatcttcactgccgataactccaccgcttccgtgattgatgaggcgaccctgaatatcttccaccagactcgcctcaacccagcccgtcatataggtcggcccgacgaactccagggtccaccagggatactttcgatcgttctcaccggaaagcggatctgcagactggcagccacctagaaacaaagcgcccagcagggcaataaaaggctttatcacaataaggtccagtcaggtacgtgggggtgttgccggcggattccgtcggggctaggagcgttgatgtacacaagatccaaaccgttcgcagatcgctttttaagcgggttgttccagtgtgcggatatatggatatagcggcgccttagcagttcgtcctcagcgagcgtggttttgtagttgcctgctgcaaatcgattgcaaagaggctgcagctccacggggatggcgtagttaggatcatgttcgtcaatctcatcgaaacgcacgcccttccgttttgccagctcgtacataacgcgcaaatacacccgcgatagttccccgctcacgcggcgcttaagctgcagtccggcgaacacccgctgctgccgaggggccagacgatcatgtgaatcggcgggtaacagttcgggttccggcgtgacgatctccagcattgctgtaggccagccgtcggcaaccaagcgctctttggcttgcacggcgtcccggtagatggaagtcatcttcacgtcaatgcccacgctcaccgtcagcgcctgcatagggctgaccagcacgcactcttcggcttcgttcagatacccaccaccaatgtcggagtgcgcgccaggcagggtgatttcagtgtgatctggcttcactcggcacaggggaaagtttgcccggacttcgtcacgagccgccagttgaactacttcggtgaaatatttgcgaggcaagtgcagctttaaccagggtgcgatggagctgctgacattgcccagattggccaggcccgcaaccgccgcgacagtatcaaacaggccaatgaagcccatattgatatcccgctggtagcggtcgataaagctcggactgaaggccttgccgttttcttgcaacgctgctctcaaaggcccctgcgaacctcgaacaacctcattggcaaaatgtcgggccgccgccgcgcctcggctgaaaccgaaactgtcgaaagtcagcgagttaatttcgcaatccggatattcattatgcgtggtgtcgataaggtcttttatctggtcaaaggcttgttttacgcgtccactgataccggaatcacctcggcctgtgcccgaacctaggatgctgtccttctctccagcctcggtaccaatcccatctatatacaacttacgaaacgcccgcttttgtaaacccgtgccttccaaggcaggcgtgacccagtaaagatccatcagcttccgaacattcgttacatcattcccataactactatccggatcagccatatacggcttgcagctggcgtccaaatcttccggctgaacaggatgctgggcgccgcaggccaggccgagggctgtgttggtggcgttgttgccggtgccgtcgaagaagacgccgatgcgcagggccagcttgatcttctcctcgggtttggcgggttgcctggcgtggcgttcgtattcagcccagcgctcggcgtggatgtcggtaggctcgacctctttgagttcggcttcccgtttggctcggggaacattggggacgtaaccactcatgttttctacctgtccttggttgaaatgcctttgcggcctggcgactcgcatacggtgccgttgagtctgcatccatgtctgcaacggcgtggtcggtagtaagaccgatggtagtgagcgtttcaagcagaccgttcacaaagcgaacggctggcgttgtgcttccgagtagaaggcggcattacggccagctattaccgcatcgagcgacctacgcctgctgtgccatccaggcacgcgcttcgtccagcagccagtcgcgaaaggcattcagggccgccgactccacccgccgttcgggaatcatcaggtggtaagcctgatcctcgcggcggtacgcgtgcggatgcgcgatcaccaggcgcccctcggccagttcgcgctggatcagaaacgtcggaatcagggccacgcccatcctgtgttcggcggcctgggccagcatcgagaacagttccagacgcgggccggtcatgtcccgcgcgaccttcatccccagcgaatcgaaccattggcgccaggcatagggacgggtggtctgctgcagtaacggcatttcggccaggtcttgtggcgtcagcgcggccgcgccgtcgagcagcgccgggctgcagaccggcaccgaacgttccggcatcagcggatgggcgacggtaccggaccattcgccgtcgccgaagtagattgccgcgtcgaaatccgtatcggcgaagaggaagggacgggtacggttggtcaggttgacggtgatttccggatgcagcgtctggaactgttgtaaccgtggcagcagccactgggtgccgaaggtcggcaccagcgccaattcgatggtcatcgcgccctgctgacccatcaccgacagcgtgtcgcgctccaccgcatcgagctgcgtggcgacccgccgtgcataggactggccggcctcggtcagcttcactccacggcgtgagcggcggaacagctccagcccgaggaattcctccagtccaccgatctgcctacagatggcgctttgggtcagcgccagttcctcggcagcacgggtgaaactctgatggcgcgccgctgcttcgaaggcgaccaacgcggcggtgctaggaatctttcgacgcattatgcgagcgcctcactaataatctgattttcaggccgattagcatacgctggagtgagtaaagcgcacagatcgatgcgaattactcgtttgctgcctgccgctggagcttctaggatcaatccatccgaatgctgtgccgggctcatgcccggttcaccgtctacgacaagaggacctctcatggccggcaaagcaagcttcaactggatcgacccgctgctgctcgatcagcaactcaccgatgaagagcgcatggtgcgtgacagtgcccagcagttcgccgccgacaagctggcgccacgggtgctcgaagccttccgccacgagcgcaccgacgcggcgatcttccgcgagatgggcgataccggcctgcttggcgcgaccattccggaagcctacggcggcagtggcctgaactacgtctgctacggtctaatcgctcgcgaagtcgagcgcatcgactccggttaccgctcgatgatgagcgtgcagtcatcgctggtgatggtgccgatcaacgagttcggcaacgaagaaaccaagcagaagtacctgcccaagctggccagcggcgaatacatcggctgcttcggcctgaccgagccgaaccatggctccgacccgggctcgatggtcacccgggcgaagaaggtcgacggcggctatcgcctgtccggcgccaagatgtggatcaccaacagcccgatcgccgacgtcttcgtggtctgggccaaggacgacgagggcgccatccgcggtttcgtgctggagaagggttgggaaggactcagcgccccggcgatccacggcaaggttggcttgcgcgcgtcgatcaccggcgagatcgtcatggacaacgtgttctgcccggaagagaacgccttccccgatgtgcgcggcctgcgcggtcccttcacctgtctggattcggcccgttacggcatcagctggggtgctctgggcgccgccgagttctgctggcacaccgcgcgccagtacaccctggaccgccagcagttcggtcgtccgctggcggccaatcagctgatccagaagaagctcgccgacatgcagaccgagatcaccctggcgctgcaaggctgcctgcgcctcggccggatgaaagacgagggcaccgcagcggtggaaatcacctcgatcatgaagcgcaacagctgcggcaaggccctggacgtggcgcgcctggcccgcgacatgctcggcggcaacggcatcagcgacgagttcggcgtggcccggcatctggtcaacctcgaagtggtcaacacttacgagggtacgcacgacgtgcacgcgctgattctcggccgtgcgcaaacgggtatccaggcgttcttttaaagcaaaaaagccgatgacggcggctggaggctggaggctggacggcaaagcgcacgcaggcgcctcctcgtctggcctccagcctccaatccctatcgcctgatctccaaacgtgaggtatttcctgtgcctggtgcgttatcccatatccgcgtcctcgacctgtcgcgcgtgctcgccggcccttgggccgggcagatcctcggtgaccttggcgccgaggtaatcaagatcgagcgcccgcgtaccggcgacgacacccgtcactggggcccgccgtacctgaaagaccagcagggtgagaacacctcggaggcggcttattacctgtcggccaaccgtaacaagcagtcgctgacgctggatttcacccagcccgaagggcaacgaatcattcgcgatctggtggccgagtgcgacgtgctgctggagaatttcaaggtcggcgggctggcggcctacgggctggactacgagagcctgaaagcgatcaacccgaagctgatctattgctcgattaccggcttcggcagcgacggcccttatgcgaatcgtgccggctacgacttcatgattcagggcctcggtggcctgatgagcctgaccggccgtgccgagggtgaggagggcgccgggccggtgaaggttggtgtggcgctcaccgatatcctcaccgggctctacgccacggtcggcgtgctggcggcgctcaatcaccgcgagcaaagcggcctcggccagcatgtcgaactggcgctgctggacgtgcaggtcgcctgcctggccaatcaggccatgaactacctgaccaccggcgtggcgcccaagcgcatgggcaatgcccacccgaacatcgtgccgtatcaggatttccccaccgcagacggcgacatcatcctcaccatcggcaacgacgggcagttccgcaaattcgccgaagccgccggccatccagagtgggcgagcgatgatcgttttgccagcaacaaggcgcgcgtcgcccatcgcaaggagctgattccgctgatccgccaggtcacggtgtttcgcaccacggccgaatgggtcgcgttgctggagcaggccggcgtgccgtgcgggccgatcaacgacctggcccaggtgtttgccgatccgcaggtgcaggcacgtggattgcgcctggacctgccgcatccgctggccggcagtgtgccgcaggttgccagtccgattcgcctttccgaaacgccagtggagtatcgcaaggcgccgccggtgctgggcgagcacagcgaggccatcctgcaagaactgctcggcctggacttcgacaagatcctttccttgcggcaggctggggtgatctgaccgcctgctgcttcaaagcatgaagcgagggccgtcatgccaatcgctgaactctcgcaccgctcggctatccttattcctgtaccctggttttttggatggacgagcgaatcatgcagacgcagcgtttacgtactacctggcagctcacggctgtcctgttcatgtcctggctgctggccggttgcggcatcaacaacatcccgcagtatgacgagcaggtgaagtcagcctggtcacaagtggaaaaccagtatcagcgccgcgccgacctgatccccaacctggtcgagacggtcaagggctacgcccgtcaggagcaggacaccctcaccgccgtgaccgaggcgcgggcgaaggcgacctcgatccagatcagcgccgatgatctcgacgatccgcagaaaatgcagcaattccagcaggcgcagagccagttgaccggcgccctgagccgattgatggcggtgtccgagcgctacccggatctgaagtccaaccagaacttcctcgccctgcaatcgcagctcgagggcacggaaaaccgtatcgccgtggcccgccgtgacttcattgcggctgtccagcgttacaacaccgagattcgcacctttcccggtcgcatctggcacaccctgatgtacagcgacatgccgatccgcgagaacttcgaggcgacggccgagaacgccgaccaggcgccgaaagtgcagtttcaatgacgcgcagcttgccgctgatcctcacgctgctgctctgggcgagcgggctcgccgcccaggaactcgacctgccggccctaagcgggcgtgtggtcgaccgcgccgagctgcttgatacccaggccgaagcgcgtctgaccggcatgctcgccgcgcatgagaaggccagcggcgagcaggtcgtggtggtcaccgtgccggatctgcaaggccgcagtatcgaggagttcggggtcgagctggggcgtgcctggggcattggcgagaagggcaaggacaccggcgcgctgctgatcgtcgcccgcgatgatcggcgggtgcggattgaagtcggttacgggctcgaaggccgcctgaccgacgcgcaatcctcggtgatcatcaaccgcatcatcacacctgcgttccgcgagggtgacttcactcgcggcattaccgatggcgccgccgcaatcatccaggtgttgggtggtgatccgctgcgcaccgatctacgcccggccatgccgatgcatgcgcaggaacccggcgggttcggcatcctcggcttttttctgatgctggtggctatcttcgtcatcggcggtggccgtggcggacgcggcggcggtcgcggcgccggccgagccgtgctactcggcgcactgttgggcggcatgggcggacgtggcggcggaggcggtttcggcggtggtggtggcttcggcggcggtggcggcggctttggtggtggcggcgcgtccggtggttggtgatccggctggcctggagccggtatttcgagcacgcccgtggcgtatctgccgcgacgccttttcaacctttttcgagatgacccgtcatgacgcttttgaccgaacccgaactgcagcaggtcgccgaggcgatcgaacgcgtcgagcgtgacaccgacgctgaactggtcaccgtcctggccgcgcaggcggacgactaccgctacattccgctgctctgggccagcctgctggcgttgctgctacccggtgccctgctgttctttaccgggtggctggcggcctggcaattgttgctggtgcagtggctgaccttcatcgtgctggccgcgattttccgcatccccagcctgaccagcaggctgattccgcggtcggtgcggcactggcgtgcctgcaacctggcgcgacggcagttcatcgagctgaacctgcaccacaccgaggggggcaccggcatgctgattttcgtctccgaagccgagcgctatgtggagatcctggtggaccggggcatttccagccgtatcgataacagcgcctgggagtccatcgtcgcaacctttaccgagaacgtgcgcaacggccgggtgctggaaggttttctcagctgtatcgacgcctgcggttcactgctcaaacagcaggtgccggcaacccatgagcgcaacgagttgccgaaccgcctggtagtgctggaatcctagcttcaggcttcaggcttcaggcttcaggcttcaggcattgcattgcactgccgcccgccgccctagcgctgcgcgctagagcatgcccgggccgtcgtcttccggttgctccaccggtgccagttccaggaaatcggtgttgtccatggcgctggctgcgactcggtcgatggtgctcatggcgtgaccgatgatcgagctgacgctggcttcgtgatgctgctgcggcaagcgctcgatggccgccaacacctcttcgccgggtacggtttcttcggccagcaggcgatcggcgatctcgtccagtgccggcttcaaccgctgcagcagggccatgcattcgcgatccagttgtttgagcaggttgtccgctgcgcgaatggattcgccggaatcgaactcgatgtgcgcgtcacggacagcctgcaggctcagcagcgaaccattcggccccatgcccagcgcaccgaccatcgacagtgcgatcttcgaggcttcctgcaaatcctggccggcgcccgaggacacttcgtggaagtacagttgctcggcgccgcgaccggccagcagcatctggatgcgattgcgcagttcggactccatgtgcaggcgcttgtcttccaccggcgttaccagcgtcacgcctagtgcctgaccgcgcggcaggatggtgaccttctccactcggccgactttcagggcggcagcgaccagagcatgaccggcctcgtgcacggcgatgcgcttgcggtcggtcggtgacatcggcgtcacgcccgagggctgctcaccgatgcggcaggtttccacggcgtcgacaaaatgcgccatggtcacggttttcgcggtcgcacgggcggcgagcagcgctgcatgattgacgatgtaggcaatggctgcgggcgtcaggccgacggtgttgcgcgccagttgcgcgaagtccaggtccgcctcggcgcggatcttgtcggcatagaggcggaatagcgcttcgcggtcgctcagccccggcaggccgacggcgatggagcggtcgaagcgaccttcgcgcaccagcgcgggatccagcgagttggggaagttggtggcacccagcaccagcacgccgctggcgccatcgaagccatccatctcggcgaggaactggttgatgatgcggttgctctcggcatcgctggaacgctgctgctcggcgcgtttgccgatgccgtcgatctcgtcgatgaagatgatgcacggcgcctgcttgcgtgcggtgcgaaacagcgccttgaccttctgaatgccgacgccgaaatacatcgaggagaaatcgctgccggtcacctggatgaagctggcgttggactcggtggccagcgccttggccagctgggtcttgccggtgccgggctcgccggtcaacagcacgcccttgggcggccgcgcgccgagggcggtatacgccgccggatcacgcagataggcggtcacgtcgctcagggcctgcttggcctcgctggcgccgatcacatcggcgaaggcgatgccgctgcccttgcgttgcactcggaacgcctgactcttgatcgccaggtagccgagcgcgccgatcaacaggagaacgaagggtgcgtaaggcaccagcgccttgtaccagggtgcttcaccgtcggtctcgaacagcgtcagggggaacagctgtccttcgctgctgacgtactggtcgagcaacagctgggctacccggccggattgatccggaacccagtagcgctggccgtcgatcaggctgatatagacggcgtgcttgcccaaggcggcactggcgatggccgcgccgcgcagattgcccatgagcgcagagaggtctcgacggtccgcgtcccagggggcggtggattcgcgcaatgcttcgagcatggtggccgcagcactggtgggtggcgtggccggcacaacgggcttgaattgccagtagcccagacaggcggctacgaccaatgccagcaaaacggagagcgcaaggccgcgacgaccttgcagcagacgtggtgtcttcatttcacatccaatcgggagacccgatgtttcgacaaacaaccgccgggaggcggaccacagttgttcacgggaaaacccgcgagcgccaatagggtgacgctgagcagtacgggctggtgggatgcgatttgtatgccggactgccgagcggaagcgtcggctcccgatagccggcgaggatacgtcaagtgccatcatccgcacggcttagcgacgaatggcgagcaggtttacgacgaatgaccgctcggtcgcggaacgaaacggcgttaatgaactacgcaggaataagttaaagagcttgggttcacgtcttccgatcgctctaccgagggggtcgttacgaccatgagcgctcgcatcggcgttggttttagtcggctgccgagcgaaataagcggtatccgatgagtggcctgctgaacgtcggaggctccgcgaaatcgccggcgattcgtagtaaacagcctgcctttcgcacgcagagcagtccccgcaccatgtccaccctgaccgaacttgcgcagcagatcgccgcgctctatcccctgcaagacaaaaccgccggccagcgctaccgcatcgtcagtcagctcgccgggatgaccgaactggaagcggtcaatggcgtgccgcgctatgtcgatacctgccaactcgccgatcagaatctttgggagagcggggctgcacgaccaccggggcggttggcctcggtctagccgaccgctgatctctggaacggcggtttgccgttgcgcttgtattaggctggcggcatccggcatcctgcggcgttagccggaaggcgatgacaggcgcaggggctgggccgcggttcggttcgcgtacagcgctcgaacgtcggcgagccattacggagtttggacatgatgatgtgggaacgccttggcgccatgctgcgcagcgtccggttgttggtggtcgtcggtctgctgctgccttcgatagggcaggcgcaagactcggtcgagccgatcggctacatcatgacggtgcagggcgaggcgacggtcaccagtcgcggccagaccatcgaggcggctgtcggccaggcggtggtgcagggcgccgtgctgcgcaccggtgcgggtggctcgttgggggtgacgctcagcgatagcacggtcatgtcgttcggccccaatagcgagttcaccatcgatgaatatgcattcgagccggcccacgaggcattgcgattgagcgcaaggatcagccgaggcaccttgaacttcatttctggcgtcatcgccaagctcaagcccgaggcggtagaactgaagacgccctccggcaccatcggcgtgcgcggcactcatttcctggtgaaggtcggcccgtgagcagatcgctgcgtccgctattgctgttgtgccttctcgcgctgctgggcggctgtgcgaccggcgattacgtggtgctgctggagagccccgacggtagcaccggcgcggtggtcgtcgaagacgccaagggccagacgcggatcgaccgcagccaccagggcatggtgatcggcggacagggggccggctccggcccattcaaggtcagcgagctgcgcatttctcacgatttttcggcggcgctggcggcccagccggcgttgccgcagcgctatgagctgtatttcgagatcggcagcgcagagctgaccgagcgttcggagcgcgccttcgcgcaggtcgtcgaggccatccggcagcgtgggccatcggccgtctcggtgatcggtcataccgatacgctcagtggcccggtctggaacgagcggctgggcctgatccgcgcgcgggcggtggccgaccggttgcgcgatcaggccatcgacgtgatcgagctgagcgtgtcctcgcacggagagcgcaacctgttgatccagacgcccgatggcgtggccgagccgcgtaaccggcgggtcgaggtcagcgttcgctgaactcgcttcatttctccgtcatcagaatgcgctcgccgcgctggccggcccgtagccgctgcaattgatagtgcaccagggcatcatccggtcgctcgctatggagccgctcgaaggcctcgacggcttgttcttgctcactcgcgagcagcgcgtacgccgcgtcgtagtcttcgtcggcggtgctcgcgcagggttcgtaaaggcggatcgggaccgccttgcccttgagccatacgtcgccaatggtccgcatcggcacgtccgggttggcgctgcggatgtccgctgaaacgcagaggtcggtgcccaggtagcggttcaggccttccaggcgtgccgcaacattgaccgcgtcgcccagggcgcggtagtcgaacagcgtggcgccgccgaagttgccgaccaccacctcaccgcaatgcgccccgatgcgggtacgccccagcggcagaccagcggcctgctgggcggtcgtgtagctgcgagtgaatcggcggatttccagcgcgcaggccagggcgcgggatttgtgatcgggctgtaccagtggcgcggagaagagaatcgccatgccgtcgccgacgattcgctcgagcgtgccttcatggcgaaaggcgatctgaatgatgccttcgagatagtcattgagcatgcccaccacctgttcaggcgactctcgctccatcagtgcggtgaagtctgtgatgtcggtgaacacgaaactgcagcagcgacgctcgccacccagatgcagttgctcgggatggcgtaccaggtggccgaccaggttcggtgagatgtagcgcgagaaggcatcccgcacccagcgatgttgccgctcgctagcgcgatgccgcgccaggctagcgccgaggtagaccagcagcaggccgatcgacagcgtcagcgcgtcgagcagcagtccgtgacgtgagtaggcccaccaggcgagtgcattcaacgccgctaccagtgccacggcgacccatgcggcggtgactgcgccgctgctcaaggtcaggaggcttaacaggagcccggccaacagcaggctcagcgcttcggccggagccgcccagaacggccgttgcagcggtgtgccagtcaaagcctgttcgatcgcttgtgcatgcacctggacgccgggcagcatcgcgccaagcgggccgaaacgtaggtcctgcagcccctgcgccgagctgccaaccagtacgatgctgccgctgagggattcggtcacgccgccttccagcacgcgccaggcaggcagggtctgggcgctcatgtcgcggcgatagtgcagccagagctcgccgcggcggttggtcgggagcgccaaatggccgatggcgacctgctcgaccgaaccggtttcggcggtgccgacgcggtaacgatcttgccccaggtagactcgcaacgcttcggccgtgagcgaagggagcaagtgctctcccactcgaatcatcaccggtacgcgtcgtaccacgccatcggcgtcgggacggaaggtcatggcgccgttgccctttgcggctttctccagcagcggcagtgcagagatggcgcctgtgtaggtcgagaaagcagcggttttcgcgtcggtgcgtagctgcacgccgaagcggctcagcggtgtattgcgcgacgacgtaggtatggcggcgaagccaaggacggcaggttgccgggcgagcgcttcggcgaatcgctgatcatggtcgggcagcttggccagcgcggcggcgacttcctccggaaggtccgctcggtccagaacgctcgagggagagctgcgatccggttcggcgaacagcacgtcgaacaccaccaccgcagcgccggcttgctgcagttgctgcagcagccgtgccagcaggtctcgtggccagggccactggccaaggcgggcgaggctggcttcgtcgatatccaccacccgcaccacgctctgtgccggcgccggtcttggctgccatcgctgatactggtcgaacaggctgttgcgcaggctctgcagcatcagcggttcggctaggtacagcacacaggcggcgagcaggccggcaagcgccagcaacagacgtgacgccagcgtgccggacgctgtgttcagcctcacgggccgcgaccggtcgggttgtcggaacgaatggggtggttcagtcgagtaccagaacggcgtccatttccacctgtgcggccttgggcagcgcagcgatgccgatggcggcgcgggccggatagggttgctggaaatagcggctcatgacttcgttgaccgtggcgaagttgcccaggtcggtgaggaagatgttgagcttgacgatgtctttcagtgagccgccggcggcttcggccactgccttgaggttctcgaagacctgcacggtttgagcttcgaagccttccaccagttccatgcttttcgggtccagcggaatctgcccggacaggtagacggtatttccggccttgatcgcctgggaataagtgccgatggcggcgggggctttgtcggtattgatgacggtcttgctcatggagtgctccgatagaagagtgcggccccagaggatacgggctggcgcgagcgggcaaaagccccgtggcgagcgtggaacaggcagggtcgctaggccttcatccgcgtgatgcgcatgacgcccttgatggctcgcagtttcttgatcacccgggccagatgcacccggtcatgcacgctgaccaccagctgaacgacactgatacgcccgtcgcgctcgtccatgccgatcttctcgatgttgccgtcggccgcgttgacgctgcctgccagcagggcgatcaggccgcgctggtgctccagctcgacccgcagctccacgttgaactcgccagtgacgtccttggaccaggatagctggatgcatttgtcggggttgtggcggacttcggcgatgtttcggcaggtatccaggtgcaccaccatgcccttgcccgccgacaggtggccgacgatggggtcgccagggatcggcgtgcagcacttggcgtagttcagtaccagcccctcagtgccgcggatcgccagaggtccttcggcactcggcgcctgcgcgccgtcactcgacagcaggcgccgagcgatgacgtaggccattcgattccccagcccgatgtcttcgagcaggtcttcgatgacctccatctgatattcgttgagcaccgctttgatgcgctcttgaggaatgctttccaggctggtttcgaagccggtaagcgccttgttcagcagccgttcgccgagattgatcgactccgagcggcgttgcagcttgagcgcgtgacggatatgcgtacgtgccttgccagtgaccacgaaattgagccacgccggattcggtctggcgcctggcgcggtgacgatctccaccgtgctgccgctttccagcgcctgcgacagcggcgccaggcgtcgattgacgcgacaggcgatgcacgtattgccgacgtccgtatgcacggcgtaggcgaaatccaccgcggtcgaacccttgggcaactccatgatgctgcccttgggcgtgaagacgtagacctcgtccgggaacaggtcgatcttcacgctttcgatgaactccagcgaattgccggcccgctcctggagttccagcacgcccttgacccactgtcgggcgcgcgcgtgggtccccttggggggctcgtcgccgttggacttgtacagccagtgggcggcgatgccgttgttcgccatctcttccatttcgcgagtgcggatctggatctcgatgggcacgccgtgcatgccgaacagggtggtgtgcagcgactggtagccgttggccttggggatcgcgatgtaatccttgaagcggccgggcagcggcttgtaaagactgtgcaccgcaccgagtacgcggtagcaagtgtcgaccttgtcgactacgatgcggaaggcgtagacgtccatgatctcgttgaacgccttgcgcttgccgcgcatcttcttgtagatgctgaacaggtgcttttcgcggccgactacttcgccgtgcaggccttcgcgctcgaggcagtggatcagcgactgctcgatcttctcgacgatctcgttacgattgccacgggcgcggcggacggcggcgcggatgcgttccgaacgcatcgggtgcatggccttgaagcccaggtcctcgaactccacacgcatggcatgcatgcccagccggttggcgatgggcgcgtagatttccagggtttccttggcgatacgccggcgtttctcaccggccagcacctcgagcgtgcgcatgttgtgcaggcggtcggcgagcttgaccaggatcacgcgaatgtcgcgggccatggccatggccatcttctggaagttctcggcctgggcctcggccttggtctcgaacttcatctgggtcagcttgctgacgccgtccaccagttcggcgacggtttcgccaaactgtgcggtgagcgcttccttggcgatgccggtgtcctcgatgacgtcatgcagcatggccgccatcaggctctgatggtccatgtgcatgtcagcgaggatgttggctaccgcgagggggtgggtgacgtaggcttcaccgctgcgccgacgctggccgtcgtgggcttgctcggcgtagaaataggcacggcgcaccaggttgacctggtccgcgccgaggtaggtcgacaggcgatcggcaagagcgtctatggccggcaagagcttactccttgccagcggggcgctatggctgcggttcgacttcgacctggcatttattcagagagcctcgttgggttcttcctcgtactgaacgaacagcggctcgtcgtcgacgatatcgtcttgcgcgatgacgtcgtagtcgaccagtccggaggcgatttcacgcaacgccacgacggtcggcttgtcgttttcccaggccaccttgggctccttgccgccggttgccagctggcgcgagcgcttggtggcgagcatgaccagctcgaagcggttatctacgttgtccagacagtcttcaacggtaacgcgggccatggtgttcctcatcaataacggtagagcatgcccgaatgggcgagcggacgggatagtctaaaaaatcaccagccattagggaagcggtaaaacttcccgcaaggctgcggcgtggccagcgattgccgcatggccgagggttgcggtggtttgagcaggctgcgaacgacgtcaggcagggcgcgagcgagagagcggtctggcttgtgcatagccggggatctttagctcaatcagcccggccaggacgctaagactcaggcgagcagttcgtccagcaggctgcggaagcgttgctgttgcgaggcctgcaacagttggttggcgcggaaaatcgcctgcaagtcgatcagggcatgggcgaagtcgtcgttgatcaccaggtagtcgtactcgacatagtgggtcatctcgctgaccgcttcgcgcatacgtttctcgatgacctcatcgctgtcctggccgcggttggtgaggcgttggcgcagggcttcctgggttggcggcaggatgaaaatcgatttggcctggggcatcagtcggcgaacctgctgggcgccctgccagtcgatttccaggatcaggtcatagccttcgttcagtgtctgttcgagccagcgctgcgacgtgccgtagaggttgccgaatacttcggcgtgctccagaaattctccacgctccatacgttcgacgaattcttcgcggctgacgaagtggtaattgaccccgtccacctcgcccggacgcatagggcgggtggtgtgcgagaccgagacgcgcacgtgcggttgcgcatcgagcaaggctttgaccaggctggtcttgccggccccagaaggcgcggaaacgatgtagagcgtaccggtggaggctgacatgtgattctctgtacggttgctgggataaagctggcgatggccgagtcgccacagggccaagcgtagttgctattcgatgttctggacttgctcgcgcatctgttcgatgagcaccttgaggttcaccgccgcttgggtgctgcgtgtgtcgatcgccttggaccccagggtattggcctcgcgattgagctcttgcatgaggaaatccagacgccgaccggcggccccgccggacttcagcacgcgacgcacttcgctgacgtgcgtgacgaggcgatccagctcttcggcgacgtcactcttctgtgcgagcagtaccagctcctgctcgagtcgttgcgggtccatttcgacccgcatctcggcgcagcggtcgagaatcttctgccgctgggctgcgagcatgtgtgggacctgggagcgtagcgtggccgtttcttcagtgatggcatcgaggcgctcgttgatcaggcgtgcaagttcttcgccctcgcgctggcggccactcttcaattgctccagggtgtcatggaacagctgcagcgcggcgctgttgagggcctgcggatccgctgaatcgcctaccagaacgcccggccaggacaggatctcgagcggattgagcggggcgggttgcttgatcagtgcggcaacgctttcggctgcggcaaccagttggctggcacgctcgcggtcgacctgcatcgagcgccccgctgtgtcctcggcaaagcgcagtgtgcattcgaccttgccacgcgacagccctttgcgcagtgcctcgcggaccgctccttccaagtcccggaacgcatccggcaggcgcaggtgcggctccagatagcggtggttcaccgagcggatctcccagctgagggtgccgtggtcgccggcctgctcagcgcgtgcgaaggcggtcatgctgtggatcatcgggaaaccctcgataggtgcgaaaggcggcagattgtaaaggaaaaaccagtcattggcgctcgggcgtcgggttagctgtcgcgacgcgctgcgtcggcaatgcagccgagagggggcgattggctcggcggtggccctcatggcggtccaggcctctataatggccgctacttattccacaaagcaggacaagcctcatgaagcgacccagtggccgcgccgccgaccagctgcgttcgatccgcatcacccgcaactacaccaagcatgccgaggggtcggtgctggtggagttcggtgataccaaggtgatctgcaccgccagcatcgaaaatggcgtaccgcgctttctcaaggggcagggacaaggctggttgactgccgagtacggcatgctgccccgtgccacgggcgaacgtaaccagcgcgaagccagccgcggcaagcagggcggccgtaccctggagatccagcgattgatcggacgctcgctgcgtgcagcgctggatatgagcaagctgggcgagaacaccatctacatcgattgcgatgtgattcaggctgatggcggcacccgcaccgcctcgattaccggtgcgatggtggcgttggccgatgcgctgaagctgttgaagaagcgcggcgggctgaagggcggcgatccgctcaagcagatggtcgccgcggtgtcggtcggcatctaccagggtgcgccggtgctcgatctggattatctggaagattcggcagccgaaaccgatctcaacgtggtcatgaccagtgctggcggtttcatcgaggtgcagggcactgccgaaggtgcgccgttccagccggaagagctcaacgccatgctcgcgctggcgcaagacggcatgaaagagctgttcgcgctgcagctggctgcgctagccgattgatccgagggagaacgccatgtctgatcaggaattgatgccgcagccctccgcgcaagcgcgtcagtgggccatgttctgtcactactcggcgttcttctggtttctggtgccgatgatcggcaatgtactggggccgctgatcgtctggcagttgaagaaggacatggaccccttcgtcgacgagcagggcaaggaggcgctgaacttccagatcaccttcagcattctgctgatgatctgcggcgtgctggcctggattctgatcggtttcccgctgatggcgctgatcagcgtggtggcgttggtgctggtggtgatcgccggcatccgcgccaacgaaggcaagccttatcgctatccgttctgctggcggatcgtcaaatagcttcaggcttcaggctgaagctggatgcgctttttcatgccgacactgaaccgcctgccgccttagaggctaagcgtccagtcgtagtccaccaccagcggggcatgctgagaaaaccgaggttggcgcggaaggcgggcgttgcgcacgaagcgacgcatgccggaggtcaggatctggtaatcgaaacgccagcccagattgagcatctgcgcctgctcggtatccggccaccagctgtaaagatcgccttctcgactggcttcgcgcagggcgtcgacatagcccatgttgccgaatatctcatcgagccaggcgcgttccggcgccaggaagccggtcgtttgctggcagtcgcgccagttcttcacgtccagcttctgatgggcgacatacagcgagccgcaatagatgtattcgcgacgcttgcgacgttgcttgtccaagtaatgggcgaaatcgtccatgaacttgaacttctgattcagctcctcatcgccgccgcggccggtcggcaacagcaggctggcgatgctgaccttgtcgaaatcggcctggaggtagcgaccgtagcggtcggccgtctcgaagccgaggcccatgatcacagcctttggctggagtcgggaatacagcgcaacgcccccttgttccggaatttcggcgtcgacggtgtagagaaaatagccgtctagctggtaagccggatcgtcgagttctactacggaggcgcgggtatcctgcaggcagatgacatcggcattctgcgcttgcagccagctgagaagtccccgctgcgccgccgcttgaatgccattcacgttgacgctgatgatccgcataaatggcccctaaaaacacgtgcgtgtatgataacccaagctctttgcaattagctaaaccagtgtcttccgggaatattcttcatgcaggcgtaccagcgcgagttcattcgcttcgccatcgaacgcggggttctgcgcttcggtgagttcaccctgaaatccgggcgtatcagtccatatttcttcaatgccggattgttcaataccggctccgcgctggctcagctggggcgcttctatgccgcagcggtggccgacagcggcatcgatttcgacgtgatcttcgggcccgcatacaagggcatccccttggctgcggcgactgccatttcgctggcggaacatcaccagcgtgacctgccctggtgcttcaaccgcaaggaagccaaggatcatggcgagggtggcacgctggtcggagcgccgctctgtggtcgtgtactgatcgtagacgacgtcatcactgccggaaccgccattcgcgaggtcatgcagatcatccaggcgcagggcgcgcaagcggcaggcgtgctgatcgcgctcaatcgccaggagcgtggccaaggccagctgtccgctatccaggaggtagaacgcgattacgggatgccggtggtcagcatcgtttcgctggcccaggtgctggagtatctggcggaggatgagcagctcaagcgccacctgacggcagtcgaagcgtaccgggatcagtacggcatctgatggaggccagccgcggcgtgtcccgaacggcagcggcgatcgcgctcggttgcgtccgtggttgcaaggcggcccgctttgtcagtatctgacgatctgcggcggttcgctggccgcggataccgacagggtctcgccgtggcatagtcgacgccgacgaggcctcttttacctgcgcgccaggctgtaagacggcgccggttggtgtgcttattgctgcatggctgtgatggggctggtcgagccctgcgggaaaccgaggcgggcgcttcgagtgaatgtgccggacatgccgaataagaaaagaggcggatatgcggatagggagtggcgcgctgttgctgttgggcatgctgggcgcaatggccgcgcaagctgagctgtatcgttacgtcgacgacaagggcgtcgtggtcctggaccggcatggcgtaccgccgcagtacatcgggcgtggttacgaggtgctcactgaccaggggcgggtgacccgggtcgtaccgcccgccccgacggcgcaggaacgtcagcgattgctggaggcgcaggcccgtgccggtaccgacgcgcaacttctgcgcttgtatgccagcgtcgaagatgtggagcgggccaaggcgcgcaaattggccgagctcgatagcgttctcgggatcactcgcggcaatctacagtcgcttcgctcgcaacaggccaacctgcaaagccaggcagcgaaccacgagcgtgcaggtcgcgaggtcccggcgcagctgctgtcacagatcgacaacctgcgcaaggaacaggccagcttgcagcgcgatgtccagcgctataagcaggcccgcaagcaggcggaaatcagttttgcttccgagcgcgaacgcgtcgctgagctgctcggcccatccaaataagcgggtctgatataaaaaaagcccggcttctcctgggggagtggccgggctttttcatggctacgttgtcactgggcgattggcggcttgcggttggtgatcaatgtgccgacgccgatgtcggtgaagatctccagcagcacggcattgggcacgcgaccatcgatgatgtgagcgctgtgcactccgccctgcacagcttcgagcgcgcagcggatcttcggcagcatgccgccatagatggtgccgtcggcaatcagctcgtcgacctgggcggtggtcaagccggtaaggacctggccctgtttgtccatgaggccggcgatgttggtcagcaacatcagcttttccgacttcagcgcttcggccaccttgcctgcaaccaggtcggcgttgatgttgtacgactcgccgtcagggcccacgccgatcggcgcgataaccggaatgaagttgccgcgaaccagcatttcaagcagctcggtgttgacgccggtgacttcgccaacgtggccgatgtcgatgatttccggggacgtcatctccggcgtctggcgggtggccttgagcttcttcgccctaatcagctttgcatccttgccggtcaggccgatggctgcgccgccgtgctggttgatcaggctgacgatgctcttgttgacctgaccgccgagcaccatttccaccacgtccatcgtctggctgtcggtgacccgcatgccgtcgatgaaatggctttcgatgttcaggcgcttgagcaggtcgccgatctgcgggccgccgccgtgaaccaccaccgggttgatgcccacggccttcatcagcacgatgtcgcgggcgaagccggttttcagctcctcgctttccatcgcgttgccgccgtacttgatgaccagcgtcttgccgacgaaccggcggatatagggcagcgcttcggatagaacctgggcgaattgggtggcggcttcacggctgagggtcatgcagggctccgcaaatcagaacggcaaggtaaggtcaggcgcgacagtataaagctgcgcgcggaagacttcctgtatgcgcttgagctcgtcctcgctttcggcctcgaaacgtagcaccagcacgggcgtggtattggaggcgcgaaccaggccccagcctttcgggtagtcgacacgcacgccatcgagcgtggtgatgttggcctcgccccaatgggcgtcgcggtgcagcgcttcgatgatggcgaatttgctttcctcggtgaccgtgatgttgatctcgggcgtggaaatgtcgttggggaaagcggcgaagacctgttcggcgttgcgtttgtcctggctgagaatttccagcaggcgcacggcgctgtagatgccgtcgtcgaagccgtaccagcgttccttgaagaagatgtggccgctcatttcgccggcgagcagggcgccggtttccttcatcttcttcttgatcagtgagtgaccggtcttccacatcaccgggcggccgccgtagccgctgatcagcggtgtcagccggcgcgtgcacttgacgtcgaagatgatgtcggcgccgggattgcgcgacaccacatccttggcgaacagcatcagcaggcggtcagggaagaccacggtcccggcgttggtcaccacgccgacgcgatcgccgtcgccatcgaaggccaggcccagatcggcattctccgacttgaccttggcgatcaggtcttcgaggttttccagtttgcccgggtcggggtgatggttggggaagttgccgtcgacctcgcagaacagcggtatgacctggcagcccagcgcctcgatcagctgcggcgcgatcaccccggccacgccgttgccgcagtcgaccactaccttgagtggcttggccatcgcgatgtcttcgcggacgcgcttgaagtagctttccagtacgtccacctgttccgcctggccgactccctcgctgagatcgccagtctcgatgcgctggcgcaaggcctggatctgctcgttggccagggtgtcgccagcgatgacgattttgaaaccgttgtagtccggtgggttgtggctaccggtgagcatcacaccggacttgccggccagcacattggctgcgtaatagagtaccggggtgggcaccatgccgacgtcgctgacgctgcaaccactgtccaccaggccttgaatcagatgctgcaccagttcggggccggacagacgaccatctcggccgaccgatacattcggctcgccttgggccaggctctgggagccgacggcgcggccgatccagtaggcggtttcgttggtcagggtgtcgccgaccacgccgcggatatcgtaggcgcggaagatgctggcaggcagctggggggctttaggggcactcattgcggtttctcgctccttggggtcgaggccaagccagtcctggtcctcgtcgagaatgtcgatgtcgagaatatcggtgtcctggaacaaaggggcgccgtactcggtggtttgggcttgcccagccgctgacggcggcgtggccggcgctttgaccgtagccgccggggcagctcgtagcggcaggcgggtcaggctcctggccagcgcatcgagcgctggcaggctcaaagtcggtgtttggatggtcttccccgaggagagttcctgaaccattcgccccaagtgcatgacatcttcacgaaggcggcgctgctgtgcattgagcaccagctgcaagcccagcaacaggccaccgagcgctgccagcgcggcggcgagcagcagcagcgcagactccgtcgtgctgcgtggtgcggtgctggggaagaaactgagggtccaattcggattggccgaaggcaggcgaagtggctcgccagcttggtcgctgccaccccgttgtgcgaggacctgcgccgggccgttgccgaactgctggaccaggcgcaactggcccgcgtcggcaggcaattttggcagcgtggccagcagccgctccaggcttatcaccagcagaagggtgccctcggccggctgctcggggcccgggcgcagcgcgacggcgctgtagaccagccagcgattgccgaccttgaatgcttccggcgccggtggcttgccggtttcggcgcgctgcagcaggtccagcgccgcgaagttcaatggcccgggacgctcggcgttctggcgggcctgaccacgcgcgctgaggtgggcgtcgatgacgccgtcgcgataactcagctcacgctcggcggcccgaatccgctcgggttgctcgctgcgcagggcgtcgagcaaccgagggtcgcgggccgcggcgagggtttcgtgcgtcagctgctgcagcgcttgttcgaccgccgaggcctggctctgcccccaggcttcggccagttcggccgcgtgccgctgctggatggactgatcggcgaaccagaccagcgcgcccgccacgacgagcccgagcaatcccggtaacaagcccggcgtcagcgctttgaaatccgtatggcgacggctaggcgagggggcggtgtcggcagggttgaggacgccggcgtccttggcggtgcgcttgaagcgtttcatgaagctcctcgattcatcctgaaaagcggttgactcagtggctacccgaatgaccgaagccgcccgcaccgcggtcgctgtcgtcaaactcgctgaccagttcgaactgcgcctggatcaccggcaccagcatcagctgcgcgatgcgctcgcccacggcgatgttgaagttggactggccacggttccagcacgaaaccatcagttcgccctggtagtcggagtcgatcaacccgaccagattgcccagcacgatgccatgcttgtggccgaggccggagcgcggcagcaccagtgccgcgaggcctgggtcggcgatatgaatcgacagcccggtgggaatcagcagcgtctgaccgggttccagcgtggtgtcggcttgcagcatggcgcgcaggtcgaggccggcggaaccgctggtggcatagtccggcagggggaagtcccggccgaggcgcgggtcgaggatttttgcttgaagtttgtgcatggatatcaggcctgatggtaacggtcggcgatgaaggcgatcagctggcgggcaatatggcctttgctggcctggctgaatcgggtttcgtgctgctgacggtcgattaccgtgacggcattctcctcgctgttgaagccgatgctggggttggcgacgtcattggccacgatcaggtcgaggttcttgtcgcgtagcttgcgcgtggcgtattcgaggaggttttccgtctcggcggcgaaacccacgctgaacgggcgatcgtcgcggccggccagcgtggcgaggatgtcggggttgcggaccatctgcagcagcaggccgtcgccgctggtggggtccttcttcagcttgtgcggcgcgatcacttccgggcggtagtcggcgacggcagccgcggcgatgaacaggtcgcacggcatggcggcttcgcacgccgcaagcatgtcgcgcgcgctcaccacatcgatgcgttgcacccggtcgggcgtcggcaggaataccggcccggcgaccaaggtaacgcgcgcgccggcttcggctgcggcttcggccagggcgaagcccatcttgccggagctgtggttggtgatgtagcgcaccgggtcgatgttttcctgagtcggcccggcggtgatcaatagatgcaggccggtcagcaagctgcgctcgaaacagtcggcggcagcctgggccaggtcgtccgcctcgagcatccgccccatgccgacgtcaccgcaggcttggcttccggatgctgggccgaacaggcgaatgccgcgttgctggagcagcgtgcggttggcctgggtcgcggggtcggcccacatggcctggttcatcgccggggccagcgccaccggtgcgttggtagccaggaccagggtggtcagcaggtcgttggccacgccttgtgccaggcgcgccatgagatcggccgtggcgggtgcgatcagcaccaggtcggcccagcgcgccagctcgatatgccccatggccgcttcggcggccggatcgagcagatcgagatggaccgggtggccggaaagggcctggagggtcagcggcgtgatgaattcgcgcccgccgtgggtcatcacgacgcggacctcggcaccctggtcgcgcagccggcgaaccagctcggcgctcttgtacgcggcgatgccgccgccgacgcccaggacgatgcgtttacgataaagccgctgcataggcctgccttgttgcgggtgagaactggttccggccatggccggcgaccgtggttaaaaggccgctaagatagcacagggcccagagggaactagggcgtgctcaacagggagaaaacatgagcattcgtgactggccggcggcggaaagaccgcgggaaaaactgcttgaacaaggtgccgcggcactctcggatgcagagctgctggcgatttttctgcgcaccggggtcgccggcaagagtgcggtcgatctggcgcggcatctgctgaatgagttcggcagcctgcgcgcactgctggagagcgatctcacgttattcagcacgcacctcgggctcgggccggcgaagttcgcccagctacaagcggtgctggaaatggcgcggcggcacctggccgagcgcatccgccgcgattcggccctggaaagcccgcaggccgtgcgcgattacctcaaggcgcggctacggcacgaaccgcacgagctgttcgcttgcctgttcctcgatgccaagcatcgtgccctggccttcgaggtgctgttccacggcaccatcgacggcgccagcgtctaccctcggcaggtggtcaagcgggcccttgcgcagaacgctgcagcggtgatcctgacccacaaccatccctccggtgtcgccgaaccaagccaggcggacaggcagctgacgcgcaggctcaccgatgcgctggcgctgatcgacgtgcgcgtgctcgatcatttcatcgtcggggacggcgaacccttgtccatggccgaacacggctggatctgaacgccgccgctcatgccagcagcggtatcagcaacagcggcagcaacacgctgagcacgaaacgaccgttccatcccaccgcgatgcgccagggcgacagctgggcatggcgtgccagcaacagcgcggagggcccgtagggtgaaagcagcatggccaaggaaaagccgaacagcagcgccacggccggctgcatcacggccagcccctggctcgccagttgcgccagcagcgcagcgcagaggttcaacgagatcagcggcgcaacgccgagcagcgccagcgcgatgaccgccagggcgccacaggtgcccagcgcgaacagcgccagcggcgtattgccgagctgatcggccaggtgatgcaccggcaacacggcggcgaccagcccggcgagcagcgccgagctggcaaagatgaaggtctcgttgcgcatgccgacgagggtgtcgcgtacttcgccgaatacctgcgccggctcggtaccctgccaaagcagaatgacgatcaccgcgctcggcaccagcagcatcgcggcctgcgtcgcggacagccaggtcagcgccgccagcagggcgatcagcaagacaccgatcaggctgccgatgagcagtccgcgcaggctgctactggtcttgcctgagccgtccccggcctcgatgcgtgaatgctcgaccaattgctgcaaacgccggttttcggtcggccagccgaacagcagcaggatcacaccgccgagcagcccgaacggcagcagcgcggcccaactcaggccaggcagttcgcgggtcagaatcgccacggcgacgctggttggcgcaagcagcggcaccagggcaaaaccgcgcagcgcggtcaccatcacgccgcgtcggccttcgcggcgctggctatcggtgtagggccggcgtgcgaggtgattttccagcgatccgcagatcaggttgagcatgccgaaattgagcaccgagctgatcgcgaaggtgctcatcaggtaaccggggtagagccaggcccgcggcccggccagaaggatccgatgcagttcgctgagttgttcgagacgcctgaccaggcaatgcatcaggcccagcgcaccgatgaaggcgccgtaataggccgccgccgacaacacgcgcgctgcctgctgccagttcgccatgcccgacaacagccaataaccgagcaccaccagggtgaccagtccgagccgctgcggatagggcatcagcgagcgccaatgccaaacgaagaacagcaccagcagagcgccgctggcgacgctcaacgcctgtagccgggtcagcaatgccagcagctcgaagagcaacgccagcggcagtagcgcggtcatctaggcgggcaactcgcggcggcgtgcgccgcgcttgaataccccttcgccgaaggcaatcagccggtcctgttcgtccagcagatcgcaactggccatgaataccttctgaccggcggagcggcagcgcgccagcgctctgatgcggctgcccgcggcggccggctggctgaagttgatattcatcgacaaggtcatcgcgacgcgccgatcggcgggatcggcttcccaggtaccgctcaggcccatggccacatccatcagcgtggccatgaccccgccgtgcatgttgctggcgttgttcagatgccgtcgcagcagatcgagcgcaagtgtggcgtgctccggcccgtaggccagcaactcgcagccgacgtcctggaaaaagccggtcaccgaagcgtggacctgctgcagctgggcgggagaatagtcggacatggcggcgacgttcggttgcgggtggcttgctaaggagactggcagtctttaggctctcggtcaataaaggcggaatattatttcgcacagcgaaacatggtttgatcacgaacagtcgcaacatgactcatcgaggaggttcgcatgttttcccgtatcggcatcatcggcgccggcgccatggggcgcggcatcgcgcaattgttcgccagcgctggtcagcaggtctggctgtacgacagtcggccggaaaccatcgaccaggcgctgcagttcaatcgcgaactgcttgagcgcaatgtcgccaaaggccggctggccgccgatgagctgccggcgatcctgggtcggatgcagccggctcatcagctttcagagctgtccggctgcgacctgctgatcgaggccatcgtcgagaacctcgaggccaagcagcagctgttcgtcgagctggaagggctgattgccgccgatgcggtgctggcgaccaacacctcttcactgtcggtgacccgcatcgccagtgcctgcgcacgtccagagcgggtcgccgggtatcatttcttcaatccggtgaccttgatgaagctggtcgaggtggtgcgtggcgagcgcaccgatgcgtcggtcatcgagcgactggtgcaactggccgagcaggccgggcacttccccgcgatcacccccgacacacccggtttcctggtcaatcacgccggccgcgcctatggcacggaggcgcagcgcattctcagcgagggcatcgccacaccggaacagatcgaccgcatcctgcgtgatggtcccggctttcgcatgggcccgttcgagttgttcgacctgaccggcctggacatctcccacgccgtgatggaatcggtacacgaccagttctattacgacccgcggtatacgccgtcctatctggcggcgcagcgggtcgcggctgggctgctcgggcgcaagaccgggcagggcttctatcgctatgaaaatggccaacagatccgtacccccgagcctcgcttcgagccggtcacgatcgaccggccgttctggctcgacagcctcgagcccgaagtgcgtagccagatcggcgcggtgctgcggcaagccggtgccgtgctggaagacggcagcgaaccgtccagcgaggcgatctgcctgatcacgccgctgggcgaggatgccagcagctgcatcgagcgcctggggctgccggcggtgcgtacccttgctctggacctgttcagcgatctcgacaagcgccgcgtactgatgcgccagccggcgctggacccggcactcgaggcgcaggcgcgccaggtgctgagtgccgatggcgtgccggtggaggtgatcaacgactcacctggcttcgtcagccagcggatcatcgccagcatcgtcaatctgggctgcgaaatcgcccagaaaggcatcgcctcgcccgagacgctcgaccgtgcggtgaccgttgcactcggctacccgaagggcccgctggggttcgccgagcactacaatcccgcccggatcctcagcattctcgagggcatgcaggcctgctacggccatgagccgcgttaccgcccgagcccctggctgcggcgacgggtgcagctcggcctgccgttgacggcgccggacgccgcgcgcgggtagtgaagtgcgcgcacccgtcgaggtgccgagcggggcttaagcttggcaggcgctggccgttaacccggtaattccaccctgtgcgaccaaggaaccatgttcattggcggcacgggtggtaaaacgtcttccttaccggatgaaaaaacaagaggccatcgatgcgccccgccttccgcactcaccccaaggcctgcctgttgcacgcggtgtccctgttcgggctgctgctgtttcatggctggatggaattgccgttctacctgaccgcactctccgttctgctgcttggcctgtggccctggctggggccgtggcgcgccgaagccgaggcgcctgcggctgatgccgccgcgcaaaactccgccgcgctgagcaaaagcctgtctcgccacacctgtcacaacgccctctcggcggctcaggtgtcattcagtgccgagcaactggccgcacggctgcaatcgcagctggtggctatcgatgaaatcgcctccggtgccgaagcgatgaccgcgaccgagcagcacagtgccgccagcgcccagcagacgctggaagccgctgaagcagtgcggcgcagtagcgaagccggacgtgccgaactgcagcacgccaacgagcgcatgcagcagctcagcgcgcagaccgaagccagtcgcgccctgttggacgggcttgcggcgcgcaccgaagagatccgccagatcaccgacgtgatccagtccatcgccagccagaccaacctgctggccctcaacgccgccatcgaggccgcccgcgccggtgaggccggacgcggtttcgccgtggtggcggacgaggtgcgcaacctcgccgggcgtaccagcagcgcgaccgaggaggtcgggcgaatggtcagcgatatccgtgagcaaagcgcggcggtggtcagccacattcgtaaacaggccagcgagctcgacgaagcggcggcgcaggttgccggcactggcgttcagctcagcaccatcgcggagctcgccggtaacgtcgaaacccaggtcgcggagatcgcttccggtacggccagcaatcacgagcggctggcgcaactgttcgtggccttggaacagctgcgtggcgatgcgctgcagagtgagggccagacccgccaactggagcaggcggccgggaccctcgtcgatcaggcggaaacggtcagcgagcagcttgccgaagtgcagctcgacgactatcaccagggcatcttcgatctggcgcgggaaggggctgcggccatcgcggcgcgcttcgaggcagacctacaggccggccgactgagcgtcgacgatctattcgaccgcaattaccaggcgcagccgggcaccaatccgacccgctatagcacccgcttcgaccgttacgccgacgaggtactgccgcagatccaggaacccctgcttgcacgtaacgacgcgctggtctacgccatcgccaccacgccggaaggttatgtgccaacccacaaccgggcgttcagccagccgccggtcggcgacccggagatcgacaaggtcaagagtcgcagcaagcggttgttcaacgaccgcaccggcgctcgctgcggcagccaccagcgcaaggtgctgctgcaaacctacagccgtgataccggcgagctgatgcacgacatttcggtgccgatcatggtggccggtcgacattggggcgggctacgcctgggctaccgtccggagccttagcgagccgaggctgccttggcacaagcgccatgttctttggcgctcgtcaaccgtggttcaccaccctgcgagtcgcctggctggctaagcttgcggcactgccatatggagctcgtccatgaagaccctgaccgatcacctggcgcaatatgcggcctaccatcgcgatccgcggaatctgctcagccatttcatcggcatcccaatgatcgtcatcgccgtcgcggtgctgctgtcgcgccccggcaccgaggtgctcggcctgtggctgagtccggtggtcccggttgcgctgctggcctcgtcgttctatctgcggctggatctgcggttcggcctgctgatgacggcggtgctggcgctctgtgtctggggcggggcgaagctggcgcagcagactacggccgtctggctgagcgcaggcgtcggcttgttcgtggtgggctggatcatccagttcgtcgggcactacttcgaagggcgcaaacccgcgttcgtcgatgatctggtcgggctgatcatcgggccgctgttcgttgcggccgagctgggcttcatgctcggcctgcggcaaccggtgcgtcaggccatcgaggcgcgagtcgggccggtaaggctgcgacagcggtcggtcgatgcctgacggtcgagggcacgctcagttcgccgccgcattggcggagagcgccatccactgatcgctgagactgcgcgcatgacggtcgaccatgatcggggcgaacggccggcctgatgcggtattgaatgaattgttgccgctgttcatgtcttcgagcgctaccttgaggaagtcccagcgggttttcagcttggcgacggcggggttcgatgcgctgtcgagtgcggcaagctgctcgtcgatagacgggaccaggcgtcgttcatcctgtccgagataggtgtccggctgttcgcgggcggtctcgaacgagccgacataggcacggctcaggtattggaccgtcagatattccaccttggcgggcagttcggcgcgaacatcagctccctgctggctgcgtaccgcggtcagaaagtcgcgcagggccttgctcatctgcagcggccagccccacggcacatcatcttccttacggccgaagcccgcgccttcgcgcaacgtggcctgaagcgtctggtgcagttcgcgcagttcactgctggcgccgggaaaggagttgatcgcgtccgccagtgccttgaggtcactttccatccgggccaggtgcgctttctggaagccttcgccgcgatagagcagcaggctgctggtcgcccggttggcatgaatctgcatgctttccagggctgtgaaggtctgcgcctgggcggtgttgatcagcgatgggaagcagctgatgagtaacgtcaccatccatatccatttgcgatgatgcatgtcgcgctcctttttatttttatagaagcaggtgccgtatcggcatgggagcggcagcggactgtcgctggcctcttggtatcacacgaaggggccaaatcaagcggcacggcaatttggctggcaatcttggccggatcgccatgcaaccaggcggccgtgccgatgtcgctagagcatccgctcaaggccgattacccgactaatccaggcgttgaaccgtcgccaggtaccaccgggttctttcaacagcaccttgcggtgattgtcatcttcagcgatccagatcagtcgttctcggcctttgagcctaaccaaccgcacttcgtagctcaccgccggcgaggttccttccagtgtcagccgctgcacttcgctggccaattccgcactctcgatcagtacgccaacttcggtgttccagagcaccgagcgtggatcgaagttcaaggacccgaggaacacctcctgccgatcgaacactgctgccttgctgtgcagactcgattccgattcaccgccgaggttgtaggacggctcctggtcgggctgtcgacgcagttcgaacaggcgcacgcctgcctctagcaatggccggcgatacggggcgtaaccaccatggacgatcggcacgtcggtggcctccagcgagttggtcagaatccggatcgcgacgccgttcctggcccgttcggtcaggtagttcaccccttcctcggtagggacgaagtaggccgatatcagtgtcatttcccggctgaccgcatccatggtcggctgcaggcgcgtggtcagcagcaggcgctcgtcggggatgccgctcgcgttgatcttttccggatggtcccagagcgcttcaccgtgcgcccataccagcccgtggagccactcctccggcgatgagccatcgagttccgaaaccagatgctggtaacgctgcggatcgcgctggcgatcggcccgtaaatagcgggtgatctgctggcgcgcttcgctcaaggcgtgccgccggggcgggctgctcagaaagtgctgaatgggcacgctgagcggatggttccagtactggtcgaagctggtggccagctggcgggcgaccggccccgccgcgagcaggtcgagatcggtgaagttcagccccttgtcggcatcgaagtattcatcgcccaggttgcgacccccgacgatggccaggctgctgtctgccagcatcaatttgttatgcatgcgccgatgctgttgcgaaaggtgaagcaggcggcccagagagcgcgtgacgatattgctgcgccccacgtgcagcgggttgaacacgcggacgaagatattccgatgcgcggccagcgtggcgatctggtaatcgctgccatcgctggtggtgtcatcgagcagcagccggaccctgacgccacggtcggccgccgcgagcagctcgtcgatcaaggtgcgggtgctgataccgtcatggaaaatgtagtactgcacgtccaggctcgtttcggctgcgcggatcatcctgacgcgcgcggcgaaggcttcggcgctggccggcagcagacggaaccccgaataccccggcggttgggtggcggccaaggccgtgacgtgtcgggtcagcgatgattcctgactgaacagcgcatgcgaggggggcgcggataccacctgcccggcgcagcccgccagtgacaggagcgcgaggagcaccagaaatatgcgcaaagagtccactccttcaggtcgttatcggtccctgccgattggacgccagcgcaacggtgaaattcagaacaggtccttgagcctataccagagcatgcccagcgcgagcagcggcgagcgcagccgttggcctccgggaaacgtcgggtgcggcacggcggcgaacagatcgaagcgcccctgggcctggccgctgatggcttcggcaagcaaccgacctgccaggtgtgtggcattcaggccgtgcccggcgtaggcctgggcgaagtagacgttggcgtggtcgtcgagccgcccgatctgtggcagccggttggcaccgatgccgatcatgccgccccactgaaaatcgattcgagtctcctgcagctgcgggaacaccttgagcatcttcggctgcatgtaggcggcgatatctttcgggtctcggccggagtaatggcaggcaccgccgaacaacagtcggccatcggccgacaatctaaagtagtccagcgctacccgctggtcgcagaccgccatgttctgcggcagcagctccttggccagtgccgcgggcagcggctcggtggcgatgacatagctgccggccggcagcaccttgccggacagctctgggttgagtccttgcagataggcgttgcaggccaacaccagctggtcggccagtacgctgctctgggcggtatgcacgcgtactttcgggccgtactcgatgcgttcaactgctgattgctcgaacaggcggacgccaaggctctgcgccgccgccgcctcgccaagtgccagattgagcgggtgcagatggccagagcccatgtcgatcagcccgccgaggtagcgatccgagccaatcacctcgcccatctcgttctgcgcgaggcgtcgcaacgggtgtggataacccaggcgcttgagatccgccaggtcggcgtcgaagccgtccaggtgacgcggcttggtcgccaggtcgcaatagccccaggtcaggtcgcagtcgatggcgtagcgctcgatgcgctggcggacgatgtcgacggcctcgaagcccatgcgtttgagcgcatcgaccccttcggcgccgagcacaggctggaattgctcgacatcatggccaacaccgcgaatcagctgcccgccgttgcgcccgctggcgccccaggcgatccggtgcgcttcgagcagcactaccgaaaatccccgttcggcgagttcgatcgccgtgttgaggccgctgaaccctccgccaacgacgcacacgtcggcctgctgttcgccttgcagtggggcgaattcgagggagcgattggcgctggcagcgtagtaggagggggcgtggtcgtgtcggcggtcggccggttggcggttggtcatgttcgggccttggacggtttgtctggccgaagggtagaccggagatccgcgccgacgcaaaaaagcgcttgaatcgcgacgtgcggcaacagggtgatacgagacgttgatggagcggtcatacgaccagcttgccgcctgcctgcgctagtccggtaccggcaactccagcgactccttcacctcctccatgacgatgtagctcttcgattcgcgcacgtgtggcagcttgagcaggatgtcgcccagcagcttgcggtaggaggccatctcagagatgcgcgccttgatcaggtagtcgaagtcgccggacaccagatggcactccagtacgtgcggcagcttgagcacggcgcggcggaactcctcgaagatatcgccggacttgtaggccaggctgatctcgacgaacaccagcaggccgcccttcaggtgttgggggttcagccgtgcggtgtatcccatgatgatgccttcccgctccaggcgtctgacgcgctcggtgcagggcgtggtggacaggccgatgcgttcgcccaactcggtgaagggcattcgtccttcagcctgaagcaggcggaggatctgccgatcgattttgtccagctcgcggcgggtctgatgcttggttctcataggcgcatcgcctccgttgaagggccttctggcgtgaattaatcgcaaatatagccgtttatatagcgaaaaaccctgccggcagctttctatactccgcgttaacagtgactcgaaaaagcctggcagtgaacgggcgggaggcgacgatgcgtgttctggtgatgggtagcggcgtgatcggcaccaccagtgcctactatctggcgcgtgcgggtttcgacgtcgtggtggtcgaccgccagccggccgtggccatggaaaccagcttcgccaacgccggccaggtatcgcctggctatgcctctccctgggcagcgccgggcgtgccgctgaaagccatgaaatggctgatgcagcgtcacgcaccgctggcgatcaagctcaccggcgatatccagcaatatctgtggatggcgcaaatgctgcgcaactgcacggcggcgcgctatgcagtgaacaaggagcgcatggtgcggctgtccgagtacagtcgcgactgcctcgacgagttgcgtgccgaaaccggcatcgactacgaaggccggcagtgcggtaccacccagctgttccgtacccaggcgcaactggataacgcggccaaggatatcgctgtgctggaggcgtccggcgtgccgtacgaattgctcgaccgggccggcatcgctcgggccgagccggcgcttgcacgcgttgcggacaagctcagcggggcgctgcgcctgcccaacgaccagaccggcgattgccatatgttcaccacccggctggccgagatggcgcgtgggctcggcgtggagtttcgcttcgagcaggacatccagcggctggagttttccggtgatcgtctcgatggcgtctggatcggcggcaagctggaaaaagccgatcgctacgtgctggcgctgggcagctacagcccgcaaatgctcaagccgttgggcatccatgcaccggtctacccgctcaagggctattcgttgaccgtaccgatcagcaatccgagcatggcgccggtatcgacggtactcgatgaaacctacaaggttgccattacccgtttcgatcagcggattcgggtcggtggcatggccgaaatcgccgggcacgacttgtcgctgaacccgcggcggcgcgaaaccctggagatggtggtgggtgatctgtttccgctgggcggcgatccgagtcgcgcggagctctggaccggcttgcggccggcgaccccggacggcacgccgatcatcggcgcgacggcctatcgcaacctgtatctgaacacgggccacggtactctgggctggaccatggcctgcggatcggggcgtgtgctcgccgatctgctggcgaacaaacgcacccagatcagcaccgatggtctggatatttcccgttatggcaccagcaaggagtcccgcaaacatgcccatacagcgcctgcacactgatgcgcgaatgagtcagatcgtcatccaccgcggcacggtctatctggccggccaggtgggtgaagacctgagcgccggtatcgagcagcaaacccgtgaaacgctcgagaatattgaacggctgctgcgccaggcggggaccgacaagcagcacatcctttcggtcaccatctacctgaaggacatcgaagccgatttcgccggcatgaacgccgtctgggacagctggctgcccaccggggtcgccccggcacgcgctaccgtcgaagccaggctgtgcgagccggagattctggtcgagctctcggtggtggctgcactgccggactgatagcgctttggccgcatagtcatcggcaattcgtcctgatgtgttgaaaatagcgaacgccctcgccatcatagcgacctgtgtttatcgcgcttgattgggaggctcccctattggacgtcggcgttcgactgcaaaccatccgcaaactcaaaggcctttcccagcgtgagctagccaagcgtgcgggcgttaccaacagcacgatctcgatgatcgagaagaacagcgtcagcccttcgatcagttcgctgaagaaggtcctgggcggcattccgatgtcgctggtcgagttcttctcgcccgatttcgagcaggagagtgacacccaggtcgtttacaaggcgggcgagctgatcgatatttccgacggcgcggtgagcatgaagctcatcggcaaggcgcatccgggcagggcgatcgcctttctctccgagacctacccgccgggggccgataccggtacggacatgctggcgcatcagggcgaagaggccggcatgttggtggagggacggttggagctgacggtgaacggtcagacctacgtgctcgagaccggtgatagctactacttcgacagcaacaaaccgcatcgcttccataatcctttcgacacgccggccaagctgatcagcgcaaccacgcccgccaatttctgattggcgcatgcgtatcggtgcgcggtgcgacacaaggtcgctggcatgggctgcgcgacatgggttgtttcggcaagcatggcttgccgctatactagccgccgctcgcgttaccgtggccgcgggcgtgtctagccacatgagggtgtaaggtgaacctgattaagaagatcctggtagcacagactgccgtagtggccctgtgggcagtgagcgctcaggctgcgaccaacgatgacatcgccgaacggctcaagccggtgggcgaagtttgtattcaaggtgaagaatgtgcggcggctggccctgctgctgcggcagccggtggtgccgcgcgtagtggcgaggccgtcgtcggcaagttctgtggcgcttgccacggctccggcctgctgaattcgccgaaagtcggcgataccgctgcctggaaagagcgcgccgacgcgcgtggtggcatcgacggtctgctcaagcacgccatcagcggcttcaacgccatgccgccgaaaggcacctgtgctgattgctcggacgacgaactgctcgccgctatcaagcacatgtccggtctctgagttcagccggtcacaacgagccgccttcgggcggctttgtcgttttcggtggggagaaaagccacggggcgccgggtcgaatcttgaaacccgttcctgggctgcggcgacgctggcccaggcaagccgatgaggtgcccatgcccagttccgccccgcaacccgagcagctgcactttgccagcgatggccgcacgccgaacagcccgcacccggttctggtataccgccagctgccgttgaccggtggcgactatgccggcgcgttcgagaacttgttcgacagtcacctgtggccagctcagtggcgcgccggtgtctatgactatcaccactatcactccacggcgcatgaagtgctgggtgtctcgcggggctcggcgcggctgatgctcggtggcgagcacggccaggaagtcgaggtgcgcgcgggagacgcgctggtgttgccggccggtaccggtcattgccagctcagcgccagcgacgacttcgaggtggtgggtggctacccggtcgaccagcaatacgatctgctgcgcccggatgaagccagccatgacgaggcgcaggcacgcgcgctaaaagtcggtgtgccggtcagcgatccggttgccggcacccagggggcgctggtcgatctgtggcgtagggagtagcgcggggcgcttattcgacgaataccacctgaccatcgctgagcgcggcgacccgggccagcgattcgacacgaaagcccgcttcttccaattcctgccggcccgcctggaacgacttttcgatgacgatacccagcccggcgatgctcgcgccggcctgctggatgatcgagatcagccccttggcggctttgccgttggcaagaaaatcgtcgatgaccagtacccggtcactcggcgacagatggttggtggaaatcgcgatggtgctctcgacctgcttggtgaaggaatacaccgatgcggtcagcaggtggtcggtcaatgtcagcgactgatgcttgcgggcgaagatcaccggaacgcccagctccaggccggccatgatcgccggtgcgatgcccgacgcttcgatggtgacgatcttggtgatgccctcgtcgcggaaccggcgcgcaaattcctgaccgatctgctgcatcagcacggggtcgatctggtggttcaggaaagcatcgaccttgagtacgcggtcggagagtacgatgccttcattgcggatcttctgtttcagctgttccacgaacgcgctacctcaagcgtgagcggccgggtttgcctgacgaatcggggttccgaaaaccagttgggcgctgcgccatggaggcgagcgcccagctcgtttcgatccagcatccgttcgtcacggcttaccgcagcctggaaagccgcgcattctcgctcaaatccgtgccgcggtccaaggggcgtgttcagtccggtgtttctatcgacaggcggcgaaagcgcgccgcttcgccgtggtgttggagcacgacatggccttccgcggcctgggcgaagcgcggatagccactgaatttgctaccggcaatgcgctcacgcaacgccggatcatcgaggcgatagcgcaacacgcagcgtccctccagccagtgctcgacctcgccgcgccgcacgctcaacgcggcttcgacgaatcgttcgggctcgatcggcgtttccagatcaggcggcagcaatccgtacagcgcaccgttgcgcgtcctgggttcgcgtccgtcgggatggccctgatcatcgagcagttgcatctccggaccgctgtgccagctcagctccgccgcctcctcgactcgacagaacagcccggaatttccggcggccggcagggcgacttccagacgcagcacgaagtcgcgataacgctgccgtgagatcaggtcgacgcgccgtgtgccggcgacagcctggagttcgtcgcccgccacgcgccagcaatcgtgggggaagtctgcgcggtgccaaccgcgccactgggatgcatcgagttgctcgatcatgagttcatccgaacagctgctgtttgcggcgcagccagcggtagccgtagccggtcaggcgtaaccgcagcgggctgccgtggggttgttcgtaatcgctgtcggccaggacgtcgaccatgtcctgcagatcgtcgtcagcgatctcgacctcgacctcccggtccgccaggttcgccagcatcagcacggtcgaatcattgtcgtggcggatggcgaacaccgaagggcaacccgtttcgaccgcgcgatgcttgccgccgccgatctcgcgcaggccgatgcgggtgcggatcatggtcccggtccgcgacagcagggagtcgtcgcgcagggtctgggcgtagacgtttctctgctggtaaccgaattcgtccccatcgatcaccggtgcggcaagttgctcggagtccgcacaggagaagccggcgttgggttcgttggaccattgcatcggtgtgcgtaccgccaggcgctcggggcgtgacaggtcatcccccatgccgatctcctcgccataacgaacgatcggcgtgccgggcagcgcgaacagcagtgcatgggccatggcgatgcgccgctcgttgccgtcgagcatcggtgccaggcgtcggcgtatgccgcggttgtaggcgcgcatgtcgggttcgggagcgaaggcctgcatcacctcttcacgctcgtcgtcggtcaggcgctcgagatccagctcgtcgtggttgcgtagccagatggcgtactgcgcgcgttcgggcggttccggctggctttccaaggcctgatggagaggtgctgcctcgctgcgtgcgagcgcgaggaagaagtggttgttggcccagaagttcagcaacagggtcagcctgtcgccttcgccgaaatagccgcggtacagctccggctccacgtcgacctcacccagcagcaccgcttcgggtcgacgcagggtgacgaagtcgcgcatgtgttcgagcagccaataaccgtcctgatcgtccccgccgccggcctgttcgacgagatgcgaagcggcgtcgacgcggaatcccgacacgccaaggcgcagccagaaggcaatgatccgctcgatctccttgatcaccttcgggttgcccaggttgaggtcgggctcatggctgtagaacaggtggcggtagtactgcccagcctcttcgtcccaggtccagacgcttttctccacggtgggaaagatcggctcgatgctgtcatccggctcgtcggcccagatgtagaagtcccggtagggcgattgccggtcgcgccgcgcttcctggaaccagcgatgctcggtcgaggtgtgctgcaccaccagctcgatcatcacgtgcagacccagctcctcggccttttccagcaggtagaccacatcggcgagatcgccgaagcgaggatcgacctgcaagtggtcgctgacgtcgtaaccggcgtcacggaacggcgattggtagaagggcatcagccagatggccgtcgcgcccaggccgcggatatagtccaggcgctcggtgatgccgcgcaggtcgccgcagccgtcaccgttgatgtcgaaaaagagtgacggatcgatctgatagatcaccgcgttgcgataccagagtgggcgcatgctcagttctccgttgggcgcaggatgacggcctgtccggggttcaggctgccgccatagggttcgccttcgccgacgccgtcgctggcaacttccactcgccaatcaccggcgtgcgggtaggcgtgggcctgctcggcgaagttgatgcagaccagccggcagtcatcgccgaactgcctgcgatagaccagcacctcggggtgcgagggcagctcttcgaagctgccatggtgtagtgccggactggccttgcgtgccgccagcagccttcggtaaagcgcgaacatcgagttggcggtgccggtctggcgttctgcggcgagctccccggcctctggcggaaagggcagccagggcttggcaccgcgccagccgtggggcggttcggcttgccagggaatgggggcgcggcagccatcacggccaccgggatcgacacgggtttcagcggtgatctgcgcatcttccaggcccagctcctcgccctgatagatgaacggcgtgccgcgcagcgtcagtaatagcaccgcggcggcgcgtgcggcgggttcggagccctggtaacggctgcgctgacgcacgttgtcgtggttggacaacacccaggttggccaggcgccggccggctgcagccagtgctcgacctcgcggatgcaggtgcgaaacagcaccgggtcccagggcgcatcgagtgggttgaagttgaacgccaggtgcagctcgtcgcccgcgccgtagtactgcagtacccgctcggtggagcgaatgttcacttcgccgaccagcatgcggtcgccgggatagctgtcgaccagccggcgcaagcggcgtagcacttcatggctgtacggttgatcgttgaagtccgacaacggctggccggcctggcagcgcgggtcgtcggcgaagctttcgtccttgccggtgcaatggatgacatcgatgcgaaagccgtcgacgccgcggtcgagccagaagcgcagcacgtcgtgcatcgcctcgaccacctcggggttgcgccagttcaggtccggctgcttggccaggaacaggtgcaggtagtactgctgggtgtgctcgtcccaggtccaggcgctaccggcgcccagcgcggcgcgccagttgttcggttgatcgcgccagatgtaccagtcgcgcttggggttgtcccgtgagctgcgcgactcgacgaaccagggatgctcgtcggaggtgtggttgggcacgaaatccagcagcacgcgaataccgcgggcgtgagcctcggctatcagccggtcgatatcggccagcgagccgaatagcgggtcgatatcgcagtagtcgctgatgtcgtagccggcatcggccatcggcgagcggaagatcggcgacaaccagagggcatcgacgcccagctgttgcagatgatcgagatggtgcagtacgccgttgaggtcgccgatgccgtcaccgttgctgtcggcgaaagatcgcggatagatctggtagacggtcgcacctttccaccagggtgcttgggttgactcgctcatgctggtccccttttccggtgtacggcaggtccggtgcaacgggcctgtgtggtgtacgaccgaccaacggtgctcgggtttccccggttcgttgatctccgtcggacggtactgaacgccaccgcccatacttcgactaacgtgcattgcctcaacgaccctgggagaccgccatgttgcgtattgccatcaatggttatggccgtatcggccgagccgtgttgcgagccctgttcgagcgaaacctggaaaaccagatccatatcgaagccatcaacgacctcagcgagcgcgcggcgatggcgcacctgacgcgcttcgacaccaccttcgggcgcttccacggccaggtcgatctgcacgacgacgtgatgcagatccgcggccagtcgatccgcctgctgcaagagcgcgatcctacgcagctaccctggaagcagctgggcgtcgacgtggtgctcgagtgcaccggcaaattcaagaaacgcgacatgatcgaccagcacctgcaggccggcgcccagcgtgtgttcgcctcgcatccgctcgatggtgcggacctgaccgtggtctacggcgtcaaccatgagctgctgggcagccaacgggtgatttccaacgcgtcctgcaccaccaactgcctggcgccgctggccaaggtcctgcacgaagcggtgggtattcgccagggcctgctcaacaccgtgcactcctacaccaacgaccagagcctgctggacaaggcgcacaaggacctctaccgcgcccgtgccgcggccgaatccatgatcccctcgaccaccggcgcggcgaaggccatcggcctggtattgcccgaactggccggacggctggacggactggcggtgcgggtgccgacgccgaatgtgtcgttggtggacctgaccttcaccgccgaacgcgcgccgggcagtgtcgaggcgatcaaccagatcctgcgcgaaggcgcgcagaagatgccgctgggggtgatggagtgcaacgacctgccgctggtctcgcgcgacttctttggccatccgacctcatgcgtagccgacctcagccatacccgcgtgcagggcgacctggtcaaggtgctggcctggtacgacaacgagtgggcgttctccaaccgcatgctcgacgtcctgctggcctggggcgacggcacggcgcgggccagttagaggcggacgcatgagcgaaagcgagagcgtctgggcgcaaccgctggctgattttcgcgccgcgacggccgccggcaagccgacacccggttgcggcgcggcggccgccgtcactgccgacatcggcctggcgctggtggtgaagggattgcgcatcagcgaagcccacgggtccgagccggcgcgcctgcaagtgcttgaggccgctgaagcgctgcttggccgaccagggaccttcgccgatgacgatatgcaggcgttcgatgattacctgggcgctgcccgtgacgacgaagccaacgacaagcaggcggcggcgcgtcaggcctgtgcggtgccgctggccctggcgcattgctgcctggaggcgctcgaactcgccgtcgcggcctggccctgcacggacgccatcgtgcaaagcgatgcccaggcgggcgccgtgcttatccacgccgggctcagtgccgcgctgatcaacgtcgatgccgatatgaccagcctcgacgccgccgatgcccgcgagcaggccggacgcacgcggcagcgcttgcaggccgagggggacgcgctattgcagcggttatctggcgctgcgcgctccgccggcgactaacggctagccgcgtgcaggcgagggcgtcgcaagggcggcaacgccggttcgcgagcaatgactgggcgtccccctcgctcctacacaagcacatcctgttgaccctataacgagaaaaaacgtctcgttttaggttgacgtctgcctgcgttgtttctagtctcgaagccaactgagacgaatgttctcaaaataacaatcgagacctgagcattcccccttcaagctgctcgcgcatctgcatcgtctggccgcgttggccattgtcggtcgcgagtcgtgaacctaccggagaacaccatgagccatcgcatcgtcctgccgcgtctgatggaagtcggcgccggcgccagccagcagatcgtctccgtgctgcacaatctcggctgcaagcggccgctcatcgtcaccgaccggatgatggtggagctgggctatgtcgcgcggatcagcgagacattggccaaggccgatatccccagcgactgctttgccgacaccctgccggagccgaccgccgcctcgatcagggccggcgtcgacatggtgcgcgcgggcagctacgactcgatcattgcgctgggtggtggcagccccatcgattcggccaaggccatcggcatcctcggcaagttcggcggcgagatacgcgactaccgcttcccgcgtgatgtcagcgaagccggtctgccgctgatcgccatcccgaccacggcgggcaccggctcggaagccacacgcttcaccatcatcaccgacgagaccagcgacgagaaaatgctctgcgccggcctcggcttcatgccggtggccgcgctgatcgactttgagctgaccctgtcgctgccgccgcgggtgaccgccgataccggcatcgatgcgctgacccacgccatcgaagcctatgtcagccgcaaggccagtctctacagcgatgcgcaggcactgcaggccatgcgcctgctggcaccgaacctgcgtgccgcctaccacgagccgggcaaccgttcggcgcgcgaggcgatgatgctcggcgcgaccctggccggcatcgctttctccaacgcctcggtggcgctggtgcatggcatgagccggcccattggtgccttcttccacgtgccgcatgggctgtccaacgccatgctgctgccggcgatcaccgcgttttcgattcccgcagcgcccgagcgctatgccgactgtgcccgcgccatgggcgtggcggcgcagaccgacagcgtcgaggccgccaacgagaaactgttgaacgagctgcgggcgatcaaccaggaactgcaggtgcccagccccgagcagttcggcatcagccgcgaacgcttcttcgagctgcgcgaaaccatggccaggcaggcgctggcctcgggttcgcccggcaacaacccgcgcgtgcccagcgaagcggaaatcatcgacctctacgaaaccgtctggaaccaggagtgagcccatgcagaccctcggcaacctgatcaacaacgaggccgtcgcgggccgctccgaacgccacgcgaccgtctacaacccggccaccggcgagccgcgactatacgtatcgctgtcctcggcagatgaaacccgtgaggccatcgccgccgcccaggctgcattcgaaggctgggcgaagacgccgccgctggtgcgcgcccgcgtcatgttccgcttcaaggccttgctcgaagcgcgtcgcgacgacgtcgcacggctgatctcgctggagcacggcaaggtcttctccgacgcccagggtgaagtcacccgcggcctggaagtggtggagttcgcctgcggcattccacatctgctcaagggtgagttctcgcccaacgtcggccgcgacatcgattccaactcattgatgcagccgctgggcgtctgcgtcggcatcaccccgttcaacttcccggccatggtgccgctgtggatgctgccggtagccatcgcctgcggcaataccttcgtcctcaagccatcggaaaaggacccgagcgcaaccatgctgctcggtgaattgctggccgaagccggactgccggcgggcgtgctgaacatcgtcaatggcgacaaggaagcggtggacgtgctgctgaccgacgagcgcgtgcagtcggtgagtttcgtcggctcgacgccgattgccgagtacatctacagcaccgcatcggcgcacggcaaacgctgccaggccctgggcggcgcgaagaaccacatggtgatcatgcccgacgccgatccccagcaagtggtcagctcgttgatgggcgccgcctatggttcggccggcgagcgttgcatggcgatctcggtggcggtctgcgtcggtgacgaagtggccgacaatctggtcgagatgctcaagggcgagatcagccagatgcgcaccggcccgggcaccggcgtcgagcccgaaccgcacatgggtccactggtcacccgcgagcatcagcagaaggtcgtcagctatatcgacctgggcgtggaagaaggcgcgacgttggtctgtgacggccgtggactgacggttgaaggctacgaaaacggcttctatgtcggcccgacgctgttcgaccgggtaacgccgcagatgcgcatctacaaagaggagatcttcggcccggtgctggccgtggtgcgggtgcagtccttcgacgaggcattgaagctggtcaacgatcacgagttcggcaacggcacctcgatcttcacccgtgatggcgacaccgcgcggcagtacgaggaagaggtcaaggtcggcatggtcggcgtcaacgtgccgatcccggtgcccatggcgttccactgcttcggcggctggaagcgctcgatcttcggcccgctgaacatgcacggcccggacggcgtgcgtttcttcacccggatgaagaccgtgacccggcgctggccgaccggcattcgtgccggggcggacttctcgatgccgacgatgaaataggcggcgcgtcgtgggacggttatccaggcatcgaccggtgctggaaccgtttcatttcgattaagcttcgccgcccttcggggcggctgttttattcatctaccgcaacgggcttcgccatgcgcagtacccctcgtgaaaaaggctcttccatcacccgtgtgctggaaatcatcgaagccgtggctggtgccgcagagccactgacgccgagtgccttggcggaaaaactggacatccccaaggccagcgcccatcgcctggtgcagacgctggagaaggaaggctttctgcagttcggcctgcgcggcggcctgctgccgggcgatcggctgcacgccactgcggtgaacattcttggcagcggccggcacaaggccttgcgtcaggcgatcctgcgtcagctgtccgatgaaatcggcgaaacctgcggcctctccgtgccggatggtctggacatgctctacttcgatcgggtgcagaccaactggccgctgcagatcaacctgcccatcggcagccacacgccgctctggtgcaccgccagcggcaagctctatctcgcttcgctgccggacgatcagctcgaacgcatcctgccgcacctgccgattcgccagctggcgcgtaataccctgactgacctcagcgccttgcgcgacgacctggtgcggattcgtgaagaggacctggctaccgattcggaggaattcatcgatggcatggtcgcctgcgccgtgccggtgcgcgatggccgcggcgagctgagcgcctgcctgttcacccatgcgccagtgattcgctgttcgatggaatccttgctggccttcgtgccgcgcctgcgcgcggcggccggagaactggaggcgattgtcagcggttgaagggcgaactgctcggatttagaccttggcagtccttcggcctgcattcgccgcggggtcgcggctcccacgaaaagcgtcgtgtaccggtgggagcgtcgccctcggcgcgaagcttttcaggcttcggtagtagggtggatgtcgcttcttacatccaccgtgacgatgcccggtggatcgccaccaggtggaccgccacccggtggatcggtgaagcgtgatccaccctacagctgctcggatttcgagctcggcaggccttcgacctgcattcgccgcggggtcgcggctcccacgaaaagcgtcgtgtgccggtgggagcgtcgccctcggcgcgaagcttttcaggcttcggtcgtagggtggatgtcgcgctttccatccaccgtgctctgcttcggaggatcgccaccccggtggatcggtgaagcgtgatccaccctacagctgctcggatttcgacctcggcaggccttcggcctgcattcgccgcggggtcgcgcctcccacgaaaagcgtcgtgtaccggtgggagcgccgacctcggcgcgaagcttttcaggcttcggtcgtagggtggatgacgctcttttcatccaccgtgattccactcgatggggcaccagcaggtggatcgccaccccggtggaccgccacccggtggatcggtgaagcgtgatccaccctacgcatcctggagccgggaagcgtcgctacttcttcaacatcgcccgcatcgctgccagcgcgtcgttaccgcgggccgccttgacctccaccggtgcatcttcctggccttcccagacaaggtcttcgggcggtagctcgtcgaggaagcggctcggtgtgcagtcgatcacttcgccgtattgcttgcgtttggcggcgaaggtcagcgccaggttgcgcttggcgcgggtgatgccgacgtaggccaggcgccgctcttcctcgatggtgtcggcctcgatgctggagcggtgggggaggatttcctcctcgaagccgatgatgtacaccgaggggaattccaggcccttggaggcgtgcatggtcatcatctgcacgccctcggcgccttcttcctcttcctgctggcgttcgagcatgtcgcgcaggaccagcttgccgatggcgtcttcgatggtcatgtcgccgtcttcgtccttttccagcgtgctcttcagcgcgtcgacgaggaaccagacgttgcccatgcgcgcgtcggcgaccttgtcgctggaggcgttctggcgcagccagttctcgtagtcgatgtccatcaccatgctgcgaatggcggcgatcggttcgttgaccacgcactgctggcggacgttgtccatccaatgcttgaagcgcgacaggcgctcggcgtaacggctgtcgagatgtgcgccgaggccgatctcgtcggaagcggcgtacatcgagatgccgcgttcgctggcgtagttgccgagcttttccagggtggtggaaccgatctcgcggcgcggcacgttgatcacccgcaggaaggcgttgtcatcgtccgggttgaccagcaggcggaagtagctcatcaggtccttcacctcctggcgggcgaagaagctggtgccgccggacaggcgatagggaatctggtggtgttgcaacttcagctccatcagcttggcctggtagttgccgcgatagaggatggcgaagtcgctgtaggggcgttgggtgcgcaggtgctcggtaaggatctccagcgccacgcgctcgcactcggcgtcctcgttgcgcgtgcggatcacgcggatctcgtcgccatggcccatctccgaccacagctgcttttcgaacacgtgcgggttgttggcgatgaggatgttggcgcacttgagaatgcggctggtggagcggtagttctgctccagcatcaccactttcagggacggatagtcctctttgagcagcatcagattttccggccgcgcgccgcgccaggcgtagatagactggtcgtcgtcgccgaccacggtgaactggttgcgcatgcccaccaacagcttcaccagcaggtactggctggcgttggtgtcctggtattcgtcgaccagcaggtagcggatgcggttctgccacttctccaaaatgtcggcgtgctcctggaagagcttcaccggcagcagaatcaggtcgttgaagtccaccgcgttgtacgccttgagcgtgcgctggtagtgcaggtagacgatggcggcggtctgctccttcgggttgcgggcgttggccagcgcctcgtcgggcaggatcaggtcgttcttccagctgtcgatgtagttcttgatctcgtcggcgccgtcatcgccggaatactccttctgcatgatgtcggtgagcagcgccttgatgtcgccgtcatcgaagatcgagaagccgggcttgtagcccaggcgcgcgtattccttgcggatgatgttcatgcccaggttgtggaaggtggacacggtcaggccgcgtgcctcggcgcccttgagcagcgtgccgacgcgctccttcatttcgcgcgcggccttgttggtgaaggtcatggcgacgatatggcgggcctggatgccgcactgctgcaccaggtaggcgatcttgcgggtgatcacgctggtcttgccggagccggcgccggcgagcaccagcagggggccgccgacgtagttcacggcttcctgctgccgggggttgagtcgggacattctcgttaggtctgttgaagcgggggcgagagtttagcagggcaagccctgccagatgatgttggccaggccttgtagctaccagtcgtcgcccgccgtactcagttaggggccggaatgctctagtctatgcgcgccgtgaccaccttaggctgttcagtcaccgctccgcttcgcacaaggaggtgtgccgtcgaggtggccaagcatcctcttgctccgcacgaaccggggacacaccgtgaccgcgcccatccaacccatgcgtctggttctgttggccgacgagcccgagtggggcgaacgtctgcgcgctgcgctggccgcgttacgtagcccacacatgctgctggtcgccggcgactggcctggcgccgctgcgcatctggccgaagcagggcacggcctgctgcttaccacaccgcgccgccgcccggcttcggggcgcttccccggacccaccattctgttgctcgacgaagagccggacgaggcgcccgagggcgtcgtcgactggctggtcgctccgcaattcaaccccgatgtgttgcgccgcagcctgcgttatgcacgggaacggtgcgccctgcatgcggccttgcagcgcctggccgagcaggacccgctgaccggtatcgccaaccgccagggattccaggcgcttcttgtcggggagctggccgaacatgatggcgagggcctggccctggggctgctggatctggacaacttccgccgggtcaacgagacgctcgggcatcgggccggggacgggctgatcctgcaggtggtggcgcggttgaaggcgcagctggaagtcggggaccggatcgcgcggctggggggcgacgaattcggtctgctgctcgataccggccgccgttccgggcgcgccgagcaggtagccgatcgggtggttgaagccctggccgagccctactggctcgatggcgaaagcctgatgctcggttgcagcctcgggctggcccacgccaagtccgataccgatgccgatcagctgctgtggctggcgcaggtcgcgatgcgccaggccaaggccaggcaagggtgtacctggtatctctacaacgagcggatcaaccgcaacgccagtagcctggcggatctggagggcgagctgcgccgtgcgctacgtcgcgacgacctggagctgcattatcagccgcggctgtgcatggaaaccggtcgcatcgtcgggctagaggcgctggtgcgctggcggcatgcctcgcgcggtctgctggcgccagatgaattcatccccatggcagaggagagcgggctgatcgtaccgctgggctattgggtgatttcgcgggcgctgcgtgacatgcagagcctgcgtgaaaagggttccggcgagctgcacatggcggtcaacctatccttccggcagtttcaggacagccagctgctgatcaccctgcagcgattgatcgaggaacgcggcgtggatccgcgctggctcgaattcgaactcaccgagacggcggtgatgcgccgcagcgaacaggtcagcggtaccatgagcgccctggcggagcttggggtgcgcttttcgctggacgatttcggcaccggtttctcgtcgttcgtgcacttgaatcgactgcccatcagcttgctgaagatcgacaagagcttcgtcgacggggtcagtgccaaggcggacaacagcctggtgcaggccatgatcggcctggctcacgatctggggctggaagtggtggccgagggcgtggaacgggcaggccagttgaagctgctggagcgctacggggccaatcaggtgcagggctacctgatcagcaagccgttgccgctggcggaactggaaacgtacctgagcaatcgcgaaaaaccggaaggcgttgcgcaagcctaggccgttgcacacacgccttccgacgagattgcctatcgaaccatgtgcaggaagtgcatgtgcttctcgtactggtcgaggatgtcgccgatgacgccttctcggctccagcccatcacgtcgtaattctggccgccctccttgagatgcacttcagcgcggtagtagttgcgctcgtcatcgtcgccctcttcggtgacgacgaagctcggcatcggatagccgcgcggacggatctgatagatgaaatcgggcgcgccttcatgggcgatctgcagcccggtacggttgtcttcgccgctggtcagctcgacgtcgtagccctgctggcgcagctcttcggccactgcggcacaggccggcgcggcgatttcgcggatgaagcgctcgacgtcgcgccggcgcggatacttggtcaggttctgtatgcgccgccgccagccaccttccgattgcggcgcggtgggcgtggtattgagcgactgatagcgcaggccctgcttggtggcatcgacacgcaaggccttgagcagaccccacatggcgcagagcagcaccagggtgaagggcagtgcgctggcgatcgtggccgtctgtagcgccgtcaggccatcggcgagcagcagcgcgatggccaccgcgcccatggaaccggcccagaagacgcgctgccagaccggggtctggccctcgccacccgaggcgagcatgtccaccaccagcgctccggaatcggccgaggtgacgaagaacaccaccaccatgacaatggcgatcagcgacagcagcgcggcgaaggggaagtgctcgagaaaggcgaacagcgccagcgagctgtcccgctcgatggcctcgcccaggctggtgacgtggtcccagagaatcatatggatggcggtatcgccgaacaccgtcatccacagcagggtgaaggcggtgggcaccagcaacacgccggtgacgaattcacggatggtgcgcccgcgcgagatgcgcgcgatgaacaggccgacgaagggcgaccaggccagccaccagccccagtagaacagcgtccagccgccaatccagtcgttgggctcgtaggcgtagaggttgaaggtcgccgtgatgatctgcgagaagtagttgccggtgttctgcacgaaggtctgcaggatgaatacggttgggccggcgatcagtaccagcagcagcaacagcacggccagcgacaggttcagttccgacaggcggcgcacgcccttgtccagcccggtgaccaccgagatggtcgccagcaaggtggtgccggcgatcagcgcgatctgtaccggtatggataccggcagtccgtataggtggttcagtccggtgttgatctgggtgacgcccagtccgagggacgtcgcgacgccgagcacggtgccaatgatggcgaagatatccacggcgtggcctatcggcccgtgaatacgttcgccgatcagcgggtacagggccgagcgcagtgtcagcggcaggccttggcgaaagctgaaataggccagaatcatcgccacgatggcgtagatggcccaggcgtgcagcccccagtggaagaaggtgattttcatcgcgtcgcgtgcggctatcaccgtgccgccttcgccaaccgggggcgaaaggaagtgcatcaccggctcggcgacgccgaagaacatcaggccgatgcccatgcccgcagagaacagcatcgagaaccaggtcaggtagctgtagtcgggctcactgtggtcggggccgagcttgatttccccgtaccggctgagcgccagcaacacgaccatcagcaggatgatcgctacggcgagaatgtacagccagctgacgttggcgatgatccaggcctgaacgtcgctgaacacagcctgagcgtgttcgggggcggcgacgctgtagatcaccagcagcaggaccaggatggcggagccgtagaaaacgggtggattgagggtggaaggtgaagacgtgttggcctccatgctgcgctcctttgataaccgatggggagtggccgcctgtggcgaagaggacgcaatctagcatatcggtctgttttcgaccggatgcggcggcggtccactggacgggcttaccctggttgtgaccgcgtgaagggccggtttgcagccaacctttctggtctttcgagatgtttccagcaggcgaagacgcgaatcagccggcctggcttccggggcggtactgcagggcttcggccaggtgcgcgcgaccgatcgaggtcgcttgctgcagatccgccagggttcgcgcgactttcaggatccgatgcgccgcgcgcaatgacagtccgaggcgctcgcaggcccgttccagccattgctggtcctccggttgcagctggcaatgactgcgcaggccggtgaggtcgaggaaggcattggggcagccttggcgccgcagctggatgcgccgcgcctcggcaaccttggcggcgacctcgacggtggtttcgctgccggccagtggtgcattcagcgccgtcgcctcgcgggcgaccgtcaggtgcaggtcgatacgatcgagcagtggaccggagagcttgccgcggtagcgctggatctggtctggcgagcagcggcagcgcccgctggggtcgcccagatagccgcaggggcaggggttcatcgccgcgaccagctgaaagcgagccgggaagcgcaccttgtcacgcgcgcgggcgataacgatgcatcccgattccagtggctcgcgaagcacctcgagcaccttgcgatcgaattccggcagctcgtccaggaacagcacgccctgatgcgccaaggtgatttcgcccggttgcggtcgactaccaccgccgaccagtgccggtcccgatgcactgtgatggggctgacgaaacggccgctgcggccagtgctccagcggtgactggctggcgaccgaatgaatggcggcgacttccagcgcctcctgttcttccaaaggcggcaacaatccgggcaggcggctggccagcaaggtcttgccggtgcctggcgggccggagaacaacaggttgtgggcgccggccgcagcgaccagcaatccgcgcttggctgccgcctgcccctgaacctcggcgaggtcggggtagggcaacacctggcgcagcagcccctgcgcctggaagggctcgatcggggtcgctccgttgaagtgcgcggcgacctcgagcaggtgatccgcggcgtagaccaccagaccggacgccaggctggcttcctcggcattggccctgggcaccagcagtgcgcgtccggctttgcgcgccgccaaggcagcgggcaatacaccttgcaccggacgcaacgctcccgagagcgccagctcgccgaggcattcgagactctccagacggtcaccagggatttgcgcactggcggcaagaatgcccaaagcgatcgcgagatcgaagcgaccgccgtctttcggcagatcggccggggcgagattgagtgtgatgcgacgggcgggaaaatcgaagccggaagtcagaatcgcgctgcgcacacggtccttgctttccttgacggcggtttccggcaggccgaccagagcgagcgagggcaggccgttggccagatgcgcctcgaccgtgacggcaggcgcctccacgccgacctgagcgcggctgtggacgattgcaagggacattcgatcactcctttgatcgttgccagcggattactccgtgggtggcgttagcttttcttccagctcggcaaccttggcttccagcgcctcgagacgtgcgcgggtgcgggccagcacgaccatctggccgtcgaattcctctcggctgaccacgtcgagcttgctcaaggcgccctgcacgatgcccttgaactgggcttcgatttcagcacgaggcaaggggttttctccgttgaacaggcgcgaagcctgggcgccgacggcgtcgaggaaagctttgggcgggaacatgcgaatcacctgttttctgagcggctggcagtgtagcacggccgcacggcagcccttttccgcgcgtcgtgcccgtttgggtgcacggggtgatcttgatcggcaccaagctggtgcatcgcttggtcgcttcgccccatgcatcagccgcgacagcccggcgcaccgcgcaaaatcggctgctcgctggaattggcatcgattctgcttggctcatcgtgacgcatgcatcgaaaggttgcgatgcataggcgattcgggacgtttcgtcggattggttgatggtgtcggaaggtcgctccgctacgtcggcgcgttacaagagccagacactgcgcttagacttgagccgggttcgtacttctggggcaagtccacctaaacgggagaagttttcatgaaactagtcactgccatcatcaagccgttcaagctggacgacgtgcgcgagtcgctgtccgagattggcgttcagggcatcacggtcaccgaggtcaagggtttcggtcgccagaaggggcataccgagctctatcgcggcgccgaatacgtcgtcgacttcctgcctaaagtgaagatcgatgtagcgatcgccgacgatcagctcgatcgcgtgatcgaggccatcaccaaggcggccaacaccggcaagatcggcgacggcaagattttcgtcgtcaatctggaacaggccattcgcatccgtacaggcgaaaccgataccgacgcaatctgatggcccggcgcgtagcgatctgacgagtcggcggtaacgccctacctcgccacgcgccaccgaacatttgcgattgcctgcctggcaggcctacgaaccccccacgccccaggagtaaaaccatgactctgcgaaaattcgcagggctaggagcccttttgtctctgatttgccccggcatcgccatggcgcaggaggcaacgcttgattccggcgatacggcatggatgctcacagccactgcgctggtgttgttcatgacgattccaggcctggcgctgttctacggcggcatggtccgttcgaagaacatcctctcggtgatgatgcagtgcttcgccatcaccggccttatgagcatcctctggatggtctacggctacagtctggccttcgacacggcgggcatggaagcaggcgtcaccaacctcaactccttcgtcggcggtctcgggcgtgccttcctcagcggcctgacgccagacagcctcaccggcagcgtgccggagagcgtcttcatcaccttccagatgaccttcgccatcatcaccccggcgttgatcgttggtgccttcgccgagcgcatgaagttctccgcgatgctggtgttcatgggcgtctggttcaccctggtctatgcgcccatcgcacatatggtctggggcggcgacggcggtctgctgtgggactggggcgtactcgacttcgccggcggcacggtggtgcacatcaacgccggtatcgccgggctggtggcgtgcatcgtgcttggtaagcgcaagggcttcccgaccacaccgatggcaccgcataacctcgggctgaccctggtcggtgctgccatgctctggatcggctggttcggcttcaacgccggttcctcgctggccgccaacggcacggctggcatggccatgctggtgacccagatcgccaccgcggccgccgcgctgagctggatgttcgccgagtggatgactcacggcaaacccagcgcgctgggcatcgcctccggcgtggttgccgggctggtggccatcaccccggcggccggcacggtcggtccgatgggtgcgctcatcattggtctggcctctggcgccatttgcttcttctgcgccaccagcctcaaacgcaagctcggttacgacgactccctggacgccttcggcgtacacggcgtcggcggcatcgtcggtgcgctgctgaccggcgtgttcgcggcgccggcgctgggcggcttcggcgaggtggagaacgtcgccctgcagctgtggatccagttcaaaggcgtgctcttcacggtcgtgtacaccgccatcgtcacctacgtgattctcaaggtgatcgatgcggtgatgggcctgcgggtcagcgaagaggaagaaaccatcggcctcgacctcagcctgcacaacgagcgcggctacaacctgtaagcacacggagtgcgcccggagccaacccgggcgccttaaccgaacggcgtcacaacgcgccacggaaaaggtgatgacaaatggatagcacagcactgatacctgttcagtacggactcgataccttctacttcctcatctgcggcgcgctggtgatgtggatggcggccggattctcgatgctcgaggcggggctggttcgcgccaagaacactgccgagatcctgaccaagaacattgtgctctacgcgctggcttcgatcatgtacctgctgatcggctactacatcatgtactcgagcccggaaggcggcatcctgccgagcctgggctttctgatcggcgatgagaacgcggtggacgtggtcgccgccggtggcgaagacgcgccttactattcgacccgtgccgatttcttcttccaggtggtgttcgccgcaacctgcatgtcggtggtatccggtgccgtggccgagcggatgaaactgtgggccttcatcgtcttcgcggtggtgatgaccggcgtcatctatccggtgcagggtttctggaaatggggtggcggcttcctcgacgcggctggtttcctcgatttcgccggctccggcctggtgcacatggcgggcgcttcggctgctctggctggcgtgctgctgcttggcccgcgcaagggcaagtacggtccgaacggtcagatcaacgcgattcctggcgccaacctgccactggccaccctcggtgcgttcatcctgtggatgggctggttcggcttcaacggcggttcgcagttgaagatgagcaccatcgaggacgccaatgcggtcgctcaggtgttcaccaacaccaatatggcagccgccggcggcttggtcgcggcgctgatcacggcgcgcctgctgttcggcaagtccgacctgaccatggtgctcaacggtgcattggccggcctggtggcgattaccgccgagccgctgacgccgagcgctctgcagtccgtgctgatcggcggcgtcggtggtgtgctggtggtgttcagcatcctcgccctggacaagctcaagctcgatgacccggttggtgccatttcggtgcacggtgtggtcggcatgtgggggttgctggcggtgccgctgaccaatgccgaggccagcttcggtgcacagctgctgggcctggtttcgatcttcgcctgggtgttcgtcgccagcttgatcgtctgggggattatcaaggcggtgatgggcctgcgtgtcagcgaagaggaagaatacgagggtgtcgatgtcgtcgagtgcggcctggaagcctacccggaattcaccagcaagcgctgagccttccggactatgacaagggcgcctccgggcgccctttgttttttctgccgccgcgctagaatgcgcccgttcaggtgttcgcgggagaatccggcatgtggcaacagacgctgatcacgctgcgaccgaagccgcgaggctttcacctgattaccgacgagctgttggctcaattaccggaactgcatcagtgccgggtcggtctgttacacctgtggctgcgtcatacctcggcctcgttgaccgtcaacgaaaatgccgacggcgcggtacggcgtgatttcgagcgattcttcaaccgcctggtgccgcaaggccaggcgggttacgaacatgactacgaagggccggacgatctgccggcgcatttcaaggcgagtctgctcggctgtcagctgagtgtgccagtcaacgaggggcgactggcactgggaacctggcagggtatctacctgggtgagcatcgcgaccagggaggttccaggcaggtgcttgtgacgttgcatggaatggcgagttgaatttcttttggcgataggcgaacaggcacatcgctgggctataacttccgctttggcatggtacgaggttgaacatgagtgacgaagaattagaacaagacgatctggacgtgaacgacgaggaggacgacgaggagctggcgccggccgacgagggtgatgccgacaacagcgccgacgacgaaagcaccgacagcgatcgtgcgactccgacgagcaagaaggccaaggccaagtctgtggtcgtcgaagagctgccgagcctggaagccaagcagaaggagcgcgaggagctggcgcgtgcgatggaagaatttctcgcacgtggtggccgggtgcaggaagtcgagcccaacgtcgtggccgacccgccgaagaagccggacagcaagtacggcagccgcccgatctaatcggctaagccgtaaaacgcttggcgttggaaggctagaggttggaaagctggaaggctgaccgacgagcgcttctgcgcagcgccgagccaggtaagcggtcattacaacaagcccagtaccgacgtgctgggctttgttgcatctggcgcaaggagccggctaacgccagttggcgagcaacgcgggcagctcggccaggctgcgcacctcggcatccggccggacatcatgctcccagggtttgcccgcggggttgaaccagatcgcccgaacgccggcgcgctgcgccccgccaatgtcgtcgtcgggatgatcgcctatgtgtacggcatgctcggcagccacgtcagcacgcatcagtgcctcctgaaatggccgcggatccggcttgccgacacccagctcttcggcgcagagcgtgaactggaaatagtcggccaggcccaggcggcgaacatcggcgttgccgttggtcaggaccccgagcatgtagtggttggccaggtgctccagcgtcggatgcacgtcggggaacaggtcgatggcgtgccgcgcttcgagaaacacctcgaacgcctggtcggcgatagcctgcgcctcgtttggcgaatagccggcgtcatgcagcgcatgaaacagaatgcgccgccgcaactcgctgatgcgatgcttgaggtccggttcggattcgatcagcagacggcggatcgccgccaatgattcgattgggaaaccgcccaggcgcggtgcgtgctggccgagccaatcacgcagccgggtctccgcgctctggatgaccgggccgacatcccacagagtatcgtcgagatcgaaggtaatcagctgaatgctcatggctcgccttcctgtttgcgcttggctcgcgggtgcgcttggtcatagatcttcgccaagtgctgaaaatccaggtgggtgtagatctgtgtggttccgatgtcggcatggccgagcagttcctgcaccgagcgcaggtcctgcgaggactcgagcagatgactggcaaagctgtgacggagcatgtgtggatgcagatgttggccgagctcgcggaccccggcctggcgaactcgcaactgcactgcgcgggggctgagacggcgcccctgctggctgacgaacagcgcatcgtcggccggacggctcagtgcccgcaatggtagccaggcctgtaacgcctcccgagccttgcggccgaccggcagtacacgctccttgctgcccttgccaaggaccctgaccaacccggctggcaaatcgagctgctgcaggttcaacccgaccagttcggccagacgcagcccggacgagtagaacagctcgagcatggcctgatcgcgatgcccgatgaaatcgtcttcgacgccgccgtccagcaactgcatcgcgcggtcggtatcgagcaggcgcggcaggcgcttttcacctttcggtggtgcgataccggcggccgggtcatgggcgcaacggccttgctggttcaggtagcggaacagaccgcgcaacgaggagagcaatcgcgccaggctgcggctggactgcccttggcgatggccctcggcgaccaactgacggacctgcgcggccttcagcgattcccaagcgtcgatccgttgccggccgcagaaggccagcaccttggtgagatcgcggcgatacccgtcgagcgtgtggggcgacacctggcgctcatggcgcagatggtcgaggtaggtatccagatcggtttgcatgggtaaggcctcaagagccgataacagcgctggaggcttgaaagctggacgggtgagcgtaggaggcgaaagctttacggtcgtaccgagagcgccctggcgctgtccagcctccagccttcagcgtaccgagcgcagcggcgtggagtaattcggcagaacccgcgtcagcacctcggcgatgtagctgaggaacagcgtgcccaacgaactcttgtagtgttgcggatcctggctgccgatcgcgaggatgccttgctgctggttgagcgcaacgaccgcggccgagccgatgccgctgctgtcttcttcaccgaacaggaacgtcagctcatgcgggcggagcacgccgcaaacggtcttgccgctgccgagcaggccaccgatcgcctgctgcgcttcggcagccgtaacgctacggccaaccggcaacggggtttcgctgaacaggatcaggctgacgtagggcacctggaattcatgccgcaggctttcgtccaccgcgccgatgacctcttccaggctgttggcatcgagcagatcgagcaccaggcgacgggtcttgtcgaacagccggtcgttgtcgcgggcgacgtccatcagctgcgccagccggtggcgcatttcgatgttgcgctcgcgcagcagcttgacctgacgctcgaccagcgacacggcgccaccgggcaaatgcgggatgcgcagttcgggaatcaattcatcgtgatcgacaaagaattccgggtgggcgcgcaggtaggccgcgacggtttcggcgtccggcaactgcggcttgtcctggttttgctcggtcataggcgaacttgtccttcgaaaacgcgaacggcggggccggtcatcataaccggctgtcccggacctgcccattcgatggacagacggccgccgggcagatcgatctgtacgggcgagtccatccagccctggcgtatcgcagccacggcggcggcacaggcaccggtgccgcaggcctgggtttcgccagcgccacgttcccagacgcggagtttcgcgtgctggcggtcgacgacctgcagaaagccggcgttgactcgctgcgggaagcgcgggtgatgctcgatcttcggccccagctcatgcaccggcgcggtgttgacgtcgtcgacgcgcagcacggcgtgcggattgcccatcgatagcgcggcgatttccagttgctgaccgtcgacatccagcggatagctcatggcttcgccttcggcctggaagggaatatcggccggtaccaggcgtggcgggcccatgtcgacgctgatctgcccgtcggggcgaatatccagctcgatgatgccgcccttggtctcgacgcgaatctgccgcttcatggtcagacgcttgtcgagcacgaagcgcgcgaagcagcgcgcgccattgccgcattgctccacctccgagccatcggagttgaagatgcggtagcggaaatcgacgtcggggtcgtgcggcggctcgaccagcaacagctgatcgaagcccacgcccgtgtgccgatcaccccattgcttggcgtgcttgggctggatatgcgcgtgctggctgatcaggtcgatgaccatgaagtcgttgcccaggccatgcatcttggtaaaacgcaaaagcatcgtcgtggcctcaggtaggcagcaggctttcgccagcgtatagctcctgcacgctttcgcggcggcgcacttcgtaggcgtcttccccgtccaccagcacctcggcggcacggccgcgggtgttgtagttcgaactcatgacgaagccataggcgcccgccgagcgaacggccagcagatcgccctcggcaaggaccagcgggcgctccttggcgaggaaatcaccggtctcgcagatcgggccgacgatgtcgtagtgacgtgcttcgccatcgcgcggctgcacgggtatcacgtccatccaggcctggtacaacgccgggcggatcaggtcgttcatcgccgcatcgacgatggcgaagtccttgtgctcggtgtgcttgaggtattccacgcgggtcagcagcacgccggcgttggcaacgatcgagcgtccgggttcgaacaccagtgccagatcgcgcccatcgatacgtttgcgtaccgcctgaatatagtcgccggccaacggcggttgctcctcgcgatagcgcacgccgagcccgccacccagatccagatgctggatgcgaatgccgcgtacggccaggcggtcgatcagcgccagcaggcgatcgagcgcgtcgaggaacggcggcagggtggtcagttgcgagccgatatggcaatcgacgccgatcacttcgatatggctcagctcgtgagcgcggccatagaccgcgtcagcgttggcaatggcgataccgaacttgttttccttgagcccggtggagatgtacgggtgggtgccggcatccacatccgggttgacccgcagcgacaccggcgccatcacgccgagttcggcggcgacctgctgcagccgctcgagctcctcggtggattcgacgttgaaacaatgcacgccgacttccagtgcccggcgcatgtcgtcacggctcttgcccacgccggaaaagacgatgcgatccggttggccgccggcagcgaggacgcgctccagctcgccaatggagacgatatcgaacccggcgcccaggcgcgccagcacattcagcacgccgaggttggagtttgccttcacggcaaagcagaccaggtgcggcatgcctttgagggcatcggcgtaggcgtggtattgcgcctcgatatgggcgcgcgaatagacgtaagtgggggtgccgaagcgttgcgcgagagcgggcagcgccacgccctccgcgaagagttgaccgtcgcggtacgagaaggcctccataaatgcctcctttacagttcgaatcggtctttggaacgctctttggcagtagccgtgtcgtccgggtgataaagcgggcctttctggccgcagccgccgagtgcggaagcgagaaccgcgagtgcgatgaatggaagcaataggcgcttcattggggagcaatccttggaaaatcgatggccggagtatacccagcacccaccggattgcctatgtgggcgcgctcgccggcagacatatcgcgcgccgtccgggcctgcgctcgctagacgcggcgatggcctgctaagctcgtcgggatcgtcggtggccgggtgccgccgtacaacccgtaccgaaggaaaccgattcatgagtttgagcgaagcccgcttccacgatctagtcgacgccgttcaggaagaagtcgaggatgtgttcgatcacagtggcatggatgtcgatctggacaactccggcggcgtgctcaccgtgcgtttcgagaacggcacgcagctgatcttcagccgccaacccccgctgcgccagctctgggtggcggcgcgctcgggtggcttccacttcgactatgacgaagcgtcgtccttgtggatctgcgacaccaatgacgagcgcctcggcgaattgctgacccgggtcacgcaggagcagggcggcgaggcgctcgatttcgaggagctttgaggcgaggagcggcatgccggaatctgcgccggcgcctgagcgctggtggccttgctaatttaattggctgtgatagggtcgagttcggttcaaaaaaaccccgcctccgggcggggtttttgctttttctgacctttcactttccagcggagtttatccagacccatgaccagcgcaccgcccatcatcatcacgcaacccgacctgcagcggctcgagcgactgctcgatggcctggctgactacggtccggccgccgaggcactcgaagaagagctgtcccgtgcccaggtggtcgagcgcagcgaattgcccgctggggtggtatcgatgaactcacgcgttcattgccgcgaagagggcagtggcaaggattaccacctgacgctggtctacccgcaggacgcccgacaggaggggacggtctcggtgctggcgccggtcggtagcgcgttgttgggcatgagcgttggccagcatatcgactggcctacgccgggaggcaaggtgctcaagctgacgctgctggcggtcgagtaccagccggaggccgcgggcgacgtccatctgtgatgcctgacctgttcccgccacgccgtcagatggcggccagcgcctgattgagcgctgcctcgaggtgcgccttgtagcgcaaatgctgcacggtctgggtcttgcccccgccgtgcagaccggacaggtcgaggtccgtgatgtagcagggatagcgctcgccgccgctacgctgggcgaggatatagcgggccaccgcggcgaatagcccggcgccgtattccaggctggaaaattcctgatggttgcaatacagcgttacctgcgaacggcctttttcgctgggttcgatgatcgcctggatgtcgtagaacggatcgctggcttcttcgcgtggcgccgccctgcgctcgacggtcagcggacggtccggcgacggctgctgtagccgatagaagaggatgtccatggccgccagacggctttgctcgaacggcagctcggtggcgcgacgatagctcaccgattgcaggaagcgtagcaacggcgtcagcaggctctgttcgtcgcgatagggcacttgctgacgccacagagcgttgaattcgtccagcaccgtcagctccgcgaccaccccctggatgcgatagaacacctgcagacattgtgctctcgcctgcgccaggatcagcgccagatccaggccctccaaggcatgtcgatccacccgtaccgggcgatcccgctggtgcgcctcgcccaggtggtcgaccagggccggcagatcgctgagcttcgtctgcaggacgttgcccggggtcagctcgaagaaatggaagtgctggcgcacctgcagcaggtaacggctgtcgctcgcctcgtcgaggacgctctgggcatcattgaagagcgtttccacccgccgcgcgatggccagtccggaatggcggcagaagcagcgcacctgcagtctggggcgtatgccgcgcgcgggcagctcgtcgaggtagtcacgcaggcaatcaggcaatgccgaggcgccttcgtagcgattggcgatcagctcgttccagctgttcagtgtgagtcggtcgatgctcagcacgaggttctcgcgcgccgcgccatagccgaaggggtcgttgcgctcatcgagcgacagcggatgttcggcgctgaacgggtcgagcccgatgttcaccaacaacagcacctgggccggcaccgccgcggtcagcagcgcatcctccgtcacggtaggtggcggcatgggaaagacctggcgcaggtcggtcagcagggcgaacacttcggcctcgctcaatccgctgtcgccagggtgaagcgccacatgcgtagcactgtcgaccacgccgttgcgatggcaccagccgagcagcgggatcagctcacgcgagcgtttcagtggagagaagtgggtgacttcgcgggcgttcaggttgccctcatagagcgaccaggagacatcgcctgccgcgtcgtagccctgcaccagcgtcaggctgtgctcggccatgtccggggagatgcccaggttgatcgcctcgatcttgcccgccttgcgctcgatggcagcgtgcagacggcgaccgagcacaccgaaatcgcggccgttgatgctgctggtgatctgcaggcggcgcgcgaactcgctgagaaatcgataggcgtaggtcagttcgttgaccagcgcccggcgctcctggtcgacctggcgagtcttccactggctgcgaccgtcgagctgggcaaactggcgctcgtcccagccccagtcatgggtgagacgctcgagcagctgccgcttccagcccttgctgcgaccggtcacagggcggctcagcggcttgtcgattttcagatacaggcagcgccgcaacagcgccaggcgttcctgatcgccacgggcgaggaggtaggtttctatccggcggtacgcgacgatgtaggggtccagctcatcgagcaccaggtgattggcgtacaccgcttgtttgaagtcgaggccgaggcagcgcacctgcgggtgttcgctggcatagacctcgaccagcagcagcttgaacagtgacttgtagggcgactcgagggccttgtacagctgccacaggcctgcgcccaggtattcgcccggtggaatgtcgccaaggctgccgaggtccagcacctcttcgctgcgtatgaagcgcttgtccagcagcgtacgcacgtagtgctggtagcgatgctcctcatacgcgggcaccagccaccacaccggcgtgcgaccgccgagccagatggcggtgcgatagaactcgtcgagcagcagataatgctgggtggtgccgcagtcatcggaggtcagttgcgcttcgcgcgcgccctgggcgaagcgcaccgggtcgatcaggaagaagtgcgcctcgcagccttgggtcgccgcccaggcttgcagcagctcgcctttgcgctgaagttcgtcgagccgcgcgggcggcaggtccgggtcatgacagacccagacgtccagatcgctctgctcaccctgcgcgaccgtgcccatgctgcccatcaggtacaggcccaggatcggctgtgatggcttgccgcgcaggggcttgtaggcgaacgagcggctcaggcgttgggcttcagcgagggtctcggcgtccggctcgaatccggccaggccggccggcgtggtgcctgatacataacccggcaggatcggatggttgacgtggaacagcagtggcaacagtttgagcaccgcctgctggcgtggcgacatgacctgccgagtgcgctccaggcgaccggcgttgaccgtcaggaagcggtcacggagcgtaccgagctccttgcggtctatgccttcttcgagcgtggggcggatttcctggtggcgggtcatgcaggtattcgcaggcaaacggttggggtgtccgccctgatggtcgaggcagcggtaaaaaataacatggcgcaagccggaagcaaaaacgcagggcagctgctgtcggcgggccgtgcagctgcacgtttcgggcgcgtgtacgtcgtatcaggccggggccgtttccgaaaggatggtcagcaggccttgcgcatgctcggcagcgtcgcggccgaggctggtcagatagccgccgtcgggttgactggtcaggcctttggcgtacaagcgctgcgcagcggcgaccgctgcttggccggcatccttatgcaccttcaaaccttcaagggcgttgtcgaggctgaacaggctgaggatttccagctcggctaccaattctggggtgtatgacatgtctgctcctcgggtggtgggccttggccctgtctgcgaagtgtagatgctgcgcaagcgcctgctgtggccgaagctattgcggtagatcgggaaggttgcgcagcatcgcttcgtagcgttcgctgtcgaagggccgatcctgctcgagcatctggcgtatctcgtaagccagcaccagggccatcagcttgacgatttcgtcgcgctcgtagccgaccagcgtcagcttgttcagggttgcctgcgcggcggcgggttcgctggcctcaagctggttttcgatcgcctggatcagggtttcttcggcgaacgtctcgtcgtcttcggaaatggcgtcgttcatggggtggttctcgtcaggaaaaaactcgatggcctgtttcggcgagtcccggcaagctggcgctggcaacgacggctgtccgaacgcttcgcttgcggcggtttctatttctactatggactatcaagagcgcgacgacagcaatgattactctgtattgccttgaaaacggcgtgttggtgcggcgcgttgcgcagaccacgcaggcgttgccggaaaacgtgctatgggtcgacctgctgtcgcccgatctgcaggaagaacgtttcatcgaagcggagctggggctggacatcccgacccgcgaggaactggcggagatcgaggattcgtcgcggttctacgatgaggacggggctattttcatgaccacgaccgtggtgatggggattgccgaccgtcgcccggagaacgcggaggtgactttcgtcctgaccaagcgacgcctggtgacggttcgctacagtgaactcagtgcctttcgccagttcgaagccaagcgcttgcgacagccatcgacctattcgtccagccaccaggtattcctcgcgttggccgacgcggtggtcgatcgcatcgccgatgtgctggaaagcgtccaggccgaactgcagacgctgtcccggcgcatattcgatgagcgcaaggagcatcgccgcgacctgcaacagatcattcagcagctcggacaacaccgctcgttgctgtcgcaactgggcgaaagcctgttcagcgccaatcgcttgatcgccttctaccggctgcatgccgacgaacccagacagggcgtcgccaagggcttgctcaaggcgctggagcgcgacgtgcgctcgctgggcgagcaccaggcgcggctgctcggcgatatcgccttcctgctcgacgccacgctggggctgatcaacatcgagcagaacgcaatcatcaaggtgttctccatcgccgccgtgctgtttctgccgcccacgttggtgggtacggtgtatggcatgaacttcgtgcacatgccggagctcggctggccgttcggttatccgatggcgctgggcatgatggtggtctcggcgatcatcccctacgcctggttcaagtttcgcgactggctgtgatcagccatagaagaacaggatcacgcaaaacacgccgagcagcgcccagacgctgccgaagatgatcggcgtgcgcagggaaaacatcagcgtgcgcttgtaacgttcgccgccggccgggctgttgccttcgccgaacaatgccgagtcgcggttgggcaacagaccgacctgcccctcggtttgcagcagctcgccctgcttgtgatgccagcgctcgatgatgtcgtagctggcgcggatgcccgggatggcgtgcaacgaggtgatgagtccgagtatcgccagcacggcgggcaccaccagccgaaacagggcgccccattcgggattggtgttggccatggaggaggcgaaggcgatgatcagaaacgactgcgacgacaggtagccactggtgcggctggccagcagagtcgactcgaaatgtatctcggcacggtagaagttcagccgttccttgggcgagtcgaagagttcggcaccctgggtgtcctggttcagcagcagggttcgcagatcggtcatgagtgctcgcagggtcggccgtatccactagaggccaggtctcggcgcgagagttccccgctcacgcctcgtgcggttgaccgatcgaccggcgcggcggcttgcgggtccgcagcagcaataccgccagcgcggcgaacgccagcgaccagcaagccgccgcgaaaaccagccacgactgcggctcggcgctgagcgcaggagccagcaggcgcgcgacggccgccaggctgataaacagcgcgaacgggtgggtccagggcttcgcattggcatcgcgcaggcaatacaacaggtgcgtgcgcgccatgacgccgaacgtcaggctacccagagcgcccacggtcagcgcgtgcagcgtcccgccaagcggcactttcccggtgcccagcgcgatgccaagcaacagcaggcccagcgccagccaggcataaccgagcagcaacaccagcaggtctggccgcttccggcagcgccatggtcgccagcgcagcaggcggatcgtgcagagcgcgcccgcgccgaccagcaggccgcccaccatccgcccggcaggagcccatggcaacaggctcaaccccagcgcgaagcccaacagcagcagtacggcgccttcgatatgcggttgcacccgcgcatcgagccggcggccttcgcttagcgcatgaccggccaaggccggtgcgatgatgcggccgcccatgaaaaacagcagcagggcgaagagcagcaacgtcggcacgcgccacgactcggacgaatccaacccaaggctggccagcaggctgaccaggccgagcccgaccaccaccggggctaccgtctggtttcgccatttcttcgccgcgccgagaaaacgcggcactaccttccacagcagcccgaccgcgaacagcaggctgccaccaatagcgagccaggaagcgggccagcaaagaaagcccagacgcgccaccagccagcagccgagcaaggtaagggtgaaacgttgtggctgcgggccgaggaggtagccggcaacgaccgcgagggcgaagccgaacagcatttcgtgggcgtgtccggcgggagtcgccagaccgggaaacgtcggtagcaagccgagcatcatgagcacagatgccggaaggatggctgcggcgtagattgccgccgcgggaaagaaccaggcattggcgaagggcaggcggggagcgcgtggccgctctgtttcgaccggttgcggaacagccatgtgcgcggccgatcagcccgctgcgaacgccgacagggcgtcgccggtgaggcggtagccgatccactcgtgctgcggcctggcaccgatggactcgtagaagtcgatggccggctggttccagtccagcaccgaccattcgaaacgcccgcagccgcgtgccaccgccagtttcgccagatggcgcagcagcgccttgccggcgccgacgccacgctgttgcggtgtgacgtagaggtcttccagatacaggccgtgcttgcccagccaggtcgagtagttgaagaagtacaccgcatagccgatcggctcgccgccgcgctcgcagatcaacccgtgggcggtgctgtcgtcagcgaacaggctgctctcgatgccggcgacgtcggtcttgacctcgtgctcggctttttcgtagatcgccagatcagtgatgaagcgcaggatcaacgtggcgtcttcgcgcctggcgggacggatggtcagggacatgaggggctccaaaaaagtcgccggtccgtgggagcggtcttgattgcaaatcctgtgggagcggtcttgaccgcgaacgtgcctgcgcaccctcttgcgcggtcaaggccgctcccacagctcccacaaagggggttacgaaacgccgtcagcgggctgccagcaattcgcggccgcgctggacggcagcgcggacctgattcggtgcggtgccgccgatatggtcacgcgcattcaccgagccttccagggtcagcacggcgaagacgtcgtcgtcgatctggtcgctgaactggcgtagttcctcgaggctcatctcggccaggtccttgccggtttgcacgccatatttcaccgcatggccgacgatctcatggcagtcgcggaacggcagccccttgcgcaccaggtagtcggccagatccgtcgcagtggagaagccgcgcaatgcggcttcgcgcatgatttcgcgcttgggcttgatcgccggcaccatgtcggcaaaggcgcgcagcgagtcgcgcagcgtgtcggcggcgtcgaacagcggttccttgtcctcctggttgtccttgttgtaggccaggggctggcccttcatcagcaccagcaggccgctcagggcgccgaacacgcggccggtcttgccacgcaccagctccggcacgtccgggttctttttctgcggcatgatcgaggagccggtgcagaagcggtccggcagatcgatgaactggaactgcgcgctggtccagagcactagctcttcggagaagcgcgacaggtgcatcatcgcgaccgacgcggcagcgcagaattcgatggcgaagtcgcgatccgagacaccatccagcgagttgccggagatggcttcgaagcccagcagttcgcaggtgatctcgcgctggatcggataggtggtgccagccagcgcggccgagcccagcggcatgcgattggtgcgcttgcggcagtcgaccaggcgctcatagtcacggctgagcatctcgaaccaggccagcagatgatggccgaaagtcaccggctgcgcggtctgcagatgggtgaagccaggcatgatggtgtccgcttccgtctcggccaaccccagcaggccctgctgcagacgggtgatctcgccgaggatggtgtcgatctcgtcgcgcagccacaggcggatgtcggtggcgacctgatcgttgcgcgagcgaccggtatgcagcttcttgccggtgacgccgatgcggtcggtcaggcgcgcttcgatgttcatatgcacgtcttccagatcgacgcgccagtcgaaggtgccggcttcgatttcgctctggatgtccttcaggttggcgatgatctgctcacgctcgtccgcattcagcacgccagctttttccagcatggtggcgtgggcgatcgagcccatgatgtcgtgacggtagaggcgcttgtcgaactcgacggaggcggtgaatcgggcgacgaaggcgtcgacgggctcgctgaaacggccgccccaggactggttggtcttgtcggtgctcatgaatgcgctcgcagaaatcggatggacaaaatggagtgcggataataacaggcttgcgccccccgtccgcgctcgcccgtgaggtgacctgcacgcgtgtcgccgcccggctttgtgcctgttggctatgcttgctgcgccacgagcgttcggctttgcccgggataagctggttggcaggggcgggcatcaggcgaaatatccgcacggggtgaggggtagcgaagtggcgaccgttgctcatctcgatccggcgccgaaccgatagactgacgcctttgggcggcatcgccggcctgttgaattaatccggtcttccgttcgggggcgcgacagtcaatccatgccaagagaaacgagcaatcgcacgcgccccgcgacgcctgccgacgacttcttcgtgccggagctgtgccagccggaggcgctgctcggcctggtgctgctcgccgagttgctggtgctggtactggtgctggcggaaccgatgcagcccggtttcaactggatgcgcctggcgctgacgtccttgttcgtccagtgggtgatgctgctttcggcagggctgacctgccagctgcgtccgctgttggcgcggcttaagccctggctggccggcctggtctgctgcgcaatggtggtcgggctgacgctggcctgcaccgcggtggccgatatctaccagctgggcgggccattgacgcgggttggcgaggtcaatctgtacctgcggcatgcgctgatcagcctgatcatgtcgggcctgttgctgcgctatttctacctgcaaagccagtggcgacggcaggagcaggcggagctgaaggcacgcatcgagtcgttgcaggcacgtattcgcccgcatttcctgttcaacagtctcaacagcattgccagcctggtggtgaccgatccgatcaaggccgagcaggcggtgctggatctgtccgacctgttccgtgccagtctggcgcgccccggtagcctggtgtcctggcgtgacgagctggacctgtcgcgtcgctacctgtcgatcgaacattaccggctgggcgaaaggctacaggtcgagtggcaggtcgataatgtcccggatgacctgccgattcctcagctgaccttgcagcccttgctggaaaatgcgcttatccatggaatccagccgcggatcgagggtggcgtgatcagcgtggcggcgcattatgccgatggggtgtttcatctggaggtcagcaaccctttcgacgaaagcgctcaaacgctttctccacggggcacacagcaggcgctgcacaatatagacgcacgactaacggcacttttcggtcccgcagcgagtctcagcgtgaagcggcataacgcccgttactacacctgtctacgctatccgtgtgcgacatagaagcaggaagccagaactatatgaatgtgctgattgtcgatgacgaacctctagcccgcgagcgcctcagccgactggtaggtgatcttgacggctatcgtgtcctggaaccttccgcctccaacggcgaggaggcgctgtccctgatcgaggagcagcgtcccgatatcgtgttgctggatatccgtatgccaggcctcgatggtcttcaggtcgctgccaaactgtgcgagcgcgatgcgcccccagccgtgatcttttgcaccgcccacgatgaatttgcactggatgcgttccaggtaagtgctgtgggttacctggtcaaaccagtgcgccccgagcacctggccgaggctttgaagaaagccgagcgtccgaatcgcgtacagcttgctgcgctgactcgtcccgcggcggtttccgggaccggaccgcgcagccatatcagtgcccggacccgcaagggcatcgagctgatcccgctgccccaggtcatctatttcatcgccgaccacaagtacgtcaccctgcgtcacgagggcggtgaggtgctgctggatgagccgctcaaggccctggaagacgaattcggcgaccgtttcgtgcgtatccatcgcaatgcgctggtgtatcgcgaccgcatcgagcggctgcagcgcaccccgctgggccattttcaattgttcctcaaggggctcgagggcgaaccgctgacagtgagccggcggcatgtggccggggtccgcaagttgatgcagaatctttaaaagaggcggcaggcagaaacggcgacaggcggcaggcggatagagcgtttgacgttgctttggcgccgccgcgtacactgagaagcctgaagcctgaagcctgaagcctgaagcctgaagcctgaagcctgaagccgctttccttgattcgcgccaacccgatcgcggtgcgcggcctgttatcatcgccggcagttcatttgtctggatttgctcatgtcccgcgaaattcgcatcgccacccgcaagagtgccctggccctgtggcaggccgaatacgtcaaggcgcgcctggaagccgcacatcccgaggtaacggtcagcctggtgccgatggtcagtcgtggtgacaagctgctcgatgcaccgctggccaagatcggtggcaaaggtctgttcgtcaaggaactggaaaccgcgttgctcgagcacgaggcggacatcgccgtgcattccatgaaagacgtgccgatggagttccccgaaggactcggcctgtattgcatctgcgagcgggaagacccgcgcgacgccttcgtttccaaccaatacccgacgctcgatgcattgccggccggagcggtggtcggtacgtccagcctgcgccggcaggcccagttgctggcacgtcggccggatctgaaaatccggttcctgcgcggcaacgtcaacacgcggctggccaagctcgacgccggcgactacgacgcgatcatcctcgccgccgccgggctgatccggcttggcttcggcgagcgcatccgttccagcatcagcgtcgaggaaagcctgccggcaggggggcagggcgccgtaggtatcgaatgccggaccggtgatagcgaactgcaccagctgttgcaatgcatgaacgatccgcaaacggcagtgcgagtcagtgccgagcgtgcgctgaaccgccacctgaacggcggctgccaggtgccgattgcctgctatgcggtcctcgaagacgatcagctgtggctgcgcggtttggtcgggcagcctgacgggtcgctgttgctgcgtgccgatgaccgtgcgccggccagcgaagcagaagcgctcggcgtgcgcgtcgcggacgcattgctggcgcaaggcgccgccaggatcctccaggacgtctatggcgaggccggtaaggcgtgagtggttggcgtctgctgctgacgcgtccgtctgaagagtgtggcgctctggctgcggcgcttgccgaggcgaacgtccacagcgccagcctgccattgctcgctatcgaaccccttgctgaaacggccgagcaacgcgcgaccatgctcgagctgcaccgttactgcgcggtggtggtcgtcagcaagcctgccgccagactggggctggaactgctggcgcgtcaccggccgcaatcccctgccggcctggcctggttcagtgttggggccgcgacgggcatgattttgaaaagctacggcctggatgtcagttggccggctgccggtgacgatagcgaggcgctgctggcgttgccacgcctcgccgaggcgctcgacgtaccgacgcccagggtattgctgttgcgtggcgaaggcgggcgcgagctgatcgccgagacacttcgccagcgcggcgcccaggtcgaaagtctggcgctctaccgccgttatctaccccaatacccctcgggaacgctggtcgagacgctacgctcggaacggctgaacgcggtggtggtcagcagtgggcagggtttgcagtcattgcatgagttggctggacccgactggccggcgctgtgtgaactacccttgttcgtacccagccctcgggtggccgagatggccgcggccctgggcgccaaaataatagtggactgtcgcggtgccggagccgcggcgttgctggcggctctgcgggagtatcccgagcccgcctcctgaagcaaaggatggaaacgtgagcgaagtagaatccgataaggcagcgcagcaccccaaggaaaacgagccagccggcccgcaaaagccgaacacgcaaagcactgcgaaagactctaaagcgccaccgaagatgccgcctccgaaggcttcggttgcggccacgaccgactcgcgtggcagcggcaagggactggccgggctggcgctgctggttggtttggccgggctggcggccggcggttacagcgtttggcaaacccagcagttgaccgagcaggagcgtcaacagctcgagtcgacacaggcgacacgcgagcaggcacgccaggtggaccaacgcagccaggagctggccaatcgtctcggacgcctggaacagttgccctcggccgaacagctggaagaccggcgacgccttttgtccgaactgcagagcgaccagcaacgactcgcgggacgggtcgaacaggtgctgggcgccagtcgtgagcaatggcggctggctgaggccgagcatctcctgcgaatggcgatgctgcgtctgtcggccatgcaagacgtgaacagcgcaaaatcgctgcttgtcgaagccgacctgatactgcgcaaacaggacgatccgagcgcctacggagccaggcagaaactgctggagggcctcgaggccttgcgcagcttgccggagctggatcggaccggattgtttctgcaactgggcgcgcttcgcggccaggccaatcaactccatggcctggcacctgagttccagaacggtccgggccaaccggatgcgcaaggcgaaagcagctggcgccgttggctgaacgaactgacgcgctacgtgcgtatcgacttcaacgccggtcgcgatgtcaaacccttgctcgccggccagagcctcgctcagctgcggttgggcttgtcgctggccatcgagcaggcgcagtgggccgtgctcaatggcaaccaggacgtctatcggcagtcgctcgatcaggctgctcgtttgatcgaggaccacttcagcgaagagaacggtcagagccgcggcctgcgcgatcgcatcgaacagctcgcgaagcagcaggtttcggtcaccctgccggacctgacgcccgccctgaaggccatgcaagcctatgtgcagtcgcgcgaatccgccgatcagggcgcacccgccagcgctgccgatggctcccgcgctgagccggccggcaaggctgagcagccggccgaaaccgagccgtctaccgaagaggggctgcgcacatgaagcgactggccattgtcatcgtcctgctgctggcgggcgtcggctttcttggttgggctatctaccaggatgccggctatgtcctgatcagttatgaccgctttcgctacgagtccagcttctggatcttccttgggctggtcgcctgtctctggctgctgagcatgctggttcaccggttgctcggcttgctgcacgcctccggggcgttggtcaatccctggtcgcggcggcaccgcgcacggcgtgtggccaaggcctcccgatcggggctgcgggagctggccgaaggccaatggagccaggcgctcggtcatctgcgcaccgccgcggagcacgatcgccagcccttggtgcattacctcggcgctgcacgagcggctagcgagctgggggaatacgagcaaagcgacgaattgctgcgcaaggcccgcgaacgcgagcccgaggccggcctggcggtgggcctgacgcaggcccagttgcagatcgcacgctgccagtacgtcgaggcgcgtgagtcgctgtcggcactgcacaacgagcatccgcgccacccctatgtattgacgctgctgcagcagctctacgtgcagttgcaggactggccggcactctgccggctgttgccggaactgcgcaaacatcgcgtgttacctccggcgcggctggacgagctcgaattgctggcctggaccgctgcgctggagcaggccgcgacccgtgacgatgcgcagcaggcgctgcagcaatgctggcagaccgtacccagcaaactgcgcagcgagccgttgctggtacgcgcctatgccgatggcttggggcgctcgggcgcggaggagaaggccgaggaggtcctgtatgccgcgctcaaacgtcagttcgacgatcgtctggtcgagcgttacggccgcgttcgcgggcgtgagccggcacgccagttggcaaatgcggagggctggctgaaggcgcatcccgagaacgctcaattgctgcttgcgcttggccgcctgagcctgcgcaacgagttctggggcaagtcgcgcgactacctggaagccagtctgaggctggaacatcgggccgagacctgtgccgagctggcgcgcctgctgtcgcagttgggtgataaggaacgcagcaatcggctgttccaggaaggcctcgggctactcgatcaacccatcagccagccgctgccggtcgtaagcaacgcctagcggtccaggcgctacgggacgtgacgtcgatcccgtagcgcctgcagcgacctttcgtatggcttgcagcccatcgcgcgcagcactaccgtagcgaacttttcttctctgcggagtcaccatgaacctcgccagcccacgttcgctgttctttctggctttcatcggctgcgcgctgatgatggccgctgcgctgtacctcgagcatgtcgttgggctggcgccctgtccgctatgtatcgtccagcgtatctgtgtgatcggcttcgggctggtctgcctggtcgccgcgctgcatgggccgagcaaaaccggtcgccgcgtctattcggtcctggcgttactgttcgcggtcgcgggcggtggcacggccatacgccagatctggttgcagaacatgccggccgaccagctgccaagctgcctgcccagcctcgaatacatgatggatgcgctgccgttccaggagatcgcccgcttggtgcttcacggcacggccgaatgcgccgaagtcagctggacgctgctgggcatgagcattccggagtggaccttgctcgcgttcatcgccatggtggtgttctgcgtgtggcagatactgcgccgcgattgaggcattttgtcagggcgaacgaatgatcgctgcggttggtggtcaatgatccagaacgaagcggcggcacgggctcgtgcggggcgaatttcgatctcgctgcttgatgcttcgatcgccgcagcatagtctgctctggcagcgtcggctttcgtgccattgctgccactcacccaaggccgatatcccaagacaaaaaccgtctaggaaggcgcaacaggcatcatcgattagggaagtgaggtcatcatgctcgagagctgtcgaaacgcccaggaacgctggggcggtgtgcatctgctgatcgaccgctggctgcaagaacgccatgcattgatcaacgcattcgatgggctgcatgtcagcgacactaccgagagtcgctccgccttgcagaaattttgtgaaatcctgctcgactatgtctcggccgggcatttcgaaatctacgagcaactgctcaatgaagccgaggcgttcggagacgagcgcggtctcgagctcgcccgccagatctatccgcgcatcgaagcaatcacccaggtggcggtggccttcaatgatcgttgcgaaaagggcgactgcctgaacagccccgggctgccggatgagctcaagcatctgggccggttgctgcatgagcgtttcgagcttgaggactgcctcatcgaggtccttcacaccgcgcacaagcaggccgctgcgacggcctgatccgcgtcttttgtcgtcgggctgccatgctgtcggtggcggtcctgtgcaagccgaacagagctgtatccattccgccaggggggcgtttcatgccagcgaagaaaaacgcggtcaccactccgctgcacctgttgcagcagctgtcccagagtctggtctcgcatctggaaaaagcctgcaacgaggcactgaaggatgcagaaatgacgctggccaagctcgaaaagcagcgtggcaggacgcaggagaagatcatcaaggcgcgcgccaagctcgacgatgcaggcagtgccggaaaatcgaaagtgcagaccaaggcgcgtgccaagttggccgagctggatgacatgcttgccgtgttgcaggcaagacagagtgacaccctgagttatctggccgaattgaagcgtgatgcggagcagagcctgaagctggcccaaggcatcacgcaggtggaaaatgccgctgcccaagccctggctgctcgcggtaagcctgctgccggtgcggcgaatcgtcgtaaaccggcttccagcaccgcccgtgctccggcaaacaagcctgccgtcagcaaggcggctacaggctccctcccggccgccagccgagccaagcccgccgccaagaaagacgccagcgtcacgcaagacaaggctgtcgaagcgaagacgccggtagccaaggcaccgagcactgcgcgccgccgcccggccagaacgactgccaaggctgcagcaaccgcggcgcccgcaccggcggcaaagcccgccgtcgccaagaagccggcagcaagcaagggcaaagcggccaatcaagcatcaccggtcgccggctgagccgtagccgcgtggcggagcgtctgcaccgccacgcgcgtatcgccgcgcagatcggcacacagcggctccagccaggcgggtgatccgcttcccgctgaccagtgctgtgctgcggattgcaagcgccggagttgtaccttctctgcatccagttccagctgtttgacccgcatgcgcaaatcggccagctcttcatcgttggcggcctgctgtcgccaatgctgacgcagggcgcgtaatggcgcgaccacctgaacttgccaatcgttactgattgttttcagtcgctcgagcctttgttcgtcacaggccgcgttgcggcgctccagccaggcggcggccaatagcaggcagacgtccgcgcctgcggcttgcagctcgaggcaggcgggctctacaccgggctgggcgtagcaggcgagggcaaagcgccagagatcgtcagaggtcatgggcatcggtttttttcgtcggtggccggatggatttccgggcgacctgataaactccgccgccattatgatccgacttcagaacctcactctacagcgcggcccccagcgtttgctggaaggcgccgagctgaccctgcaccccggccagaaggtcgggctggttggtgctaatggcgccggtaaatccagcctgttcgcattgctgctcggggagttcacgccggacggcggcgactgccagatacctccggattggcgaatcgctcacatgcgtcaggaggtcgatacgctcgatcgcctggccgtcgactacgttctcgatggtgacgccgagcttcgtcgcgtccaggcggcactgcatgccgctgaggctgcgcacgacggcaccgcgctggcgcgtttgcatgtcgagctggacaacgctgacggctacaccgccgatgcacgcgcacgcaagctgctagccggtctgggcttcgcaaacgagcagatggatctgccggtgtccagcttctccggcggttggcggatgcgtctgaaccttgcgcaagcgctgatgtgcccctcggatctgttgctgctcgacgagcccaccaaccacctcgatctggacgccattctctggttggaggcctggctcaagggctatccgggcaccctgatgctgatctcccacgaccgcgatttcctcgacgaggtggttggccacgtggtgcatgtcgagcagcgcaagctgacgctctatcgcggcggctattcggctttcgaacgggcgcgtgccgagcgtctggcgcagcagcaacaggcgttcgagaagcagcaggcgcagcgtgagcacatggaggactttatccgccgcttcaaggcgaaagcctccaaggcacgccaggcgcagagccggatcaaggcgctggagcggctcgaagagttggccccggcgcatatcgattcgccgttcgacttcgcttttcgcgaggcggacaaggtctccagcccgttgctggatctggccgagggaagcctcggttatgccgaaaagcaggtcctgagtcaggtcaagctgcaactggtgccgggcgcccggatcggtctgctcggccccaacggggcgggcaagtcgacactgatcaagacgctggccaacgaactgcaacccctgggcgggcggctacagcgcggcgagaacctggtgatcggctatttcgcccagcatcagctcgatgcgctggacgcgaaggcaagcccactgctgcatctgcagcgcatcgcgccaggcgagcgcgagcaggtgctgcgagactttctcggcggtttcgattttcgcggcaatcgctgtgacgagccggtcctgcgcttctctggcggcgagaaggcacggctggcgctggccttgatcgcttggggcaagcccaacctgctgctgctcgacgagcccaccaaccacctggatctggagatgcgcctggcgctgacgctggcgttgcaggatttcgagggtgcggtgatggtggtatcgcacgatcgccatctgctcaaaagcaccaccgacgagttcctgttggtggccgacgggcgcgtggtggccttcgacggcgacctcgaggactatgcgcgctggctgattgattaccgcgcccgtcagcaaccggccagcgcaaccgaatcctccgccgacaagaccgacaaacgcgcgatgcggcaggctgcagccgcgttgcgtcagcaactggcgccgctcaagcggcaagcggacaagctggagaaggatctggcggctgtgcaggagcagttgtcagtcctggagcaacgcctcggcgatgccgcgctctatgaggcggcacgcaaggaagagctgcgtgagctgctggcccggcaggccgagctcaaggcccacgaaggcgacctggaggagtcctggctggtggccctggaatccctggaaaccttgcaggctcagctcgaggcaagtgcatgagcgaatcgatgctgtcactcgtccagcaatggcgcgacccactcctgttagcgctgcaggtcgtgctgatactgctcactgccttcatgctgcaacggctggtcgtgcgtgggctgggtcgactcggccagcgttacccgctgccacccgaactgttgctgccgctaagaggtggtttccgttggctgatcatcggcggtgcgctgatcatggtgctcgaacgtttcggcgtctcggcagcggtgctctggaccgccttctccggtttcgttgcggtggctgcggtcgccttcttcgccatctggagcgtgctatcgaatctgctgtgcgcggtgctcattctgacggtcgggcctttccgcgttggcgatctggtggagctggtcgaaagtttcgacaagcccatcgtcaaaggccgggtcatcgacatcaatctgctctacaccacgcttgaagaaagtaacgatgacggcgctaccgcagtggtccaagtgcccaacagcttgttctttcagaaggtagtgcgccgctggcgcggaacggacattcgatctcacattcacagctcccaccgcgagtaatccttatggaatggcttagcaatccggaaatctgggtcgcgtttctgaccctgaccgccctggaaatcgtcctcggtatcgacaacatcatcttcatttccattctggtcggccggctgccgaaggagcagcagcccagggcgcgtttcttcgggctggcgctggcgatggggacgcggatattgctgctgctgtccatcgcctgggtaatgcgcctgaccgacaacctgttcacggtgttcgagcacggcgtgtccggtcgtgacctgatcctgttcttcggcggcctgttcctgttgttcaagagcaccatggagatctggcatagcgtcgaaggcgaagaggcgcaggacggtaccgctggcggagcggccaaggccggcttcatcggtatcattctgcagatcgcggtgatcgatatcgtcttctcgctggactcggtgatcactgcggtggggttggtgagcaacgtgccggtgatgatcgcggccatcgtcatcgccgtcggggtgatgatgctggcggccggcacgatcagcgatttcatcgagaggcatccgacgctgaagatcctggcattgtcgtttctgatcgtggtgggaaccctgctgatcgctgaggctttcggggcgcatgtacccaagggttatgtgtatttcgcgatggccttctcgctggcggtcgaggcgctcaatattcgtatgcgcaaggcgatgaagcgcaagctgaaagagccgctcaagctgggcaaggatatgccggactgacattaagggccgcctcggcgtctaccggggctctgcgaggatcaaccatgacgctcgatacttggcttgccttctttatcgcctgctgggtcatcagcctgtcgccaggtgccggagcgatcgcctcgatgtcctgtgggcttcagtatggattctggcgcggctactggaacgcaatcggcctgcagattgcgctggcgctgcagattgcggtggtggcggcaggcgtcggcgcgatactggcgacctcgtcgctggcgttcagcctgatcaaatggtttggtgtcgcctacctgctatggctcgcactgaaacagtggcaagccgtgccatcgatgctcgacgacagcgccgggccgaggccgatcggacggccgctggccttggtgttccggggtttcctggtcaacgccagcaatcccaaggcgatcgttttcattctcgcggtgctgccgcagttcctcgacccgcacggtgatctggtcgtccagtatcttcagatgggcaccaccatggtggtcgtcgacctgatcgtcatggccggttataccgggctcgcggcgaaggttcttcgcctgctgcgcacgccgcggcagcagcggctggtcaatcgcagcttcgccaccatgtttgccggtgcggcggcgttgctggcaacggtgcggcgggccgcggtatgacctcgccaggcgcgctgcgggtgtgggtagacgccgatgcctgccccaaggcggcgaaggagcagctgatcaagttcgctctcaagcgcaagttcgaggtgctgctggtcgccgggcagagccagatcaagccagcattcgcctgcgtgcagttgatcgtggtgccgagcggtccggacgcggcggacgattatctggtcgagcacgcacagcccggcgagttggtgatctgcagcgatgtgccgctggccgatcggctggtcaagaagggcgtggctgcgctcgacccgcgcggtcgggagttcgacgagcgcaacatgggcgatcgcctggctgtgcgcaatctgttcaccgacctgcgcgaacaggggcaggtgggtggtggtcaggcggcctacggcgagcgtgatcgccaggccttcgccaatgctctggaccgcctgctgactcaactgctgcgcacccgggcgcgttagtcggccgtcgcgattgggccggctagccgcagaggtaggttccagtgcccaccgcgatcaatacgttctcctcgttatgcagctcggagcgaaccaccgcaaccttgttgccggagcgcagcaatgtcgcgttggcactgaaacgcttgccgcggcccgggcgtaggtagtcgattcgaagatcgatggtgcccagacgcgagaggcgcaaggcacgctcctcggcgctcagatgctgatgcttttcgaaagcaccgatcatcgccgtggctccgccgacaacatcgagcagcgaggcgatcacgccgccgtgcaggatgccgtggtagaagttgccgaccagttcgggcttcatcggcagatgcatcactacccgctcccgtgacacctcgtcgagttcgattccaaggtattcgttgaacggaatgcgctcgaagagctggcgcacggcctggtgttgcgctgcgatgcggtcggtttcggagagaggcatggatgggcttcctggcagatcctccaacgctgccggagcgcgagcgagttgaccagaggcgcggcgggagcgccggtacgattggccatatagccccaggctgaacggaaaatcccgagccgggggctcgggattctggtcctggatacgcctggctacgggtgggtgagttccaatacgcgatcgaccagcttgtagatgcccgacgccgcgtcgctgatcgactgcgccagcatgtaggccggggtggtcaccagtttatgtctggagtcctcgacgatctcgctgacctcgcatgcgtggtgttcgacgcccatctctctcgaagcggcggctgccgggtcatcatcgttgcccagcgtgcagaccacgccggggccgaatatctgcgccgccatggtcggtgcgatgcacatcatgccgactggcttgcctgccttggcgaaggcctgcgcgaccgacagcacatctggaagcacggtgcagcccgcgccttgcagggcgaagtcggaaaggttcttcgcggcgccaaagccgccaggcatgatcagggcgtcgaacgcttcgacgtcggcttcgcgcaagtccttgatctcaccacgggccaggcgggcggactcgatgagcacattgcgactttcctgcatctgctcgccgttcagatgattaatcacatgtcgttgctcgatgtccggcgcgaagcattggaccttggcgccacgctggtccagccgcagcagcgtgatcactgtctcgtagatttccgagccgtcatagacgccacagccggaaagaatcacggcgaccttcttgttcataggggtactcctggtcagatttcagcggctcggcaaacgcaccgggcgaaggcctccgatgctaatgcctggcgcggtgcaaggtaagcctgcgcctgtaggttggatacgtcagcgcgccaggtgttcaggcgtcgcgacgtagggcgggccgcttgggttcggggttttgccgatcaaagcactggccgtacccgctccgggtggcgacaatgaccatcatcagtggccaatgcgaccgaggctgtcatcattcggtcacgaagtcggcttataaacgtcatattcgcccgtgctgcgggccaggagttcactgtgagtttcgttccagccaatcggttgtttcccgccacccgtctgcgtcgtaatcgccgcgatgagttttcgcgccgcctggtgcgtgaatgccggctgaccgtcgatgatctgatcctgccggtgttcgtcctcgacggcgagaatcgccgcgaacaggtgccttcgatgcccggtgtggaacggctgtcgatcgatctgctgctgcaagaggccgaggagtgggtggcgctgggtattcccgcgctggcgctgtttcccgtcacgccgctggagaagaagtcgctggatgcggcggaagcctggaatccggacggcatcgctcagcgtgccacgcgagctctgcgcgaacgctttcccgagcttggcgtcatcaccgatgtcgcgctcgacccgttcactacccatggccaggacggcatcctcgacgaacagggctacgtgcagaacgatgtgaccgtcgatgcgctggtgcgccaggccctgtctcatgccgaggccggggcgcaggtcgttgcgccttcggacatgatggacgggcgcatccaggcgattcgcgaggcgctcgaggtggccgatcaccataacgtacggatcatggcctactcggccaaatacgccagtgcgtactatggcccgtttcgcgatgccgttgggtcggcggcgaacctgggcaagggcagcaagaacacctatcagatggacccggccaacggtgacgaggcgttgcatgaagtcggcgcggacctgtccgaaggcgccgatatggtcatggtcaaaccggggatgccgtacctggatatcctctggcgcgtcaaagatgcctttcgcgtgccgacgttcgtctatcaggtcagcggtgaatacgcgatgcacatggcagccatccagaacggctggctgagcgaggcggtgatactcgaatcgctgaccgccttcaagcgcgccggcgccgatggcatccttacctatttcgccaaacaggcggcacaacaattgaaacaggggcagtgagccctttcgaggcagatcgatgaccaatcagggactcagcgaaagcgaattgcagctggcaaccgtcgaggcgaccctcgagcagccggccccgccagcgcccgaggtggagaaggtcgaggaggcgcccgccccgccggtcccgccgcctaacctggacgacaacagcctctatatccaccgagagctgtcgcagctgcaattcaatatccgcgtgctggagcaggcgctggatgagtcctaccccttgctggagcggctcaaattcctgttgatcttctccagcaacctcgacgaattcttcgagatccgtgtcgccggcttgaagaagcaggtgaccttcgcccgtgagcaagcgggggctgatggcctgcaaccgcaccaggcgctggcgcggatttccgagctggtgcacgagcaggtcaaccggcagtactcgatcctcaacgaggtgctgctgcctgagctggccaagcatcaggtgcggttcattcggcgacgctactggacgaccaagctcaagacctgggtgcggcgttatttccgcgatgaaatcgcgccgatcatcaccccgatcggcctggatccaacccatccgtttcccttgctggtcaacaagagcctcaacttcatcgtcgagctcgaaggtgtcgacgctttcggtcgtgactccggcctggccatcatccccgcgccacgactgttgccccggatcattcgtgtccccgaggaagtgggcgggccgggggccaactatgtgttcctgtcgtcgatgatccacgcccatgccgacgacctgttccacggcatgaaggtcaagggttgctatcagttccgcctgacacgcaacgcggacctctcggtggataccgaagatgtcgaagacctggcgcgggcgctgcgtggcgagctgatttcccggcgctacggcgatgcggtgcgcctggaggtggtcgatacctgccccaaacacctcgccgacttcctgctcaagcagttcagcctgagcgagagcgagctgtatcgggtcaacggaccggtcaacctgacccggctgttcagcgtcaccgggctcgacagccatcccgagctgcaatacacgccgttcacgccggcgattcccaagctgctgcaaaacagcgaaaacatcttcagcgtggtcggcaagcaggacatcctgctgctgcatccttacgagtcgttcacaccagtggtcgatttgctgcgtgaggcggcgaaagacccctgcgtgctggcggtcaagcagaccctgtaccgctccggcgccaactcggaaatcgtcgatgccctggtcgaggcggcgcgtaacggcaaggaagtcaccgcggtgatcgagctgcgtgcgcgtttcgacgaggagtcgaacctgcagctggccagtcgcctgcaacaggccggtgccgtggtgatctacggcgtggtcggctacaagacccacgccaagatgatgctgattctacgccgcgaaaatggcgagctgcgtcgttacgcgcatctgggcaccggcaactaccacgccggcaacgccaggctgtataccgattacagcctgctgacatccgacgatgccctgtgtgaagacgtatccaagctgttcagccagctcatcggcatgggtaagaccatgcgcatgaaaaagctcctgcacgcgcccttcaccctgaagaaagccctgctcgacatgatcgcccaggagacgcagcacgccagtgaaggcaagccggcgcacatcattctcaaggtcaattcgctgaccgacgcgaagatgattcgcgccctgtacaaggccagccagaccggcgtgcgcatcgatctgatcgtgcgtggcatgtgctgcttgcggccgggcatcaccggggtttcgcacaacattcaggtgcgctcgatcattggccgcttcctcgagcacagtcgcgtgttctatttcctcaatggcggcgatgagaagctctatctgtccagtgccgactggatggagcgtaatctggatcgacgggtcgagacctgcttccccgtcgagggcaagaaactggtgacgcgggttaaaaaagaactcgaaggcttcctcacggacaacacccagagctgggtactgcagcccgatggcagctacttgcgcaacagtccgagtggcaaccagaacccgcgaaacgtgcagaacgccttgctggagcgactcgggagtccgaccgctcgttgacgcggcggcggcagcgcgccgcgccgcgccgcttcagcgtaccgtgagagtgaagtcgatccgcttgagccagtccgcttccagcgcgaagtcggcctgggtcagcgggttgttggccagccagccttctggaaaggcgacatccaggctgttgtcgccagccttgagggtgaattccggcgcctgctgcggcccgcgaatgtggtgaaagagaatggcgaagcgcagcaatacgcagagctgcgtaagcttgacgccgtcctcgctcagttcctcgaatttctgcttgggtatgttgcggcggtggccgcgaaccagcagcgccagcatttgctggtcctggcgggaaaagccgggcagatcggaatgttcgatcaggtaggcgccgtgcttgtggtaatggtagtgggcgatgtccaggccgacctcatgcacccgggcggcccagccgagcagctcgcgcaaccagccctcgccgagcccccagtcggctgacacctggtcgaaggcttccagcgccttgctttcgacccgtgccgcctgttcagtgtcgacgtggtaacgctccatgagaaagctcagggtgcgatcgcggatatcttcgtgatgatgccggccgatcaggtcgtacagcacgccttcacgcagcgctccctcggaatgcgccatgctggtgagctccagtgcatcgaagatcgcttcgagaatggccagcccggcagggaagatgcttcggcggtccggcttgatgccgtccatgtccagcttgtcgacgtcgcccagcttgaacagcttgcgcttgagccagccgatgccgtcggcggtgacttcgccgttgcccatgccggcacccttgatcgccagcccgacggcgcggatggtgcccgaagcgcctaccgcatcctgccagccgagccgacgcaagccatgctcgatgctcatcagctccaggcgggccgccgtatacgcctgggcataacgcgccgccgtgatcttgccgtcgcggaagaagcgctgggtgaagctgacgcagcccatctgcaggctttcgcgcaatagcgagtcgaagccttcgccgatgatgaactcactgctgccgccgccgatatcgaccaccaggcgtttgccggtggatgtcgggaaggtatgcgagacgccgaggtagatcagccgcgcttcctcccgaccggagatgacttccacctgatggtcgatgatggtttccgcctggcgtatgaattgcgcgcggttgcgcgcctcgcgcaaggcattggtacccaccacgcgcaccgccccctgcggcagatgattgaccagctgagcgaagcggcgcaggcagtcgagcccacgttgcatcgcagcgtcatcgagcatcctgttttcatcgatgccggcggcgagctggaccttctcgccgagccgctcgaggatgcgcatctcaccgttgctggtgcgagccaggaccatgtgaaagctgttcgagccgagatcgatggcggcgatcatcggcatgggttcggtggctggtgggcgcatgggacagtctctgtgcaaaaccccgacatcctgacatgatcgtccgcatccgccaacgcgcaggcgccggtcagcgccatcttgtcgcgatgcgccgggcaccggctgcgccgcgctgtggtgaaagcccgagcgacggcctgcggctttcggtccgtcccaagccgggctatgatggcgtcactttcggttttgaccctggagaacatccatgagcgaatacatcaacaatgtcagcgacagcagcttcgagcaggacgtgctccaggcagatggccccgtgctggtcgattactgggccgagtggtgtggcccctgcaagatgatcgctccggtactcgacgaaattgccaaggattacgaaggtaagctgaaggtctgcaagctgaacatcgacgagaaccaggaaaccccgccgaagtatggcgtgcgcggtatcccgacgctgatgctgttcaagaacggcaatgtcgaggccaccaaggtgggtgcgctgtccaagtcccaactggccgcgttcctggacagcaatatctgaccggcaggtcgtgactcaaagccctcgcaaatgcgggggcttttttctgagcgcaggctggacgcttcgcctgcgtgatgctaaattcggcctcgcgacgcttctccgtcgccctctgcatgccgtcgccgacgcacttccgcctcataaagcacaacgaacctgttcgtctcttgctgcgcggcttctcaagctaatcgctttcttcaccccttctgactctctctatgaatctgaccgaacttaagcaaaagcccatcaccgaactgctggaaatggccgaacagatgggcatcgacaacatggcccgttcgcgcaagcaggacgtgattttctccttgctgaaaaagcacgcgaaaagcggtgaggaaatctccggtgatggcgtgctggagattctgcaagacggcttcggcttcctgcgctccgcggattcgtcctatctcgccggccctgacgacatctatgtctcgccgagccagattcgccgcttcaacctgcgtaccggtgacaccatcgtcggcaagatccgtccgccgaaggaaggcgagcgctatttcgcgctgctcaaggtcgacacgatcaacttcgaccgtccggaaaacgccaagagcaagatcctgttcgagaacctgacgccgctgttccccaaccagcgtctgacgatggaagccggcaacggctccaccgaagacctgaccggccgggtaatcgacctctgtgccccgatcggcaagggccagcgcggcctgatcgtcgctccgccaaaggcgggcaagacgatcatgctgcagaacatcgcgagcaacatcacccgtaacaatcccgagtgccatctgatcgttctgctgatcgacgagcgcccggaagaagtgaccgaaatgcagcgcaccgtgcgcggcgaagtggtcgcctcgaccttcgacgagccgccgacccgccatgtgcaggtcgccgaaatggtgatcgagaaggccaagcgcctggtcgagcacaagaaggatgtggtcatcctgctcgactccatcacccgtctggcacgcgcctacaacacggtgatcccgagctccggcaaggtgctgaccggcggtgtcgacgcccatgccctggaaaagcccaagcgcttcttcggtgcggcgcgcaatatcgaggagggtggcagcctgaccattctcgccaccgcgctggtggaaaccggctcgaagatggacgaggtgatctacgaggaattcaagggtaccggtaacctcgagttgcagctggaccgccgcatcgccgagaagcgtgtattccccgcgatcaacatcaaccgttcgggtactcgtcgcgaggagttgctgaccagcgaggatgagctgcagcgcatctggattctgcgcaagctgctgcatcccatggatgagacggccgccatcgagttcctactcgacaagctcaaggacaccaagaccaacgacgaattcttcatgtcgatgaagcgcaagtaagcgtctggtcgttatcgccaaggccggggaaacccggcctttgtctgtctgcaggttttggattcagcggtgtcgaggctacactttgcagccccaacctgccggcccctacgaggctcaagcatgcagtatcgcgatctgcgcgactttatcagcggcctggaacaacgcggcgagctcaagcgcatctcgacaggcgtctctcccgttctggaaatgaccgaaatttgcgaccgcaccctgcgcaagcaagggccggcgctgctgttcgagaatccaaccggcttcgatatgccggtactcggcaatctgttcggcacgcccaagcgtgtcgctctgggcatgggcgccgaagacgtttccgagttgcgtgagatcggcaagctgctggcgtttctcaaggagcccgagcctccgaagggattgaaggatgcctggagcaagctgccgatctacaaaaaagtcatcagcatggcaccgaaggtgctcaaggacgccccctgccaggaggtgctgcaggaaggggacgaggtcgatctgtccagcctgccggtacagacttgttggccgggcgatgccgggccgctgatcacttggggcctgacgattaccaaggggcccaacaaggagcgccagaacctcggtatctatcgccagcaggtgatcggccgcaacaaggtgatcatgcgctggctcagccatcgcggcggggcactggatttccgcgagtggtgcgagaaatacccggatcgaccctaccccgtggcggtggcgctgggcgcggatccggccaccattctcggggcggtcacgccggttccggattcgctgtccgagtacgcgttcgccggcctgctgcgcggtagtcgcaccgagctggtcaagtgccgcggcagcgatctgcaggtgccagcgggtgcggagatcgtcctcgaaggccatatccagcctggcgagatggccgatgaggggccctatggcgaccataccggctactacaacgaagtcgatcgcttcccggtgttcaccgtcgaacgcatcaccaggcgccgcgatgcgatctatcacagcacctacaccggccggccgccggatgagccggcgatactcggtgtcgcgctgaacgaagtgttcgtgccgatcctgcagaagcagttcccggagatcaccgacttctacctaccgccggaaggttgctcctaccgcatggcggtggtgaccatgaagaaacaataccccggccacgccaagcgggtgatgctgggcgtctggagcttcctgcgccagttcatgtataccaagttcgtgatcgtcaccgacgacgatatcgatgcgcgtgactggaacgatgtgatctgggctgtcaccacgcgaatggaccccaagcgcgacacggtgatgatcgagaacacgccgatcgactatctggatttcgcgtcgccgatttccggtctgggcagcaagatggggctcgatgcgacccataagtggccgggcgagaccagccgcgagtggggccgtgccattgtgcaggacccggcggtcaagcaacgggtcgacgaactctgggccgagctgggtatcgactgatgacaccaaggcgttttttcaggttttcgaatagatgaaagttaccctgcaaccctccggtgcggtgctcgatgtcgagcgcggcgagctgattctcgatgcggctcgccgactgggctacgactgcccgcaggcctgccgtaatggcaattgccagatatgcgccgcgctgctggtcaacggccgggtgcgccagcgtggcgagagccacgaccacggcgaggttttcgcctgtctggccgagcctgaagaggattgtgttctgctctgggatggtgtgctcgcacccggtgagctgccggtgcgcacgctcagttgccaattgatcagctgtgaagcggttggcggcgacgtttttcggctgctgctccgcgcacccgcaggcaagccgccgcgctatcacgccggacaatacctgctgttgcagcgagaggatggcgaatacagcgcgttttcgctggcgtccgcgcctgggcgtggtcgagagctggaattgcacgtgctggcgcgcgagccatcgacgatcggcttgctcgaatttctcaggcgtcgcgggatggtcaacgtgcagatgccgttcggcgacacccatcttgccgagctgccggatggaccgttggtgctgatcgccgcgggaaccggcatggcgcagatgcacagtctgatcgagcattgccgtgcccagggattccctcatccggtgcacctgtactggggcgttcggcgcccagaggatttctaccagttgccgcattgggatgaatggcagagcatgcccaatctgcagctgcatcaggtggtcagtgatgtctgcggctggccgggacgttgcggcatgctgcacgaagccgtctgtgaggatttcagcgatctgaagccggttcacgtctacgccagcggctccccggcgatgatctacggcacgctggatgcgctggtcgaggcagggatggacgcaacgcagatgcgcgcggacgtgttcgcttacgcgccgcgagcgtcataagggcacctgcggcgctgttcgcgcccatgtgacgagcgcagcaaacgagcacgcaacaaaaagggaggccgtccctccctttttttcatcctgagtcagcgggcttgccgttgctgtagcagcaggttgctgtaaccgctggctgccagggtcttctgcgccttgccgagttggtctcgatcgacgtaggggccaaccagtacccgataccagacctcatcgcggacggtcacgttttccacccggacgtcctggccgagcaggatgatctgtgcgcgaaccttttccgcctcgttcttctgccggaacgagccggcctgcaggaagaactgcgtcactggcgccttggccacggtagggggcggtggtggcggaacctgaccgttcagcgctgcctcggcgcgtgcggcgtcgattttcgcggcatcctcgggcgtgactggctccggtgtcggcgtcggcacctcgggcttgggtggctcgggcggcaagatgacttcggactcgggcagcagggtgtagaagtcgtacttcggcttgaccgcctggccgttgctcggagccgagcgcttcggctgctccttgggcttggcggtttccttgtctcgcttgatctccttgccgccgggctccaggttcgtcaggaacatgatgaagccgccaatgaccagcccgcagatcaaccagatccagccgggaacgggcttcttggccggggcttggtagcggctcgcgccgcgcttcggggcgggtttcttcctggcagccacttacatccgctccagcgtttccaggccaagcagctccagcccttgttggagggtcttgccggtcagggcgccgaggcgcaggcggctctgtttcacggcgtcattctccgcggtaaggatcgggcagtgctcgtagaagctggagaataatccggccaggtcgtacagatagctgcacagcagatgcggcacgcctttttcgccaacgctgttaagcacttcaccgaactgtgcgagcttggctcccagtgcctgttcctgttcggcttcgagccggatctcgccagcgagcccgtccatgccggtgccgagcttgcggaacacgctggccacccgggtataggcatagagcaggtagggcgcggtgttgccttcgaaactgagcatctgatcgaagttgaagctgtagtcgctggtgcgatgcttggacaggtcggcgtatttcaccgcgccgatgccgaccgcacgcgcgatctgccgcagttccgcttcgtccagatcggggttcttgccttttaccaggctgtaggcgcgctgttcggcctcgtcgagcaggtcgaccagtttgacggtgccgccgtcccgcgtcttgaacgggcggccatcggcgccgttcatggtgccgaagcccatgtgttcgagttgcatggccgggtccacgaaaccggcgcggcgggcgacttcgaaagccatctggaaatgcagggcctgacgctgatcgacgaagtacagggcgcgatcggcctttagctgccggctgcggtagcgcatggaggccaggtcggtggtcgcatacaggtagccgccgcctgccttctgaacgatcaccgggagcggattgccctcggcgttcttgaattcctcgaggaaaacacactgggctccgttgctttcgctaagcagtccctcggccctgagcgatgcgacgatgtcgctcagctcggcgttgtaggcgctttcacccatgacatcgtccggcgacagcttgacgttgaggcggtcatagaccttctggcagtgcgagagggatatttcgttgaaacgcgtccaaagcctcaggcaatcggcatcgccggcttgcagcttcaccaccagctcacgggcgcggtcggcgaacgcttgcgagtcgtcaaagcgctttttcgcggcgcgatagaactgttcgaggtccgatagctcgctttctgcggcgctggggttttcctcgaggtaggccagcagcatgccgaactgtgtgccccaatcgccgacgtggttctgccggatcacctcgtcgccgagaaactccagcacccgcgccacggcatcgccgatgatggtcgagcgtaggtggccaacgtgcatttccttcgccaggttcggcgacgacaggtcgaccacgacgcgctgtgctgggcccgccttgctcacgcccaggtgtgggtcggcgagtgctgcgtccaggcgttcggccagcgcggcactgttctggaagaagttgagaaagccgggaccggcgatttccactttgctgacgctggcatcggacggcaatgcctcgatgagcttctgtgccagctcgcgtggtttcatcccggcgggtttggccagcatcatggcgatgttgctggcgaaatccccgtgagtcttgtcgcgtgtgttctccacctgaatggtcgggctcaatccttcgggcagcacgccttcagcggtaaggcggctcagggcttgctggatcagatggcgaatgctgtctttcatcgtttgctcggtcggcccgaaggctttggtcgaaaactgggcattatcggtgcccggagggcgaaccttcaaggcttaaggcgttgagttgcaggttgtgccgggtttcgtcggctcagaacagatcgatcgggtcgatatccagcgaccaccgcaccgtacggctgccaggtagcgcctccaccagtggcagccatgcgctcatcagtttgtgcagcggggctcgtgcattggcctgcagcaacagttgtgctcggaagcggccggcgcgtcgctccatcggagcgggcaccgggcccagcagctcgatgccgtcgagcccgagttggcccaaaagctgttcggcctggccgcaggcctgatcaaggaagtcttcagcctgcccaggcttcgtcgcttcggcgcgcaacagcgccaggtggctgaagggggggagcccggcggcgcgacgctcgctcagggcttgctcggcaaaggcgaaatagccttgctcggtgagctgcaccagcagcggatggtcggccaaatgggtctggatgatcaccttgccgggctcgccggcccgccctgcgcgaccggccacttgcacgatcagttgggccatccgttcgctggcgcgaaaatccgcggagaacaagccgccgtcggcgtcgaggatggcgaccagggtaactcgcgggaaatggtggcctttggcaagcatctgtgtgccgacgagcaggcaaggttcaccgcggttgatggtgcccaacagctgttccatcgagcccttgcgtgacgtgctgtcgcgatcgatgcgcagcaccgggtagtcgggaaacagaacgcccagccgttcttcggcgcgctcggtgccggcgcctaccggacgcaggtcgagcttttgacattccggacagctacgcggcgggcgctcggcgtggccgcaatggtggcagcgtagctcgttgtgacgctggtgcagggtcatccgggcgtcgcagcgcgggcattggctgagccagccgcagtcatggcagagcagtgacggagcgaagccgcggcggttcaggaacaccagtacctgctgtcctgcggcgagggtctgcgccatggcctgctgcagcgggccggaaatcccggagtccagtgggcggcttttgacatccaggcgcagaaagcgcggtgctttcgctccgccggctcgctgggtcagcttcaatagcgcgtaacgaccgatgtgcgcattgtgcaggctttccagcgacggcgtcgccgacccgagcaggatcggcaggttctcctgacgcgcccggaccacggccaggtcgcgggcgtggtagcgcaggccctcctgctgtttataggacgcgtcgtgttcctcatcgaggatgatcagccccgggtttttcatcggggtgaacagcgccgaacgggtgccgatgatgatgtccgcctcgccgtctcgcgctgccagccaggcgtccaggcggtcacgatcgttgacattggaatgcagcagggcgatacgcgcattgaagcgctgttcgaagcgcgccagggtctgtgggccgagatttatttccgggatcagcaccagggcctgtttgccggcttcgagcacctgatggatcagttgcagatagacctcggtcttgccgctgccggtgacgccggccaggaggtaggtctggaagctgcccaggcctgcgtgtatggcctcgaaggccgcacgctgttcgccattcagcggcagctctggttgcagcagccagctgccttgatggcgtcgggcctgatggtagcggcgggtctcgacgtgcagcaggcctttctgtagcagcaggtcgagactgtccttgctcaactgcagctgtgtcagcagtgagtgagccactccgtgcgggtgttgggcgatggtcttcaacgcctcgcgctggcgcggcgcacggctcaggcgcgggtcttccgggcgtgcaccactggttacatgccagaagcgctcctgccgcgcttcggcgggttcgccttggcgcagcaggaccggtagcgcccagctgagggtgtcgccaaggctgtgctgataatagtgggcggtccacaggcacagcttgaacagtgccggcggcagcggcgggcgggcgtcgagcaaggccagcgctggcttgagtttcgcctccggcacctcgctgtgactggcgacttcgatcagtatgccgacgacatcgcgacggccgaacggtacccgcagccgcatgcctggttgcagtgcggcattagaagtaccggcgggcgggaggtagtcgaaaagcctgcgcaaaggcgagggcagcgcaacgcgaagtatgggttggggcacacgaaagtccttggcgaggagcgccgatcttaaacgatccggcgctgcagcaggctgggtcatgcgcagatcgggttccggaagcagcatcgctcgagggctggcacacaccgcgcaggtgatcggctgcccttgcatcgctaccctgctctggtatcattcgcgcccttccgtgcggtactcgacatagggtcgggtggcggcacacatcctagaggatacttccatgaaagccgatatccatcctaactacgttgaaatcgaagccacttgcagctgcggcaacgtcatccagactcgctccacgctgggcaagaacctgagcatcgacgtttgctccgagtgccatccgttctacaccggcaagcagaaagtgctggataccggcggccgtatcgaccgcttcaagcagcgcttcggtgtgttcggcgccaagtaagcggttgccgcggcggaagtcccatgaggtttccgtgcagattgaaaaaggcgtccctggtgggcgcctttttcgtttctattttcctcactttccaggcccaggcgctttgccctgccgatgggccgctctcgagagagaaagtggccaaggtcatcgatggcgacacgctgcgtctggccgacgggcggagcgtccgcctgatcggcctgaacgcgccggaaatggggcgcaagggtgctgttgccgagcctttcgcgcaagccgccaggcgtcgcctgcaagcattggtgagcgacagtggtggttacgtaaggctgcagctcggacgtcaggccaaggatcattacggtcggctgctggcccatgcctatgatgaacagggcgacaatctcgaggcgcgcctgctcaccgaaggattgggcttcttcgtcgccatcgcgcccaataccgacctcgctgaatgccagcttgcggcagagcaacaggcgcgaagggcaagccgagcgctatggcgtcggtcgccggtgatccaggccggtgagttgcgcggcggtggattcgccctgatcagcgcgcgtgtcgagcgtgtgcaggccaatcgcggcgggatctggctggagctgggcgactcggtagtcctccacattccctattcgtccgccgaggcattcgccggagtgttggacggcctgccgggcaggcggatcgaggtcagagggtgggtgatcgaccgcaaagggcgtgcggattcggggcaagcgcgctggatgctgaagctgactcacccgtcgatgctggttgtccagccctgacagagttcgacgtagagagaggacggcttagaggtcgcctgtacgctgaaagtcgtaaacgcagcacttgacagtcagcttttcccgttcgcttgtgacgacgatcggtcttggcgtatgctcggccccctgtctgtcccagtaaaaaataagcggaatgccccatgactgacctgaaaactgccgctctcgactaccattcccagcctcgcccgggaaagctgagcgtcgagctgaccaagcccacttctaccgctcgcgatctgtcgctggcgtacagccctggcgtagcggagcccgtacgtgaaatcgctcgcgacccggagctggcttaccgttacaccggtaaaggcaatctggtcgcggtgatttccgatggcacggccatccttggcctgggcgacctggggccgctggcttccaagccagtcatggaaggcaagggtgtgctattcaagcgcttcgccggtgtcgacgttttcgatatcgaagtcgatgcggaaagccctcaggccttcatcgatacggtgaagcggatctccatcactttcggtggcatcaatctggaagacatcaaggcgcccgagtgcttcgacatcgagcgggcgttgatcgaacagtgcgatattccggttttccacgatgaccagcatggcaccgctatcgtcaccgccgcaggcatgctcaacgcgctggagatcgccggcaagacattggaacaggccaagatcgtctgcttgggcgcgggtgctgcagcgacctcgtgcatgaaactgttggtcagcatgggtgcaaaaatcgagaacatcttcatgatcgatcgcaagggcgtcatccacgccggtcgtgacgatctgaatcagtacaaggcggtgttcgcacacgaaaccgaccgtcgcacgttggacgatgcgctcgaaggcgctgatgtctttgtcggcctgtccggcgcaaatctgctgagtgctgaaggcctcaagcgcatggcgcccaacccggtggtcttcgcctgctcgaaccctgatcctgaaatcagccctgagctggctcacgcgacccgctccgacgtaatcatggcgaccggccgctcggactacccgaatcaggtcaacaacgtgctgggcttcccgttcatcttccgcggcgcgctggatgttcgtgccacgcgtatcaatgaggaaatgaagatcgcagccgcattggccctgcgtgatctggccaagctgccggtgccggctgaagtcgccgcggcctacggcatcgatcaactgcagttcgggcgtgagtacatcatcccgaagccgatggatccgcgcttgattacgcttgtttccgacgcggtcgccaaggccgccatcgaaagcggcgtggcgaccttgccgtacccgtcgaattatccgctcaagtctgtaaacgacgtatttggcggctgatcgctcgctcgtgcccggctctggtcgggtttgcgaaaacacgaaaacccggcttatgccgggttttttgtttgtttggcggtcgaggagcatccgggtcgttgttgctcagccggagccccgccgcggcggggcgggtgctcgattggcttagaacaggtcgatcggggccgcctcggacgccggtagcggagtgtcgggcagagccgagccgggcagcaggtcgtcgcccatgctgggtggcgaatcctcgcttcgaaagacttcgaagtacgcgtctggagtgcctggggctgccgcgcgaccgctcttcggatcgatacgcagagtcaggatgccttccggttcggcgggggcatgttcaggcatgccgtccagcaccgtgcccatgtatttcatccatatcggcaaagctacggttccgccgtattcccggcgaccgaggctttgtggctgatcgaagccggtccagacggtggtcacgatgtcggcgttgtagccggaaaaccagctgtccttggactcgttcgtggtgccggtctttccggcgaggtcaccacgtcccagcgccagtgcccgtctgccggtgccgcgcttgatgacgtcctgcaacatgctggtcatgatgtaagcggtgcgctcatcgatgatctgctcggcctgtatgggctcctggggggcgggctcggaacctgccagcaaggtgtcctcctgggcgtaggaggtcgccgctgctgcggtttcggctagttctggcgagtgctgcgggactcgcgccggattggcttcgaatatcaccttgccgtcccggtcttcgactcgcgtgatcaggtagggctcgatcttgtggccgccgttggcgaacgcggtccagccagtggcgatctccatcggggtcaaggtcgccgtaccaagcgccagcgaaaggttcgccggaaggtcctcgggcttgaagccgaaacgtttgatgtagtcgatcgtgtagggaatgccgagcgtgcgcagcagccggatcgagaccaggttgcgcgacttgtaaagagcctcgcgcaggcggatcgggccaagaaatgtattattgtcgttcttgggccgccatacccgatccaggccttcctcaacgaagacgatgggcgagtcgttgaccagtgtcgctggggtgaaccctgcatccagcgctgcgctataaacgaagggcttgaagctcgacccgggctggcgcttggcctggatggcacggttgtagttgctctggccgaaggaaaagccgccggtcagcgcttcgatggatccatcaagcgggtcgagggacaccagggccccttgggcttcgggcacctggctgaacatcgcctgctcttcgaccatgcggacacgaatgacatcgccaggcttgaccacctcggatggggattttggttgcagtcccaggctgttggtgttgatgaacgggcgagcccacttcatgctttcccagctgacgatgtgttcgctgccgtcgcgaagcagcaccttgaccgagtccttcgacacggagcttacgaccgccggtaacaggccggattgactgcgataggtaccgagtgccttcaaccaggcggccggttcgttgcccggcagatgggcttcagggccccggtagccatggcgctggtcgtactcgatcaatccgtcacgcagagcctggttggcagccatctggcgatcgctactgatggtggtatggacgcggaatccgtccgtgtaggctgcgctgccgaaacgcccgaccatctctgcgcgagccatctctgctatgtaaggtgcgtcgagttcgggtgaggcgccgtgataggaggcgtcgacttcctcggccaatgcttgctggtagcgggcctcatcgatctttccgagccggtacatgcgtcccaggatccagttgcgtcgttccttggcgcgtgccgggttggccagtggattgaatgccgatggagccttgggcaggccggcgatcatggccatctgcgccaggctcagttcgccgataggctttccgtaatagacctgcgcagccgcctcgatcccgtaggctcggttgcccaggtagatcttgttgacgtagagctcgagaatctcgtccttgctcagctctctttcgatctggagggcaagcaggatctcgttgatcttgcgagaaaagcttcgttcgctggtgaggaagtagttcttcgcgacctgcatggtaatggtgctgccgccggtctgaatatggccggtcttcaataattgcgtggcagcgcgcatcaggctggaaacatcgacgccataatgattggcgaagttatcgtcttcggccgatagcagggcagcgatgaaatccttgggtatctgttcgaagctgatcggggagcggcgcatctctccatattcggcaatcagcttgtcatcgtcgctatagacacgcagcggaatctggagctgtatgctgcgtagcgagtcgaccgacggcaggttcgggctgaggtagagaaacgcgccactgagactgagtagtagtccgcagaaaatagccaggcatgaccatagaaaaaacttcagaaaacgcatcaggggtcgttgaatccagggtgagaaataaggtgaatgccgcagacgatgctgaaaggaaaaaccgttcacattataagcggtttttttaccggggagccatttgcgcttctgtcaaggctgttatctaatgcggacaaacataattaatccgtaagtagcggataaagaaggaaatcggccgtgctagggctcttcactaagaaagcgaacacgctgcttgggatcgacatcagttcgacctccgtcaagctactcgaattaagtcgatcaggctcccggtatcgggttgagtcatatgcggtcgagccgctgccggcgaacgctgtggtggaaaagaacattgccgagctggagggcgtggggcaggcgctgtcgcgcttgctgacgaaggctaaaaccggcgtcaaatccgccgcggtggcagtttccggctctgcggtcattaccaaaagcatcgagatggacggcgggctgagcgacgacgagctggaaaaccagctgaagatcgaggcggatcagtacattccgtatccgcttgaagaagtcgccatcgattttgaagttcagggccctgcagcacgctcccccggtcgggtagaggtactgctggcggcgtgccgcaaggaaaacgtcgagatccgtgaggcggcgctcgcgttggccggattgaccgccaagattgtcgacgtcgaagcctatgcgctggagcgctcatacggattgttggcgcctcaactgggtgtcggtcacgatgagctaaccgttgcgctcgtggatatcggcgcaaccatgacgacgctgagcgtgctgcacaatggccgaactatttacacgcgtgagcagctcttcggggggcgccagctaaccgaggagattcagcggcgctacggtctttcgatggaagaggccggcctggcgaaaaagcagggaggcctcccagacgactactacagcgaagtattgcaaccgttcaaagaggcggtggtgcagcaagtgtcgcgttcgttgcagtttttcttcgccgccggccagttccacgacgtggactacatcctcctggctggtgggacggcttcgataccggggctggatcggttgatccagcagaaaatcggaacccagactttagttgccaacccgtttgccgatatggccttgagtagcaaggtcaacgctggtgcgctcgccagcgacgcgccgtccctcatgattgcctgtgggttggccttgaggagtttcgactgatggcccggatcaaccttttaccttggcgcgaacagctccgggaggagcgcaagcagcgcttcctggtctcgctcgtcggagtcgcagtcatcgcggtgggcctgctatttctcgccgaccagtacttcactcacgccatcgagcagcagaacgcccgaaacgaattcatccgcaaagaaattgctgtgctggatgcgcgcatcgtcgaaatcaaggaactgcgtgagcgtcgccagcaattgctcgagcggatgaagatcatccaggacctgcagggtaatcggccgattatcgctcgggtgttcgatcagctggttcgtacgcttccggatggcgtgtatttcaccggcctgaaaatgactggcaagagcatcgccatcgtaggcggtgctgagtccaataaccgggtctctaacctgatgcgcaacttggatggttctgaatggctggaagcgccaaatctgaacgaagtgaaggccgttactgcgggcgcggtcgaccaggaaaacgtattccagctgacggtgcagcaaacgcaaccgggcaacggtacagaaggaggtaagccatgagtctggctagctccttggagagcctacgcagcgtcgacctgagcgacctggacatgaacaatctgggctcatggcccgctgcagtgaaagtgattgctgctcttttgctgatggcgctgatgctgggtggcggttactacttctatctcagtgatatgcaggacagcctggatcagcaaaaggcccaggaagaaacgctgaagcagcagttctcctcgaaggcttttcaagcggccaacctggaggcgtacaaagaacagatggtcgaaatggaggcgtcgttcggtgcgttgctgcgtcagctgcccagcgataccgaagtgcccggcctgcttgaggacatcactcgcacgggccttggaagcgggctcgagttcgaagagatcaagttgcagccggaagtcacccagcagttctatatcgaactgcctatccagatcaaagtggtcggtggctatcacgacctggcgactttcgtaagcggtgtatccagcctgccacgaatcgtcacgctgcacgacttcgaaataaagccggaaagccctgggtcctcttccaagctgcgtatgagcattctggccaagacctatcgctacaatgacaaggggctgcagaaatgaatggggcccgacttgttgcgctaggcctggggttggcgctgttggctggatgcgatggcggtggcgacttcgacgatctgagggcgtacatggccgaggtgcgcgccaggcccaagggttcgatcgaaccgttgccgtcgttcctgccttatgaagcgttcacctacagcgcctcttcgctgcgccatccgttccagccgccgatcaagatcgacctggcccagcggcaaaaaggatcgaaggacgtccggcctgacgagactcgcgtcaagcagttcctcgagcagttcaatatcgaaaccttcgtcatggttggcacgctgaccaacgaggcgggtaagtacgctttgatcaaaggcggcgacggggttcaccgagtcaagatcggtgactatctggggcgcaatcacggtcgcatcgttgatatcggcgaggctgaggtggatgtgcttgaaatcgttccggacggagagggtgggtggcttgagcgcccgcgcagcctgaccttgaaagagcggtcctgagtcatggcaaaaatggaaaacctacaccggtctgcacaacggaagccttttatgaatagcactctctctcgtctcggcctttccttgctggcggcgatcatttcgcccgcgctgttggcggctaacctgaattcgctggatgttgcgtcgctccccggtgatcgtgtcgagttgaaactcgcgttcgacgagccggtggcggtgccacgcggctatacgctcgatcagccggcgcgcatcgcgctcgacctacccggcgtatccagcaagttggcctcgaagagccgcgaactcggtgtcggtaatgcccgcagcgtaacggtagtcgaggcccaggggcgtacccggctgatcgtgaatctcacgtcgctggttccttactccacccgggtcgaaggcaatgatctgttcgtaattcttggcgaaagcaacggggcgtctcccgtagctgccgtcgcggcaccggcagctcccgtgcagcgccctgcgccagtagcttctatgcccgcgagcaaatcgattaccaacgtcgatttccggcgcggagaggacggcgcgggaaatgtcgttatcacgctgtcggacgcctcgatcagtccgagtatcgaggagcagggcggaaaaattcgcgtgtccttcgccaagacccagctgccggaatctctgcgcgttcggttggacgtccaggacttcgctacgccggtcaaattcgtcgactcgagcagcaaggccgacggcgcgagcatcgcgatcgagccaactgggcgatacgactatctggcctaccagaccgatgacaagctgaccatcagcatcaagccgctcagcgaagcggacgcggaaaagcgcaaagccgagcacttcacctattcgggggagaagctgtctctgaacttccaggacatcgacgtccgctccgtattgcagttgatcgcagatttcaccgaccttaatctcgtcgccagcgataccgtacagggcaacatcacgctgcgcctgcagaacgtaccttgggaccaggcgctggagctggtactcaagaccaagggcctcgacaaacgtcaggtgggcaacgtcctgctggtcgccccggcggacgaaatcgcagcgcgtgagcggcaagagctcgagtcgcagcgccagattgccgagctggccccactgcgccgcgaagtcgtacaggtcaactacgcaaaagcggccgatatcgcccggttgttccagtcggtgacagacaagggcggtgagagtaacgatcgtggatccatcgcggtcgatgaccgtaccaacaacatcattgcctatcagacccaggagcgccttgacgagctgcgccgtatcgtcgcgcaactggatataccggtgcgtcaggtcatgatcgaggctcggatcgtcgaggctaacgtcaattatgacaaagcattaggtgttcgctggggagggaactacgtgggcgatcagtggagcgtctacgggaaggatggtgcaaggtctgtagatgacgatgggctcgtcaagctgccgggaaccgatacggtgggcaatatcaagctgcaggatggcttggctccagtaccctttgtcgatatgggcgctctgaatagtacctcgggtcttggcatcggcttcatttcgaacaacgtactgctcgatcttcagttgtcggcaatggaaaaaagtggcaacggcgaggtggtatctcagccaaaggtcatgactgctgacaaggaaaccgcaaagatcctcaaggggactgaggttccatatcaagaggcaagttctagcggcgccacgagcacctcgttcaaggaggctgcgttgtcgcttgaagtgactccgcaaatcacgcccgacaatcgcatcattatggaggtcaaggtgacgaaggacgcgccggacttccgtaactcgctgaatggcgtccctccgatcgataagaacgaggtcaatgcgaaggtgctggtaaatgacggagagaccgttgtgatcggtggcgtgttctctaacagccaatcgaaaacggtggacaaggttcctttcctgggtgatgtgccatacttgggccgcttattccggcgcgacgtcgtaactgacgcaaaatccgagttgcttgtgttcttgacgccgcgcatcctgaaccatcaggccatcgcagtgaatcgttgattagatgcagaatgtcattctcgtgggtccgatgggcgctggtaagagcaccatcggacgcctgctcgccaaggagcttcgcctgccctttcgggactccgataaggaaatcgagcagcgcacgggtgccagcattccgctgatattcgacgtcgagggcgagcaggggtttcgcgagcgggagcacacggccatcaaggagctgtgccagatgcgaggcgtggttctggcgaccggaggcggagccgtgttgcggccggaaaatcggcaaatgttgcgggccggtggccgggtcatctatctctgcacgtcggtcgagcagcagctcgaccgaacctcgcgggaccgtaaccgtccgctgctgcaaacgtccaatcctcgcgagattctcaccggactgatggctattcgggacccgctatatcgggaggtcgccgacctgatcattcagacggacgagcgtccgccgcgcctggttgtcgcgcagattctcgagcagctcgagtcgctcgcgcctcgtgaaagccaggggcaatctgcgttatcctaggtcccttttaaccgcggggcctctatgcagactctacaagtcgatctcggcgagcgcagctacccgatcaccattggcgagcagctcatcgatcaggccgagctgttgtctcgccacatccgcggcaagcaagtcgcgatcgtcaccaacgacaccgttgcgccgctttatctggagcgtcttacgcgcagtctggcgggctacagcgtcacgcccgtcgtgcttcccgatggcgaggcgcacaagaattgggaaaccttgcagtcgatcttcgacgcgttgctggccgctcggcatgatcgcaacaccacgatcattgcactcggcggtggcgtcgtcggggacatggccggcttcgcggcggcgagttaccagcgtggcgtgagcttcattcaggtgccgacgacattgctgtctcaggtggattcgtccgttgggggcaagacgggcatcaaccatccgcttggcaagaacatgatcggtgcgttctatcaaccgcaggccgtgctgatcgataccgccacgttgacgacgttgcccgcgcgcgagctgtctgccggtttggcggaggtcatcaagtacggtttgatctgtgacgagccgttcctcggatggctcgaagagaacgtcgacaggctccgcgctctggaccagcaggcgcttaccgaggccatccggcgatcctgcgccgccaaggcccgggtggtcggtgccgacgagcgggaatccggcatacgagccacgctcaaccttggtcacacctttggtcacgccatcgaaacccaccaggggtacggtgtctggctgcatggtgaggccgtgtccgcgggcacggtcatggcgctggaaatgtctcggcggctaggctggatctccgctgccgagcagaagcgagcggtgagcttgctggcgcgggcgggtctgccggtggtgcctccggccaatatgcgcgccgaggatttcctcgagcatatggctgtcgacaagaaggttctggacgggcgtttacggttggtgttgctcaagcgcctgggtgaggctgtggtcaccagtgatttcccgcgtgaggttctcgaatccacgttgaacgccaactacgactcgcttgcgcaagcgccgagcacttaagagatttccatgacaagtttgtccgccgacgattcgtacctgaaccattacgggttcagccatgatcctttcgctgcgcgagtgcctggcttcaaattcttcccagctcagcgcaagccggtgctggggcagttgcaccatctcgctcgctacagccagctgctgttggtcgtaacggggcctgaaggcagcggcaagaccctcgtgcgccaggcgctcgtcgcgagcagcaacaagcaggccgtccaaagtgtggtcatctcgccacaggacaccatcgattcgagcgccttgctgcagcagattgcgcaggcgctgggttgccagcgtgccgatgtggattcgatcctggcgcaggtcatccagctcgccttgaccgggcaagaagtctatttgttggtcgatgatgccgagcggcttactggcgctgcggtcgagacgctgttgcgactggctcagggcagtccggaagggcggccgcacgtgttcctgttcggtgagcatgccttggtggctcgcctggaagcgttggtcgagggcgaggagcgctttcatgtgattgcgctgcagccgtacgaagaggatgagactcgggaatacctggcgttgcgcctcgagggcgcaggcagtgggttggagtgtttcagcgacgaacaggttctacggattcacgagcaggccggcggctggcccggcgcgataaatcaggccgcccgggacgagctgctcgacgcgatgcagcagtccaaggggcggcgcgcatcggctggctggcgctttcccctgccggtgaaacatctgctggcgctggctgcggtcgtctgtatcgtggtcgtcgcgttgctcatgcgggattcggatgagcagcccgcaagggcgcctgtgacgacgagcctgccgctcgatacggcgggcactgttggttcacagtcggcgccgtcagaggctgaagcgcctggtgatgatgtcgcaacacctgagcagccgatcatccgtgagccgctcgccgccgcgggtggcgctgagccggatgaggcgccgatgctggaacctgagcgagagccggttctggtcgagccatcgaacgacagcccgccggccgccaccgagccggttgcccccgcgcctgctaaagcacccgctgttgcgcccgcgcccaaggcaacagcgcctagcgagccggcgaaagaagtggttgcgaagcctgacgccgctgcaccggcaaattggtacgccgcacagccgaaaggccattatctggttcaggtgttcggcacccgcacccagagcaatgccgaggcgctgatcaagcagcacggtgagggcttccggtacttcgtcaagcgtcacgaaggcaagccgctatatgttgtcacctatggcagcttcgctagccgagatgcggcgctggacgcgatcaagaagctgccggcttcgttgaggggtggcaagccctggccgcgaactttcgcaagcgtccagaaggaaatcgtccagtctcgctaaaattcgccccaaaaaggtgcgcatcgcaccaatttggggcttgcaaaaattaaattgtgtcgttctaccgggctttgtaaactgctcccccttttgcccacgcgtatgacggggcctttttgtgcgccgtcaataaggggttgatttacaacgcatttagctggtggagtgcctatgagagcaggtctgtttcgtcctgaagagttcaaggataactgcggcttcggtctgatcgcccacatgcagggcgaggcaagccatcacctgcttcagaccgctattcaatccctcacctgcatgacgcaccgcggtggcattaacgctgatggcaagaccggcgatggctgcggtctgctgatgcagaagcccgatgcgtttctgcgcgtgatggccaagcagcatttcgatgccgatctgccggcgctatatgcggtcggcatgatcttcctcagccaggatgcgaccaaggcggaggcggccaaggcccagctcaacgaacagatcgcagcccagggcctgacgctggtcggctggcgcgaggtgccgatcgacaccaccgtgctgggtcgtctggcactggagcgcctgccgcgcatcgaacaggtgttcgtttcggctgaagggctgtccgaacgcgacttcggtatcaagctgttcttcgctcgtcgccgcgccgaagtcgcgctggccggcgacaaggaattctacgtttgcagcttttccgacaaggacatcatctacaaaggcctgatgatgccggccgatctggcgcagttctatcccgatctcggcgacgagcgcctggcgaccgccatctgcgtgttccatcagcgcttctccaccaacaccatgccgcaatggccgttggcccagccgttccgcttcctcgcccacaacggtgaaatcaacaccatcaccggtaaccgcaactgggcgcaggcgcgtcggctgaagttcgccaatgaactgctgcccgatctggaaagcctcgatccgctggtcaaccgcaccggctccgactcctcgagcatggataacatgttggagctgttggtcaccggcggcatggatttgttccgtggtctgcgcatgatcattccgccggcctggcagaacgtcgaaaccatggatccggacctgcgggctttctatgaattcaactccatgcacatggagccctgggacggcccggccggcgtggtcttgaccgacgggcgccacgcgatctgcctgctcgatcgcaacggactgcgtccggcgcgctgggtgaccaccaccaatggttacatcaccctggcatccgaagtcggcgtatgggattacaagccggaagacgtcatcgccaaggggcgtgtcgggccgggccagatcctcgcggtggataccgagaccggacaggttctgcataccgacgatatcgacaaccgtctgaagtcgcagcatccctacaagaagtggctgcgccagaatgccctgcgcatccagtcgaccctggacgacaacgaccatggctcggctttctacgatgccgaccagctcaagcaatacatgaagatgttccaggttaccttcgaggagcgtgaccaggtgttgcgccccctcgccgaacagggccaggaggcggtgggctcgatgggcgatgacacgccgatggccgtattgtcgcgtcgggtgcgctcgccgtacgactatttccgccagcagttcgcccaggtcaccaacccgccgatcgacccgctgcgcgaatccatcgtcatgtcgttggagacctgcctgggcgccgagcgtaacgtcttcgaggaaaccgccgatcacgccaaccgtgcgattctcaccacgccggttatttcgccagcgaagtggcggaccatcatggagctcgagcgtcccggtttcgaacgccagctgatcgacctgaactatgacgagtctctcggccttgaggctgcggtccgcaatatcgccgatcaggcagaggaagccgtgcgcggcggcaaggtcatgctgattctcagtgaccgcgctatccagcctggcaaactgccggtgcatgcgtctctggccgtcggtgcggtgcatcatcgcctgatcgagaccggtctgcgctgcgactgcaacatcctggtggaaaccgccaccgcgcgcgacccgcaccacttcgctgtgttgatcggcttcggtgcgacggcggtttacccgttcctcgctttcgaagtgctaggcgacctgattcgtaccggcgaggtgctgggcgacctctacgaggtgttcaagcactaccgcaagggtatctccaagggtctgctgaagatcatctcgaagatgggcatctccaccatcacctcctatcgtggcgcccagctgttcgaagcggtcggcttgtccgatgaggtcgtcgacgtcagcttccgtggtgtcgccagccggatcaagggggcgcgtttcgtcgacctggaagtcgagcagaaggcgctcgcggccgaagcctggagtgcgcgcaagccgatccagcagggcggtttgctgaagttcgtctatggcggcgaataccacgcctacaaccccgatgtggttgcggcgctgcaggtggcagtacagcaaggcgactacaaccggttcaaggaatacaccgcgctggtcgaccagcgtccggcagccatgctgcgcgacctgctcaagctcaaggtggccgagcagccgctggcactcgaggaagtcgagcccctggagcggattctcaagcgcttcgactcggccggcatctcgctcggcgcgctgtcgcccgaggcgcacgaggccatcgccgcggcgatgaaccgcatcggtgcgcgctccaactccggtgagggcggcgaagatccggcccgttatcgcaccgagcgcagctcgaagatcaaacaggtcgcgaccggccgtttcggtgtcacgccggaatatctggtgaacgccgaggtgctgcagatcaaggtcgcgcaaggcgccaagcccggcgaaggtggccagctgcccggtggcaaggtcaacggcctgatcgccaagctgcgctatgcggtgccgggcgtcacgctgatctctccgccgccgcaccatgacatctattcgatcgaagacctggctcagttgatcttcgacctcaagcaggtcaatccgaaggccctggtctcggtcaagttggtggccgagcccggagtcgggaccatcgccgcgggcgtcgccaaggcctacgccgacctgatcaccatttccggttacgacggcggtaccggcgcctcgccgctgacctccatccgttacgccggctcgccctgggagctaggccttgccgagacccaccagaccctgcgcggcaatgatttgcgcggcaaggtgcgggtgcagaccgatggcggcctgaagaccggcctcgacgtggtcaaggcggccattctgggcgccgaaagcttcggcttcggcaccgcgccgatgatcgccctcggctgcaagtacctgcgcatctgccacctgaacaactgcgccaccggcgtcgcgacgcagaatgaccagctgcgcaaggaccatttcatcggcaccgtcgatatggtggtgaacttcttcaccttcgtcgccgaggaaacccgcgagtggctggctcggctgggtgtgcgcagcctgcaggagctgatcgggcgcaccgacctgctcgaactgctgccaggtgaaaccgccaagcagaaccatctcgacctgacgccgctgctgggcagcgaccacatcccggccgataagccgcagttctgcgaggtggagaagaatccgccgttcgatcagggattgctggccgaggaaatggtcaagctcgcgcgcgcagccatcgacgccaagagtggtgccgagttcgaactggacatctgcaactgcgatcgttccatcggtgctcgcgtatccggcgaaatcgcacaggtgcacggcaaccagggcatgaaggatgcgccgatcaccttccgcttcaagggtacggcgggccagagcttcggtgtctggaacgcgggtggcctgcacctgtatctggagggggacgccaacgactacgtcggcaagggcatgaccggcggcaagctggtgatcactcaaccgaagggcagcgagttcgagtcgcaggattcggccatcatcggcaacacctgtctgtatggcgccaccggcggcaaactgttcgccagcgggaccgccggcgagcgctttgcggtgcgtaactccggcgcgcacgcggtcgtggaaggcaccggtgatcactgctgcgaatacatgactggcggcttcgtctgcgtcctcggcaagactggctacaacttcggctcgggtatgaccggcggtttcgcctatgtgctcgacatggacaacagcttcgtcgatcgggtgaataacgagctggtcaacctgcagcgcatcacgggtgaggccatggaagctcaccgtagccatctgcaagaagtgctgcgcgaatacgtcgccgaaaccggcagcgcatggggcgccaagcttctggagaacctcgacgattacctgcggcgcttctggctggtcaagccgaaggcggccaacctggcaacgttgctgtcgaccactcgggccaacccccaataacaagcagattcaagcggcaagcctcggccatccaaccgaggcccgccccgctccgtgattgtcacgcagctagcagccctgggcttgcggctgccgttaagaggttttgaaatgactgaacgtctgaataacgacttccagttcatcgaggtcgggcgcaaggatccgaagaagaagctgctgcgccagcgcaagaaagagttcgtcgagatctatgaacccttcaagccgcagcaggcttgcgagcaggcccaccgctgcctgggttgcggtaacccctattgcgagtggaagtgcccggttcacaattacattcccaattggctgaagctggtttccgagggcaacatcctcgcggccgccgaactggcgcatcagaccaacaccctgccggaagtctgtggccgtgtctgcccgcaggatcgtctgtgcgaaggcgcctgtaccctcaacgatggctttggcgcggtcaccatcggctcggtggagaagtacattgccgacaccgcgttcgccatgggctggcgccctgacatgtccaaggtcaagccgaccggcaagaaggtcgcgatcattggcgccggcccggccggcctcggttgcgccgacgtgctggtgcgaagcggcgtgacgccggtagtgttcgacaagaacccggaaatcggtggcctgctgaccttcggcatccccgaattcaagctggagaaaagcgtgctcagccgccgtcgcgagattttcggcggcatgggtatcgagttccgcctgaataccgaagtcggcaaggacgtgaccatcgaccagctgctcgccgactacgatgcggtattcatgggcatgggcacctacacctacatgaagggtggcttccccggtgaggacctgccgggcgtgcacgacgcgctcgacttcctgatcgccaacgtcaaccgcaacctcggcttcgaaaaatcgccggaagatttcgtcgatatgaagggcaagaaggtcgtggtcctcggtggcggcgacacggcgatggactgcaaccgcacctcgatccgtcagggcgccaagagcgtgacctgcgcctaccggcgtgacgcggcgaacatgccgggttcacgcaaggaagtgaaaaacgccaaggaagagggcgtcaagttcctcttcaaccgccagcccatcgccatcgttggtgaaggcaaggtcgagggcgtgaaggtggtcgagacccgtctcggtgcgccggatgcccgcggtcgtcgcagtcccgagccgatccccggttccgaggaagtgctgccggccgatgccgtggtcatcgcctttggtttccgtccgagcccggccgactggttcgaaggccagaacatccagaccgacaatcagggccgtgtcgtggcgccggaacaaggtcagttcaagcaccagaccagcaacccgaagattttcgcgggtggcgacatggtgcgcggctccgacctggtggtgaccgccatcttcgaaggccgccaggcggccgaagggattctggactacctggaagtgtgatctcgcgggcggatcgagcctctgcaatcaccgagcggtctcaaggtggatgtagaaagcgacatccaccctacgactggcttgccagcgctggcgcccgccaaagcctgaccagaatcaagcccatggataaaaggcacggcgctcgccgtgccttttgttttccgctttgcgacaatgccgccactcttttgctggaacccagacatgactgccttgaagaacgatcgcttccttcgcgccctgctcaagcaacctgtcgacgtcaccccggtgtggatgatgcgtcaggccggccgctacctgcccgagtaccgggccagccgtagcaaggcgggcgacttcatgagtctgtgcatgaatcccgagctggcttgcgaggtcacgctgcagccgctggagcgttatccgctggatgccgcgattctgttctcggacatccttaccgtgccggacgcgatggggctaggcctgtatttcgagaccggtgaagggccgcgcttcaagaaagtcgtcagcagcatggccgacatcgaggcgttgccgatcccggatccggaaaaggacctgggctacgtgatggaggcggtgcgcaccatccgccgtgagctcaacggccgcgtgccgctgattggcttctctggcagcccatggacgctggcgacctacatggtcgagggcggctcctccaaggacttccgcaagtccaaagcgatgctctacgagaatccggaggccatgcatgcgctactcgacaagctggcgcagtcggtgaccagctacctcaatgggcagatcctagccggtgcccaggcggcgcagatcttcgattcctggggtggcagcctgtcggcggcggcttaccaggagttttcgctggcctacatgcagaagatcgtcgatggcctgatccgtgagcatgacggtcgccgcgtgccggtgatcctcttcaccaaaggtggcgggctctggctcgagtcgatggccgagagcggcgccgaggccctggggctcgattggacttgcgacatcggcgccgcacgtgcccgtgtcggcgataaggtcgcgctgcagggcaacatggaccccagcgtactgttcgccaagccggaggcgatccgtgccgaggtcggacgtatcctcgcaagctttggtcagggcgaaggccatgtgttcaatctgggccatggcatcacaccggaagtcgatccggcccatgccggtgcattcatcgaatcggtacacgaactgtcggctcggtatcacggctgacggggaagcccctaaaaacaaagagccgcttttgcggctcttttcgttcatggctgctgatagtgcccgggcgtggtgcctggctcgtgctcatggatcagcttggtcacgcgaatatcggtaatgccgatcacctcggcctgctccagcagcttggcctcatcggcatccgcctcgggcatcaccaggctgttctcggcatcgccgttgtgcagttcgatcaggtgccgggcggcactgccttgcgacatgcgctcttcgtcagattcgacgatctgaacgcgcgggtcattctggaagatgtagttgatttcgaacttgtgcgatgacttgccgaacatgggcagctccttgaatggttaaaagggtctgctctgttgacttgcgggtccagttattcgttcggcaggaatcgccggcgaggcgacggtcggagaggaggagtcgaccgaaagggcgctcggcggtaccgagcgcccagggtacttacttgaccttggccaggtcgcccttgatggccacgcctgccatgatcgcaccggcatggcactcgtagttctggctgttcttgtattcgacatgcttgtagttgctggcgatgtccaccacggcgttggcgccggccgccttggcagcctgctgcatgccgatcagcgccgattgcagcgcccagctgcatgcgccttcgtcagtcttgttgaaggcgttggtcttcttgctggtggtcacgccgctgcgaatgatctgcgcgcctttgggcgtcttgccagcgaggtagaacttcacactgccgtccagcttgccggaggcggtggcttcggccactacctggtcgaacggcaggtaatgggtagtgtcgcgggcctggctgattccgggcagcgcacagagcaccagtgcagcgccgatccatgtacttttcttcattgcattctccttgcggtttttgggggattcaggcccagcggcggaaaatcagcgaggtattgatgccgccaaaggcgaaattgttgttcatcacgaattcgtgctgcatcacgcgcggcgcaccgacgaggtagtccagctcgccgcagcgggggtcgatgctatcgagattgagcgtatggatgtagtgatcgcggttcagcatctcgatgctaaaccaggactccagcgcgccgcaggcgcccaaggtgtgtccgaagaaactcttctgcgaactgatcggcatgcgtgagccgaacagcgactgggtcgcctgggtctcggcgatgtcgccctgctcggtggcggtgccgtggccgttgacgtagccgatggcttcgggctgcaggttggcatcgtccagggccagctccatggcgcggcgcatggtcagctgttccggtttggtggcgtgctgaccatcggcattgctgccgaaaccgaccagctcggcgtggatggtggcgccgcgggcgagtgcgtgctcgagctcttcgagcaccagcatgccggcgccctcgccaatgaccagcccatcgcggccggcgtcatacgggcgcggcgtggtgtgcggcgcatcgttcttcaggctggtcgcgtagagcgcgtcgaataccatggcttcggtcgcacacagctcttcggcgccgccggcgagcatcatcggcaggcggccgaacttgatcgcctcgtaggcatagccgatgccctggctgccgctggtgcaggcgctggaggtggggatcacccgaccggtaaggccgaaaaagatgctgatattggccgctgtggtgtgcggcatcatgcggatgtaggagttggcgttcagtccgtcggccacagagttgagcagcatgttgccgaaggccttgatctcctcggtactgccggtggacgagccgcaggcaacgcccatgcggccgtcgcggatcgaggcgtcatcgagcaggccggcgtgttcgagtgcctgctcggcggcctttaccgacaaccgtgagacgcggcccatgctgcgcagctgcttgcgcgtccaatggccggggacgacgaaatcatccaccggcccagccaggcgggtactgagctcggtgaagcgatcccactcgtgcatgtagcggatgccactgcggttgctgctgaaattggcttcgatgctggtccagtcgctgcccagcgaggtgatgccggccatgccggtgacgacgacgcgtttcatcagcacagcccgccgttgactgccagaacctggcgggtgatgtagctggcctcttccgacatgaggaaattgaccgcgccggcgacttcttcgggggtgcccatgcgttgagcgggaatcatcttcagcatgtcctcgatgggcagatcgtcgttgagcatgtcggtatcgatcagccccggtgcgacgcaattgaccgtgatacgccgcttgccgagctctacggccagcgctttggctgcaccgattacgccggctttggaggcgctgtagttgacctgtccgcggttgccgatcaggcccgataccgaggtgatacagacgatccgccccggctggcggcgacgaatcatcggcatggtcagcggctgcagcacattgtagaagccatccaggttggtgcgtatgaccagatcccagtcgtcctcggtcagtgccggaaaagcgccgtcgcgggtgaggccggcgttgcagaccactccgtaataggcgccgtgcgcttcgatatcggtttccagctgtgcgcggcattgcgcgcggtcagcgacgtcgaactgcaggatgcgcacctggcgccccatgtcctggatctgtgcctggaccgcttctgcttcgtcgcgccgggtgcggcaatgcaggacgatgtcgtggccgctgcgggccaggcgcaaggcgatggcgcggccaatgccacggctggagccggtgacgagaatgctgttgctcatgggctgggctcttgaagatagctcgccacttcaggcgggcgaaaaacgttgagacgcgcctcggcatgaatgccgggcccgtcgaggtggcattcgaacacgcccatgccgttgtcgtcctgcagcgagcggagcgcgcgaatgcgtagcgcggtaccaacggggaaacgctcgacatcgcattgaaactggcgggtgccgagcagaaagcccagctccaccggcagcccggcctggcgtgcctgacagccggcgaacgcggcgaccgtctgcgccatgatctcgacaccgacccaggcgggcaggctgccgtcgggcaggttgaatagcccaccgggcttcaccttcacgtgagcatcgatgctgtcggcgtcgaatgcctcgaccgcatcgagcaggatcatgtcgccggcatgcggcagcagttcggctactggccaatcgatcatggcgcgtctcccaggatcaagctgatgttgttgccgccaaaggcgaaggagttgctcatcatgcggcgcggaccggcggcggccatcgtcatgcctgcagcgatcaggtccagccgcggcaggtcggtatcctgctggccgtcccagcggtgtggcggcagcctttgggctggattgtgctcggacagggccagccagcagaacgcggcttccagcgcaccggccgcgcccagggtatgcccggtcagcggcttgctcgatgagcaggctacgccggccggaaacaccgcggcgaccgccaggctttccatggcgtcgttgtgcaaggtggcggtgccgtgcaggttcagatagctgacctgctccgcttgaatggctgccccggcgagcgccttgcgcatcgcctcaatggcgcccaggccttgcgggtcgggcgcggaaatatggtgtgcgtccgagctggcgccaccgccgagcagcgcgatcggcgccgcgtcgcgggtcatcaggaagagcgcggccgcctcgccgatattgatgccgtcgcggttgaccgaaaacggattgcagatgcgctcgctggtcgcctccagggcgctgaacccttgcagggtcagatcgcagaggctgtccacaccgccgcagatcaccgcatcgcaaatgcccgcgtccagcaggcgcttggcgctgagtagggcgcgagcgctcgaggtgcaggcggtggaaatcgaatagctaggaccgctgagttgcagccgctcgctgacaaagctggcgggcgcgcaaagctcctgatgaccgtagtgatagctggccggtagctcgccttggcgcaccagatcggtgatgccctgagtggcttcctggatgccggtggtgctggtgcccatcaccacaccgatacgggatgggccgaagcgggcgatcgcctcatgcagttcgacttcgatctgctcgaccgcggccagcagcagctggttattgcgcgtggcgtgacgcagcggcgcgtcgctgaggctgggcagcgtgcctgtgaccgcgccgaccggcagcaggcgaccggcgaccgcttgcggatagggctgcatgcccgagtcgtcaccgtccagcaggcgcctggcgacctccgccttactgcggcccagcgcgcagaccaaccccagggcattcaggtaagcggtcattgttggcgagctccggctgtcgcgatgggggcgacaccataggtcagcgccggcccgacgtcgagttcgaaacggccgtcttccagatagcggacgtgccaggaggacgcgtcggctgtcagcgagcgcccgcctggctgctgtgtccagcgcgcatcgtcgtaaagcacgtccagctggtcggtcgggctcagcgcgaacagcagcgcggcgaacagttcgcgcgcctcgggattgggcggtagcaggccgtccgcctgccagcggccgtcgcgcaacagctggcgcgccagcgggacgcccagcggatcgagcaacgaccagcgcaggtcagcgccttcctgctggatgaccaacagccagtcgctcacctggtcgtcacttcggcgctggatatgcaactgcatcggcaacgtcagccgcggtgtttgcgaaggcaacggcagctgctgggcacaagcgccgagcatcagtaacagcgctagccagaccaggcgcgggatgtgacgtgcaatcatgccggacgactcatgccggcaccgcgggggcgcacagctcggccagcacccgcaagcggcgtttgggttcggcgacgtagggattggtggtgtcccaggcgtagccggcgagaatcgaactgatcattcgacgaatctccggctgggcgtgttcgtaatagatgacgttctgaaaactgctgtcgtaccagccctcgacgtaggttcggaaggtgttcacgccagccttgagcggcacggcgaactcggtttcccagtccaccgcttcgcccgacagctggcgatgcagcacggcggccgccatgctcgccgagcgcatagcgatggtgacgccggaagaaaacaccgggtcgaggaattccgccgcattgcccagcagggcgaagcccggaccgtgcagggtcgtgacgttcgccgaatagccgccgatcagccgtgccggggtatcccactcggcgttctggaggatgcgcttgaggttgggcgcctcctgcacgaagcccttgaggcatgcgtctagatcctgcggacgaccttcgtagcgttcggcactggcgacgacgccgagggagcagcggccgttgctgaacggaatggtccagtaccagacgtcgcgcagctcggggtgggtggtgatgaggatcttctcgcgatcgaagcgtggatcgtcgatgttgtcctggatatgggtgaacacggcacggcgcagcgggaaattcgacggcgcctccagctcgagcaggcgcggcagcacgcggccgtaaccgctggcgtcgaggacgaaatccgcttcgatggcatattcgccgccgccggcacggcgcacctgtagacgcgggcgcgagccgtcgaactccgcggcggtgatttcctcttcgtagcgaatctccacgccctgcgactcggcctgatcggccagcaacttgtcgaaatcggcgcgctgaacctgataggtgctgctgtgccctgcggtgaatttgtcgcggaagtcgaactcggtgtagcgctcaccccagccgaaggcagcgccgtgcttggtctggaatccggcggcttgcaccgcttcgagcatgccggcttcctcgatgaaatccagacagtgcgacaacaggctttcgccgatggagaagcgcggaaaccgctgacgctcgatgatcaggacgtcatgccccttgcgtttgagcagggcggccgcgatggcgccggaaggccccgcaccgatgatgacgacgctacggtgttctgaattcactgcaaccttccttgttcgactcgatgggaatgagaaatgccaggcatggctggcccagacgggaaatctattactcggttgaggtcaccgccagggcagccggatgccctcgcagcaacccgcgggaaccgcgccgatgcacgctgcggccggatcaacgtcgggtctccgtttccggcgcggcggcccagggtgccagcgcgaaggcgaacaccaggccgagccccaccgccagaccgaagttgctcaccgccggcgtgctcgacagggccagcaggccgaacgacaaccaggtggttaccgccgcgagcagggtgccaaccaggctcaccgcggcgccgccgattcgctcgcgcatgaggatggcgtagtccacaccgatcgcggtaaccaataccaggccgaacaggccgaacagggtcaggggttggcccagccagcccaggcaggccaggctgccggccgccgccagcagcggcacggccaggcagcgcgccgcgccacgccagccgaacggcaggcacagcagcgcgaaaatgagcgcagcggcgccgagtttgagcaacgccgcctggcgctgggtctcggcgaacagacggttcagctccgccggccggtcgacgaggctggcgccgccgatactctcggccagaccgtgcagcaccgagctgtcgcgaagcccttgcaggctgaccagaccggccaccgaaccgtcgccctgcacgcccagccacaaggggcgccagggttctgcgagcgggccggccagcacctcctcgaggccgatcatgggttttgcctgtagctcggcgagttccttttccagcttgtcggcggtgataccgagcttcagcaggggctggctgctctccagcaaacgcggcagggcgagatgcagacgttcctgggcggttctcggggtgatcagctggctcagcgcgaggtagccgtgcagcttctgctcggccaccagctcatcgagacgcgtggcgagctgatcctggcgctccagcagctcgtcgggagacgccgcgcgaaccagaaaatactggctggtcggctcgaagccggtgatctcgccgacgcgttcggcttgctgctgcagcgcgggcgcgcgggcgacccactggcgcaggtcatccttgaaggacagctggctgatgccggcgatgcagaacagtacgaacccggccagcaaccagatcgaggggatccgccgtagcaatgcctcgcgcagcgccaatccgcgctgggcccaacccagcggtgcggcccaaggttgcagcggcgcgttcagcagcgagggcaacaggcaggtggcgcaggcgaaggcgccaagcaggcccgccgcggagaacaccgccacctggctcagcgccgggaacggggtgaagcccatggccaggtagccgatgacattggttgccagcgccagcgccagacccggaagcgtcaagcgcagggctcgataggcacgccatggctgcaaggtccagctcttggataggtagtgcagcggaaaatcgatgcttacgccgaccaagctggcgccgagcaccaaggtcagtacatggatctggccgaacaatgcgatacaggcagcggcgccgctcagtgcgccgaccaccacgggcaacgccaccagcaggacacgcggcgtacggaacagcaaatgcagcaacgccagcgtggcgacgagcgaaacgctgccgatcaggctggcttccttgcgcgcctggcgctggccgtaagcggcgtgcaagatgccgccagcggcgagcagttcgccctgttcagcctctacccgatggcgcgcagcgcggatctgatcgtccaccagcagcggcaaccgatcgtcgaaggcgtcgccctgggtttgcgcatggatcaccgcccagtgctgtccatcatgctcggccaccagtcggccatcgggacgcggatggatatggcccggttgcggcaagtgtcgctgcgccagatcggcgataccgaaccagtcctgctcgaccggcaccaggctggtgttgtcgaacgggctgtaaaggcgttgtacacgttgtcgaacgaagtccccgggcgaggcgatcagggcttctcggctcgcccggtcgagcagtgccaggcgctggtcgagcaactgttggcgtaccgcgggcaggtcggcttgcaccgagcgccggacctgggcgaacagaccgctgccccggaggtcgtcagcgatttcatcggccagtgcgaaggcggctgcttcatcggcgtgatgaatcagcaacatcagatcgcgattcagcggttgctgtacccgctgctcggcgagttgctccagctcgccgggcgcgccgctgggcagcaattgcagcaggttggcgctgaccggtggaccatcgcgccattgccatgcggtcagcgccaccagcccgagcagcgccacgaagaacagccaggatagccaggccggaagcctgagcgcttggtcagtcggcgaaatcatggcgttcggtggggctcaattgttcgtcgatctggctgtcggtcagcaacagcagggtgctgtcgccctgggtttccagcagctcgatgcgctcggcggtcgagccaccctggatgacgatgcgggtgaatatctgtccgagcagcttcgagcgcggggtcagtgtcagcgtccagctgtcggcggtcccgctgagctgcagttcgaaatcgcgctgcagggcctccgtatccccgcgcagcacggcgaggaacaggtcgttctgacgcgcggcggcgccttgctgctgggtcggatgccagccgctggcgtcgcgtcgggcgattcccgaagggctgatgcggtaatcctgctgcagcggttcgcgcaggaaccagagcagaccctgatcgcgcgccaggacgaaggtgccggtgctggccagcggctgaggcagcgcgcgcaggtacttttcctgggtgaagttgccgcggataacctcgggctcgctcaactggcggccgagttgcgtcagatcgaaggtgtcggcacgcgccaccgtcgtcagcaacaggctcagcaccagcagcgtcggccccgcaacgcgcgtgaacagtgggatcacgatagggcccgttccacggcttcgacgagcaccgaaggcgatgccagcagcatctcgcgactggcgatctccaccgcgacctgcacggtgctgccgcgggtcatgcgctcgccggtctcggcgtcgctgatcaggtaattgatcttcaggcggttttcccattccagcagatcggcgcgaacgacgatgcgctggttgaagcgggcgccgcgtatgtagcgcagttgcacatcgatgatcggccaggcgtaaccggcgtcgcgcatctgcgtgtagttgtggccgatccgctccagcagggcgcagcgggcgacctcgaagtacttgatgtaatggccgtgccagaccacgtccatggagtcgacgtcgaagaagggcaccagcacctcgacctctgcctgcagcacgccgcccttacgcatagagcccccagtgttgtgcgcggatgcgttgcaggcacaggcgcagctcgccttccagtgcgcgatcctcgatcagtggcgggaaatcctcacccagcgcggtatgcatggcctgcagtggcgcgggcaaagggcgcgcggtctgcccccgctggcgcagccagacgccctggttggcggcgatcagcgtggcggcggcgacctgctcggtcagctccaggctgcgcagcgcatcgcgcgcggcgatggtgcccatgctcaccttgtcctggttgtggcactcggtggagcgcgagaaaacgctggccggcatgctgttcttcaaggcctcggcggcccaggcgctggtgccgatctgcaccgccttgaagccatgattgatcatcgccgtggcggccggcgcaccggacaggttgctcggcaggccgtggttgtaacggctgtcgaccagcagggcgagctggcgatcgagcagatcggcgacgttggccaccagattcttcaggctgtccatggcgaaggcgatatgcccgccgtagaaatgtccaccgtgcagcacacgctcgttgtcggcgtcgatgatcgggttgtcgttggcgctgttcagttcggtttcgatgaactgccgcagcaggcccaggctgtcggccagcactcccagcacgtgcggcgcgcagcggattgagtagcggtcctgcaaccgatgcaacgacgcagcgggagcgtcgatggcgagatcctgacgaatccaggcggccacctgcatctgtcccgggtgcggcttggcggcgaacagtcgttcgtcgaaatgctcggggttgccttccagcgcgatcacgttgagcgcggtgatacgggtggccagtttcagcaggtaatcggcacgggcgtaggcgaggcaggccaggccagtcatcaccgcggtgccgttcatcagcgccagggcttccttgggtcgtagggtcaatggcgtccagccgagctggcgatgcacctcggcggcgctgcggcgttcaccgcggaacatcacctcacgctcaccggccagcgccgcggcgacataggacagcggcgtcagatcaccgctggcacccaccgagccttcctccggaatcagcggcaggacgtcgtgttcgaggaatgcctgcaagcgatcgagcagctcgatgcgcaccccggacatcccatgcgtcagcgaacgcaggcgggcggccagcaccgcgcgggtggcttcggcgtcgagcagcttgccgaggccgcagccgtgaaaggtgaacaggtgctgcggcagggcttcgacctgatgcagcggcactgcgacgacacaggagtcgccgtagccggtggtcacgccgtagatcacaccttcccggtcgagcagggtgtcgagaaattgcgcgccgcgcgcgatgcgctcacggaaggccgcatcggcctgcagccgcgccggcgcacggcactgggccacggccagcagctcttcgatgcgcaggtggttttcgccaaagatcacgggctcagcgttggtcatgggtgttccagaaagggtagaagttgaaccattgcaaaggggcctccaggcaacgcgccgccaggcggtcggcatagcgctgcacccactgctgcaccaccgcgtcgcgctcaccgcgacgccattgaatgcgttcggcgaaaggctcgaggtggacatggaattgctcgccgtgtttcaggcagaacagcagattggccgggcactgcagcaacccggccagcagccaggggccctgagggaaatgggccggttggccaagaaagtcggcagtcgcgatgcgtgcaccgtgcagcggcacgcgatcaccggcgatcgccagccattcaccggcatccagccttcgagacagttccatcatgatcgccggatccagctcgctgacctgaatcagccgcagatgggtcgcgccggactggtcgagcaaccggttgaagcgttcggcatggcgggtatgcaccagcacattcatcttcaccttgcggcccatctcggccagcgcccggcagatttccaggttgcccaggtgcgagccgaccagcagttggccacgtggcgcttcgagctcggcatgcaggttcatccggtcgtgcagcaccagccggtcgagaccgaggcgcccaccccaggcgtcgagcttgtccagcaaggcgtcggcgaagctggtgaactggccgaagacgctgcgccaactgggcgccagatcgcggcgaccgctccaggcggcgaggtggcgttgataggcccaggcgctctgccgcgcgctgcggccgaacaggtagaaatacagcacgatcaggtaaagcaacggcgccatggcacggcggccgagcaggcgcacggccgccgcggtgagcttcatcaaggcgaagctgccgcgttcgcggtgtgcggcccagtgtgagccgggcacggctttatcgctcatccgcgccaccgacgccagagcagggcgggcgcgcgcagcagcatgccgccgaacagccgggcatgcatcgatgagatcagcaggttgtcgcgccacaggcggaagtgcgagacgccatcggtggggtaatgcacgcgcgtcggcagccagaccatcggctgctcgcgccagtgcaggcgcaccagaatttccgtgtcgaaatccatgcgctggcccagcgccgtcgagtcgagcagagccagggtgggctgcagcggatagacgcgaaagccgcacatggagtcgcgaatcgacagtgacagggtgttgatccagacccacacatgagtcaggtagcgcccgtagagtcggctcttcggcacactcgagtcgtactcggggtagccgcagaccagcgcatccggcgcctggctggcgcggtcgagaaacagcgccacgctggcaagatcgtgctggccgtcggcgtcgacctgcagcgcatggctgaagcccaggcgggacgcctcgcgcagcccggaggccaccgccgcgcccttgccccgattttcgccgtgccggaccaggtgcaccgacggatgctgcgccagcgcgtcgatgacctctgccgcggcggggcgggaggcgtcgtcgacgagcacgcagtgcaaatcctcggcgagcagcgcgcgaacgaccgacggcaggctgcgctcgtggttgtacaccggcaccaccgcacagggtttgaaccagtcttcatcgatggccagcgaaagctgctgatggacgcctggctgcgtgggcgaggcgtcaggggcaggtgcaatcggggtgagggtggtcacgggtgttctcccagcagaatgcggccggacgagcagggcgcttcgccgttgcggtaagcgaagtgcagcttgctgcgctcgcggtcaaaacgcagggtcaggtgcaggtggtcacccgggcgggcgagctgctggaacttgagcacttccatgccgcggaagcacggcggcagatcgtcgatcagctcgcgggccagcgcgatcgcccaatcgatctgcacaacgcctggcagcacaggcgtttgcgggaagtgaccggtgaaatgcgcgaggtccagcggcacgcccagttccagctgccactgagcgtcctgctcggttgtactgacgcgctcgggctgcaacgggcgaggggcctgtaggagccgctcgaggtcggcttgcggcagcttgccctgggcgttgtgaggcaactgccgcaccaggcgccagcgacgcggcaaggccagcgcctcgcagtgattcgccaggtgattacgcagtgcctcggtcaaggcgcgtcggccgccgttgcgcagcgcatgcagtccggcctcgctgagggcaaccagcgccgcgaggtaggcgcggttgtcgacgatcacgccgaggcgcgcttcgctgacgaaggggtgcgtggccaagcccgcttccagcatcggcagggagatgcgtttctcttccagcttgacgatacgatccagccggccgagcagttcgaagcgcccatcggcctcgattcgcgccgcatcggccgtctgctcgacatggccaggcggcaggcaaggcgaggcgatgcgcagcgcaccgtgttcgtcctggctcagttgcacggcggggaacggctgccacaggttgccaccctgacgccaggcgataccgccggtttccgagctgccgtagatttccgtcggcagctgacccagacgctgctggagtcgctgtgcggcgtcggcatcgagggggccacccgaggaaaagacccgccgcacgctgcgcagggcgggccagtcgaggttatcgctcatccgcttgagcagtgccgggctggccacccagcaaaagttggcgtgctgacggctggcccgctggatgtcttcggagaagggctgggcacggcgcagaaaggggcgaccggcgcacagcggccagagcacccggaacagcaatccgtaaatatgctgtgcggcaacgctggcgatcatgcaggcatcgccgagatcggcgccccagcaggcttcgagcgtttccacttcgttggccaactggcgcaggcgcttgtcgatcagtttcggttcgccgctggagcctgaggtgcagagcagtagtcggcactggtcgagatccagcttcgcccctgcgagcggctcggccataaggtccgcgatccgcacgtcgccgtcctggtccgtcagccagaggtcggcctggtgggccagtcgtgcgcggttcgcgggttgcagatcggccggtagcaacaccgttacgccggctcgccaggcgccgagcagggcaatggccagctcacccgcatcctccagatgaatcgcgaggcgggcgacaccgcggttacgcagcccggcggccaggcgcagcgcttgctggcgcagctcggcatggtccagctcaggggccagcgtgaccgggcgcgacttgggcgtctgatcgagcaggtgttccagggaaatccagttcatttagcgttcctgatgcgctggcgtaccagccactcaccggcaaagagcagtcccatcagcagataggcgatcagcccggtgtacagcgtccaccagctcagcggcgcccagagcgcgaggccgctggcgatggcggcgttgacgatgaaataacccacccaaatccaggtcacttgccgcgtatagcgcaccgccgcgggaggcagctcaggctcgctcagccgcgcgaggcgctcgatgatcggcatgccggagcacagactgccggcgaacaggccgagcagcgccaggctgatcagcaccgggtaccagcgcagcagcgccggctcaccggccaaaccgagcagcaggcagaacagcagggcgaccgtcgttagcgtgcggctgagcggcgtttgcttgccgctgaacatccgcgccagccatagcgcgccgagcagcagcgcgaacaggcgcggcgacagatgctccaggcccaggtagacggcgaacgggtaggcgaggccagccagcagcaggccgagagcaatcagccggctggcattcgccttgcctggtggtgcgggtgcttgcatcgcgtgctgtccgtttgcgcgttgggcagaatcgcagccgcccggccgcgtgggcgggtgacggctggcttccttgatcgtggggctcaggccgtttgcgggtttaccaggcgatacaccgcttcgacgacatcgcctacggtacggaccgacttgaactcttcggcggcgatcttcttgccggtctggcgcttgatgtggtcgatcaggtcgacggcgtcgatgctgtcgatttccaggtcctgatacagattggcttcaaggctgatacgctcggggtcgagttcgaagagttcgaccagcgcatcgcgcagggtctggaagatctcgttgcgactgttcacgttgggttcctcctcaggcgacggcgcggttggcgttaacgtaggcggccaggctgtcgacactggcgaaatgcttgcgcgtgtccttggcgtcggcatcgatcttgatgccgaagcgcttctggatcgccaggcccagttccagcgcgtcgaccgagtccagcccgagcccttcgccgaagagcggctggtcgaccgcgatgtcgttcgggccgaggtcttccagacccagggcgtcgatgatcagttgcttgatttcaagctgcagttggctcatcgagtgcgagctcctttatgaagtgtcggtgcagatggtcgttgagtcgccgggaggcgatgggcgccgctttcccggcggcgaatgcctgcggatcgatgtcctcaccgacgcgcagatggaagtgaaagcgtcttgccggaatgcgataccagggttcggccttggtcagggtggtcggcgtcacgctgatcaccaccggcgtgaccaggcgcgcgccgcgcagggcgatcgccgccgcgccccgatgaaactgcggcgcctgaccgggcgtggtgcgcgtgccttcgggaaagatgatcagcgtctggccctgttgcagcgcgtcggcggcttcatcgagcatctcggcgctgccgttgttgctgatgtattgcgcggcgcggatcggccctcgagtgaaggggttgtcccagaggctctgcttgaccacgcaattggcgtcgcggatcagtgcgatcagcacgaccacgtcgatcagcgagggatggttggcgatcaccagctggccggggcggcccaggcgctcggcgccttcgacttcgtaagtcagcacgccgctgcggtacatgaactgaacgaacagccagaacagccgactcacggtctggcgtgcccgccggcggcgcgtgacggcatcgccgggcaacagcccgagcagagggaacacgaccaggcgcaggcaaagcccgccgaggccgaacagggtgaacgacagcccggtggcgatcaggcgccatagccagggggcgttgggacggctcagtgcatttgctgccagttccattggcgtccctcccattgatgttgaagactggcgtggccatcgagcaatgcgccgatcaattcgagcgcatggggtcgacggggcggcggcaatcggctctctgcaggttggagacccagctgccagctgcggcccggtttgagcagcagcgccacggcatagggaaagctgacgtcatcgatccagggcgcatacagctcaggcgtctggtcttcggcgatcaccaccagcactgccggtgcgccctcgccgagcagcagggaggcttcgaggacggcatgttcgaggccatcgccttgggctgccagcgccgtcatctcgctggggtcttgttgctggatcgaccagagcccgatgatcgcgttgtgcaccgacaggctgaactgcgtcggcgaaagcggttcgccgtttgccaggtcattgaggatggcgaaggtgcgcgcggtttcgccgtggcgtgaggcgtataccagcggcatcggcggctgccctgccgccagcggcgtggccacggcgaacaccatgcgcgccagacggctcattcgccgcctctgcattgcaggcagaaagctgacatccggctgggtatctccagcatccgggtcgcgcggggcccgagcccagttcgcccagtcgccggcacccgtcaggcccggagcccaggcctgccattgatcgatatcgaattgaatcacgcgagaactcaccggctcgtttgcgagccttgttgttggcgtgtcgacgtccctgtactgcgactatcggtaaattgtccgccgtgaaagtggcggcattatccaatcgcgattgggctgaggcaaacgttgcttgaaatatcctgataagaggtcgacgcgtttatcggaaccgagtggcttggctggcagtctgttaaaggttctcgaccggttcggctgctcggcctcgcacgtgcgctgacattggctggcgcgcgcaggcggggctttgaccgatgttcagctggcgcgagcctcggcgtttcgcgagcaacgaaaaccgcgccttgctgcttccgcaggcgccttacacgccctgctgcgcaagccaggccagcagctgtggcagcggcaatgcgccgctctggcgggcgacttcttggccgttcctgaacaggatcaggcttggaatcgagcgaatgcccagctgggtcgacagttgtggattggcctcgctgtccagcttggccaaccggcagcgccccttcagctgggccgcagcctgggcgaaggtgggcgcaaagcttcggcaaggcccgcaccagctagcccacacgtccaccagcaagggcaggtcgcccttgatctggttggcgaagctggcctgattgacatcgaaggggctatcggtcagtacgctggatttgcagcgaccgcagcgcggcccctcggccaggcggtcggcagggattcgattgagcccggcgcaatgcgcgcaggggatgatcaggggttcggtcatgacgaggctccacggcggtatgccgataatgtggagcctcgtcagcggatatcaagcgtaagtcagcccttggacgcgctcagggcctgtgccagatcggccagaatgtcatcgatgtgctcgatgccgatggacaaccggatcagatcctgggaaacgccagcccgcgcgagctcttcggcgttgagttggcgatgcgtggtgctggccggatggcaggccagcgacttggcgtcgccgatgttgaccaggcgcactaccagcttgagcgcatcgatgaaccgcgcgccggcctccatgccgccctcgataccgaagcagagaatcgaggccggcgtgccgcccatatagcggcgcgccagttcgtgttcgggatgatccggcagcccggcgtacttgacccaagccacctgcggatgggcctggaggaactcggcgaccttcagtgcattctcgcaatggcgttccatacgtaacgccagggtttccagcccctgcaggatcaggaatgagttgaacggcgagatcgccgctcccatgttgcgcagcggcactacgcggcagcggccgatgaacgcggcgggcccgaacgcttcggtgtaggtgacgccgtggtaggacacgtccggcgtgttcagcagtgcgaagcgctccttgtgctgtgcccagggaaacttgccggagtcgaccacgatgccgccaatgctggtgccgtggccgcccatgtacttggtcagcgagtgcacgacgatgtcggcgccgtactcgaacggccggcagagcatgggcgtggcgacggtgttgtcgacgatcagcggcacgccgtggcggtgcgcggcatttgccagcgcctggatatcaatgatgttgcccgccgggttgccaatggactcacagaagacggccttggtgcgctcgtcgatcagcgactcaagcgccgcgatatcgtcatgggcggcgaagcgcacttcgatgccctggcgcggcagggtatgggcgaacaggttataggtgccgccatagagcttggccaccgagacgatgttgtcgccgacttcggcgatggtctggatggcataggtgatcgctgccatgcccgaggcgacggccaacgcggccacaccgccttcgagcgccgtgacgcgctgctcgagcacgtcggtggtggggttcatgatgcgcgtgtagatgttgcccggcaccttcaggtcgaacaggtcggcaccgtgctgggtgtcatcgaaggcgtaggaggtggtctggtagatcggcacggccaccgcccgggtggttgggtctgggctatagccggcatggatggcgagggtttccaatttcatggcgcgctccgtgttcttgtttggcgggtgcgaggggcccagagcatgaaaccagaacgattggacggtcaatgatccagcgcaagctacgccgtctataacggtgtcaacggccagaacagcggaatcaccgccgtggcaacgacccacagcaacagattcaacggaatccccaccttgaggaaatcgacgaagcgatagccgccggcgttgtagacgaaggtgttggtctggtagccgatgggcgtggcgaaactggcactggcggcgaacatcaccgcgacgacgaaggcgcgtggatcaatgcccagctgttgggcgaggcctatggcgatgggcgtgaccagcacggcgaccgcgttgttggagagaatctcggtcaacaccgaggtgaacaaataaatgaaccccagcatgaacaacggcccagcccagggtgtcaggtcgacgacactggaaacgatcagcccgaccagcccgaccttgttcatcgccacgctgatcgcgagcatgccgaaaatcaggctgagaattttccaatcgaccgctttataggcgtcctcgacatcgaggcagcgagtggccagcactgtggcggcgcctatgatcgccaggccttcgatcggcatcacaccgaatgccgccagcagcatcacggccagcgtcgtggtcatggcaatcggtgccttgtcccggcgaaacgcgcgctcctgcacggcgttgaggctgatcagttcgccgttctctgcaaagcgcttgatctgcgcgggcgagccctcgagcagcatcacgtcaccgaactgcagctggaagtcgtccagattgccctggatgttctcgtcgtggcggtgcacggccagcacattgatcccgtagcgtgcgcgtagatcgaggttgcgcatcggcctgtggctgtagcgcgaattgcgcccgacgatggcctcggccagcacctcgtcttcgctactgatggtctcgaacgcctcgccgcggttgaaggtcaggtgcccgctgcctcgcagttcgaccacatccttcacctgtccatggatcaccaggacatcgccggccagcaggctgaagtcctgttccggccggctgtaaagttgcgtgccgcggttcacctgcaatacctgcaggccgctgccgccgttgagattggcctcggcgaggcttttgccgatcaccggcgagcctgacggtacccgcagctcgctcatgaaagtccgctcgagtcgtggcccgagcagcttggacagcgtatcgcgctcaggcagcaaccgcttgccgatggtcagcatatagagcatgccggccgctgcgagcaccagtgcagctccggttatctcgaacatgccgaacggggcgagaccggcctggcgagccacgccgtcgaccagaatgttcgtcgaggtgccgatcatcgtcagcgtgccgccaagaatcgtggcatacgacagcggaatcagcagcttcgatggcgtggtgccggcgcgcttggccagcgaaatcgccaccggcgtcagaatcgccacaaccggggtgttattgagaaaggcggaaatgaccaacgccgtgatcgtcagcccgccaagcacgcgtgtcgggctggtaccgaccaacccacccagccagttgcccagcgcatcgatgcagcccgtgcgttccagcgccgcggaaatgacgaacatgcaggcaatggtcaccggggccgagttcgacaagacgccgagcacctcagcgggcgtcagcaactggctggcgatcaacaccgccaccgcaatcgccaccacgatatccgggctccacgtctcccgcacgaacgacaccagcacccagagcagcaagacacagacgaacacgagcgacagcgattctggaagcatggacgtccttaaacgtggcgtaacgaccggccacacacagcggcctcgcgcgcacgatagggggcgagacttagagagtctaagaacgtttgcatagcgctatatgcaataaagttattgctgcgctacgtccagctggaggagcggcatggcggtcggaagaaatgagcaaaacgaaaaagccgcgcaatgcgcggcttcaaaggtggtgggcccacacggacccgaaccgtggactagaggattatgagtcgcctggaaacgctgcaagcccagtgaaatcgtgcgtagcttagtgcaggtacaatgagctgaaagcatcgtggtttcttcatcgcaaaagcatcgcagcttgctttggttataacgagggtgtgatcacgtcttggctgaagagcatcactctactcagaaatctatgcgctcaccatagccgtttgtggaacacctccatcacgtcggacgccccaaagactgcacactcgattcaatccgagttcccgcctcaaggacagcatgggcgagtcttttccccaggtggtggtgcttcaggcactgatgtgagtaattggatcctggctctaactggaaggatgagtttaaaacggtgatggcagcgctccccttggccgccatgacgaaggccggttgtgcgccgagcgtgctggggttggttccaggctgggaggctaggcctttttggaactgactaacctcggctaaccaccgactttcacgaagtcggcagtggattaattcattcttgcctagctgcttggatactgcggagcgggcatacagagtgaaacagaataaatccgtaagtcgtatttcactccatatttttctgtgcattaaccctctgccagcatcgggaaaagcccatatcggccaccccctgcgctgccatagaaagtctctacattcgatatgcgctcgatattttcgggagggtcaatgttctccagaataataaactggcccatatggcttatactttcaaggtgcgagaagaacttagatttaacagatgtttttgaaagcaatagctcatcaggtgctagatcacccattttagggtttttcagtggatccctgtatgtgatcagcggcgagtcgaatactatgaagcctgggtgaggtagctcgttctgtcggcaatagatcaggagtgctactttaaaggctgcatgagtgatagctctaacacctttgccgttatcaatgcgcagcttcccgtcaatagatatgtcgtatttgtcgttgttgaatgagactatgtggcttccagggaatccccatgcactcaatacgctagagatgaccttgcagaattcaagtgtcgcagttccaggcagtgttagatctggcctgtcttttttgccaggtgctttttcgttttcaagttctgatattttattaagatagctgtctctctggtttaaaagggaaagccctcttaatacatggtatttttttgacagtaaatcattcagagatgtttcgtaagatccggctcccgggcgctgagcttcgagcaatgagtctatttcggctaatttttcttcggacgctgggagctcctcgtttatggtgtgtagctcgatttgaagactatttattgtcgactctagctcggtttggaggagttttatcttttggatttcggcaatggctgatttttggctttgaagtacttcattaataggctttttgaaagcttgagccgctgcgggggcgccacaaacagagcagtcagagtcctctagcgagagtaaaaaactagcctcttctatggacttaagcctttcaatgtctgagtcataaatgctgttcagctgatagaatctttgtaagtggagtcgaatttcattagatcgctctacgctgctgctgataagttttaaaagcgtatttcggtcttttaataattccgcagagctactctgataagacttcagttctcttttgactttctctaggctctcatcaagcctcttgccttgatcttctaggtcagatgtctctggaaagtcggcctccagtcttttacttagatcgtccagtaggctggtaataacttctatttttgttgatttggctgcgttgaattttttggcgtccagcacaggtatgatggatttgtcgtccgtgccggttagcagtaacctaaatacacttcgttctttcggtctcgttacagggcctaatgcgctctctacaggggagcgttcagcctggatactggtctcatctactaagacgtaaggcattaactctcgaaagttaaagttttctttctcgccggattggttctttgctagctgacgaccggatagccccaggtattctaaaagccatccagaaaagctctgttcgcctccgctgcgttgcgttggctgcagtatctttgactctgagggtaactcggagtatttccatagtcctgtatacagcttgtatgcaccaccggacgtggatcgcaaaacagtgtataagccgtctcctgaaatttcgaaccccatcaaaatggtgtcgtaatcatctctctcaggaatgctaggtaaaggcccagatccgccgagcataaaatctagaactttaagagagaaggactttcctgtatttgatgccccataaatgaggttgagtttagtggtgaaatctaatctgacaggtctttcctgagttccaataaattcaaggctgcggattgctattcccttatagtccatagttcgtcacctctggagctagatctccttggaattcaatttcccagttcccaattttggtaaggactagctttttgatttcggcgccagacataggagccataaaatcagcgagccattgggcgcggctttttagattttgtgaatattccgtattgagtaaattgactaaggggtgagcatcgtctgttgcttggtaacagacgcctgtgtctgatggctcgatagatatcagtccgaggcggtgcattaagcttaggccctcttgaaccaagctgcgcctgacaagaacttcgccagtgcgctgcgggagttttggatgcatgctaggggggccgccgatgtcttcgctatgaacaatcaaatgatcaagccataccaattcatttatgtcataaagtctggggtaggctgcattgaggatgactaaagatctaattcccgtttctaccgggccattaaaaagcatcatcctgcttttcgagagttctacttcttccatttgaattttccgtcattaacaaaatgatggcaaactccctgcttgacaggtacgcgagcatattttaatgcaattccagatggttgaacggtcgctgcctgtttcattactgctgttatttttttcatcgtgcttgaatgtttttcactaagcacatcggcgatgccgtgatatacatcttgctcaactaggtcaataacgcttgggtcggtgttgtctctgtaatatctcttaaaggcatcggcatcaaagaagcgttcgcgctgcaattctagattttgaaggagatgtgggtgggcagaaatctccccatggtgtgcaaatgcggcattttcttgctcgctataagcatctatcaattgcttaatgtactctgactcgatatctaatatgtcttgtgggacaatacctttgggtgagcttcctgggtcggctccgaagaatttgtaaagcacttttttagcggactcatctgaaagtatgtcctcaagtgccactctgcgcacgaccgagtagtcaaaatcctgaaccattttcagaacctcgcctttcaatgggatgtcaccaccatcgactatcttgtatcgacagtatttgtcccagtccttaattagcatattctttagtttgcttggattgaaaaccaagtgctctaggtttctgtttaatcctttaggcgccacaaagtagtacatggtcggaggagtgaactcaccttgagatgcgtaatagaggatctttcctagctcgcagattgcagtgtcggtagggaggcgctttccatattgcttgcattgatagttatcccagctgccttcatgtttggcagcggtatgaaatccgacgacatctcgacctagatctcctgagccagagaatcgcgcgacctcaaagtattttgattgtttgttatcagcccagtctctaacgaatagctctagcttcgtgtcgtcaagggccagaacgtcgcgtgaatagtcctgcattcaccctcctagttagactgtccaattgtatttataagggctgactggttttcaaaaaaggtacatgtgtatctgtctgcatttatatgtcccgtatggccgttatccagctttgaggctttaagtcagcgcaggattggctcaatgaacaggttggaggttggtgctgtgctccaggctccaggctcagggctgtattggtcgtctactaaagactctgcatgattctgcacttgggaaacgccgagcagccccagaatctctgccccgctttcgggcctgacttcactgtacgaatcagtagcgcgctaccgcattttgggcattgccgttcggctgttgggtcgctacggcgcttgaggttttgcacgtgctcgcggtgggtagcgagggttggcgtgcggcggccggtttgcagagcttgcagcatggcgtcgacttcagcattgctgaataccggctgctggaatgacttgatatagcggataaagccgatgccctgggtgacattagccggcacttctgttttgaaggtgctgccgccgacgaaggtgatgaccgagtgcaggtgctcgggatttacgccaagggtggcttccagtgctttaaggtgcttgtagttctgtcgcagcgggttctggaatttgaagctgcgcttgtagagcttctgcgtccactgcgcctgcttctcgctgccgaagatccagccgctcatgttcttcgtttccagcacgaagatgccgtagggcgagaggaatacgtggtcgatctgcgtggtgccgtctggggtgtccagcgtgacgttgtgaaggcggcggtaggtctgcttgtccaactgccaatgggcaaacaaccgcaccaggagttcgccggtatggcccttggcccaaggcgatttgagcaggctgattagcagcatcagcgggataaaccagcccagcgtgccccagacctgcgcgatgatgggggtgaagtccatttcctgtcctagtaatccagaattaaccggatagtaccgaaagctggcgtaatggcactacagcattacgacgagcccggtgcgctgctctgtcgctgcgggtcagccttgtgcgtttgccgagtgctgtatttggtaacgcgtgctgcgcccgccgccgggtagccgggcaagacagcccttcgcaacaaggtcgctcagatggcgcgtggcggtggctttcgagaccttggccacggcctggtattgcgccgcgctgatgccgttctcgaaacctttctcgccgccatcgagcaagcggttaagcactttgatctgctcggcagacaaggcttggctgcggtgagcctgccagaagcgtgctttgaccagcacgcggtagatacgagcaagtgcctgctccaggctcttgagcagcgttgcgaggaaccattgcagccaggcggtgatatccagcgtgcctctctggctcgattccaggatgcggtaataaccggtacggtcgtcgaggatgctcgccgacacggcgtaaaaacggatggcctgctgttcgccctgagccagtgccaggtcggtgatggcgcgcgtaaggcgcccgttgccgtcatcgaaggggtgcagggtaacgaaccagaagtgcgcaatgccggcccgcagaaacgggtcgaggccagcatcgctacggctgctctcgaaccaagcgaggaagtcgcctagttgcgcttctagtccggcacgcggtggcgcttcggaatgcacggtagggcggtcgagtctgccggaaactactttcatgggctcttcgccgcgcagcatgccgatgcgtagcgggcgggccagcaggtagtcatcgctggggaacaaccagccatgccatgtaaacagccgctgcagatcaagcggctgctgatagacgcgggtggcatcgaacagtaattccgccagcccttcggatcgagaggtggtgcggccttcttcgtgcagccctaggcgtcgtgccagtgatgaacgcaccgagccgacattcaactgctcaccctcgatggcggatgaggtgacgatgttctgcagcatggcatccaggctgctctgcacctcggtgtcgccaccgacagccccgagcattcccagcaagcggccctgagcctggctgcacgcgcgcagcagcggagcaagttcgctggcttgccagctgaagtgcggccagttgggttgttgccaaatccagagcgggtcattcatgagggctgctcgtctgtgagccgattagcgagcttattcggctcatttaatgagtcgataatgctggctattcggctcactgtccaatctacaagccccgaactcacgcctgcgaacccggcacggcgtggctagtgcatcaacccaacgctttgatcgagcgttggaacttgctcatctgctgcaggcagccggagccaaccgcgcactcggtcattctcgatataccagcggccttcacgctgggcgaaggggattgattccctggcgctgccaaaagggcctgggttttgttgagcgatttgcactgtatctttgtcggcgctggcaatgatcgcaacgtgcccatagcggttgagcagtgagggggcgaacaccagcaaatcatccgcttgcggcggcgtggtgctgccgttggtgaactggagcatgccgcgcttggcattcaggccgccgtcactgacctgtgtatcgaagaagtctttggcatgcccgtagctgtccggcatgcggtggccgtggcgttcgaagtagtagcgtttgacgaactcgacgcactggtagcgaaggcccaggttgtagccgtcctgagtctggttacggccttgcaccgtattgaccccaccgttgtagtagatggctacgccgtttagttcatcgagctgctcgcctacggcatgccgggggttgggatctattcgggtaatggcagaataaagtcccagggcggccagtggcagaacggccaggcctatgagagaggtgcgtcggaggttattcatgggtttactatttcgtcgctttattttgtagatgtgcgccacgttctggctggcactggggcggttattccgcaacttcaagcgtgtagacgcgacgtgccctgagaccggcgcactgggtgccatagctgccggcggatatatgcacttcataggcgccagccttgatcggagtgccgttgatgtgcccagtcggttcgcggttttggtgataaatactcagtccatcgggtaaggggtgggcgtcacttacatagatgccgtggacaggtgaagaagtattggtcacgctgagttgtacgctgtacgggaccccgactttggcggctggtaaggcctccggcagcagagtcggttcaggccgcattgcgcagctgccgaccatgccactggacatgactgcttcacatcccgccagctgaagcgttaagccgatgacgcaaagtgctttccgtagcatatgaggcgctttcctctttcatgggattttgctgaatacggccccgccgtatatgtctttgacgagctgaccaagcgtgtagctgcgcgtgacctggtgcgaaacgtagccccaagaaaacatctgagagtcgacgattttttcctcgggcgcggtggtctgattgatttcgccgttttgggtccgcggcgctccttcccaaactatccagtgattcttcccgacccctgcgccgccctccaccatcgaggcgcaaactagcgaagtgacatggtgctgagggttcaggtagctgagcaactccaggaacttctcctggttgatgtgccccctgaactggatgttatcgaagacaacggtggcgccagccttggtaaaccatgactctacgttgctggggagagtaatccctgatacctggtcgctaggggagtcgtaatcgagcagggcgttctcgctgtctcgaagactggccaacgagatccagtcgatcgcggatatccggtctcctgccgccgtgtcgctaaagttcttgggattccggcagtcgtagctgggtttgatgtgtagctgtccgattgtggtttcccctgtttcccatagatcgatgatcgcttgggcataaagatcggggcgatccttcagcagcgcgtagaagaaagctgcaggcccgcacaggctggtctcttgctggttcggctgaggggtgattctttcctgggtcgatacatactgcccttgggatctcgccaggcgtactcgtagctgctctatgaccttgctcttctcgaacgggtcactggctgtacccattggatgttcggagtcgttgaagaagcgacagttagagatagagcactcgaattcgtccaggattttctcggcggaggctgctcgatcaggtgccggcgcagattgcttcatgctgccagcgggctgttcctgttgggccgccagaggggtggcaggagagtggctcgttggcattgccgctgtcgcaaccggggttgccgctagcgctgatgggcttggtgctgtgaagggggcggctactgggctgtcgccgatgatcacgctgccggagccgccgatgatcacgctcccatggccacccgtacttccaagcgttgcggccggcaggccgttgatcagtactgtgcttgctaccgcgcccactatcgggctgccacaggctgacgtatcgctcatccgtgcggccggcaggttatcgaagaagacgttcggggaacccgttgcgatggggtttgtgccatggccaggcattgggcaagaggtggggtcagtttggcgagccgccggttttccgctcatggtgttgctccctgctttcgtacgcgaatcctacgcgtgtcgtccgcccagcttttgtcgccttcgctaaattgtggcaatgatcactgtctgctttaagcatctggcagagcgggtaatagtcgcgccaggctacgatgccatttctccctgctgcggggatctggccgattagcccccgtattatggtttcagcgcttcgttgccagtaattcagagcgaccgatcacctctcggctgtgctccggtttgcacggtcctgacggctgtgctccggtttgcacggtcctgactaacctgattcttcgatagcggtattcacgccgtgaaaatgcggagcggctttggggctgcgcaatgtctccatgtcttcgttccaggcatgcaccatgtgtttggctacatcacgccaggcgggctcgttttcgcggcttcgataacttcattgccgacctctaccacggactcgcagagttgctcgaccatgggagcctactcgctcgggggaatgctcagcacggctttgagaaaggtttccaatgatcaacccggtgtacaggtttgtcttccgcctacggacaaaccaggggctgctggcgaagcgtgggtaggcttaagatcatagactgggtaagggcagcgtcagcacgcgaggtataaaacagcgcgatgttcttcgagtggcagtcagcattgcgcaccacgtagttggtcagcaactgccagcccaagtgttcgcgttgcgcttgcagacgctcagcagggatgtggtgacgcttggcactccacgcccgctcggtggtgggcgtacttttcgtgggtggcaagcccgggagcccatcggcgtcttagacgtcgcagcgggggatgccttgctcgccgacgtccctatgcctggctaagaaagcggtacccgtaaaattttttcggacagaaaaagaaaaggccagctacgaaagctggcctaactctttgagtttattggtgggcccacacggactcgaaccgtggaccaaaggattatgagcccgagaaagcctggcgttctgcctgggaaagcatctggatatcaatgttttaggggatattgcctgtctttaaatgacattgtcccgctgttgtgtggacgctatgtggacactccgaactgtacctgcttacaccccgcttcaattcctttcacagcgtgcaatcaacgctcacccgctgagccccgcgtagctgctgggctgcgcctgtcttttcatcacccactccgtttgcattaaaaccacacgcaaagcccgtcggcgggagggggataagtgcgttttggctgcggattttcttcaggacagaatttttcagcggcacgggatctgccagagctcgtcgagcttggtggtgtaggtggggctcaggaaattgcgctgcatcttccaatatgggtctgttggtaccgcaccagggcggatagtgctgcgtccccacctagcgttgatggtgtccagcacctgcataacccgatcggaggtttcgggctgctgatcagcgaacagatccaaggtgtgctcggtgcgagcgcacaggtcgagcagcagcacctctgctttggcatacgaaaatccacgccgataggcggtttccagcgcgcgattcgcggcctgaatgagctgcctggtgtcatcggttggatatggcagtcgaacggctacgccgttggcgaatttggcttcgtcggggttgaacatgcccgtgcggatactgacgcgcaattggctgcacactgaaccttgagccctgagcttttccgccgccctggtgcagtaggtggccaccgcttcgcggatcggctccagatcctccagacgctcgccgaacatgcggctgcagcagatctcctgcttggccgggggctcgtcctcgagctccatgcatgcaatgccgttcagctctcgggctgtgcgctcgagcaccacgctgaacttcttcctgagactccaggcgtcggcttgggcgagatcccatgctgtggtgatatctatcgctgcgaggcgttcctgtaggcgccggcctacgccccaaaccttgcccaccggggtgaccttcagcaccttggccagccgatccggatcagacagatcgaccacgccaccagtctgggatcgccagcgcttggccgagtggttggccagttttgcgattgttttggtcgggccgatgccgacgcccgtgggtatgccggtgcgtttcaatacctgggtgcggatctcttttcccagtgcttccagcgagccttggacgccggtcagctcggcgaacgactcgtcgatgctgtagacctccacgctcggtaccaggctttcaatcacgctcatgacgcgctggctcatatcgccatacagggcgtagttggagctgaacgcgacgatgccgtgccgacgcagcagatgcttgaccttgtggtatgggtcgcccattgcgatgtagggctttgcttccgatgaccgggcgatcacgcagccatcgttgttgctgagaacgactatcggcgttctggccaggtccggtcggaacacccgctggcaattggcatagaacgagtcggcatcgatgagggcaaagcgacgatcagccattgcagaggtgccgcctgatgctgctgctcacaacgccccagatccgcagctcgtcagcctccatgatgtagcgcgggggatacttggggctttccgctctgagcacccatgtatcgccttccttttcgagacgcttcacgaagtgctcgccattgatgcacgcgaccacgatgtgcccatgcttggcgtctttagctttgtttaccaccagcaggtcgccgtcaaagatgccggcaccggtcatgctgtcgcccaaagctcgggcgatgaaggtttgcggggcgttgatgtccagcagctcgtcgagcgacagccgcgcctcgaggtagtcttgggctgggctggcgaagccagcgggcacactgtcgagaaacagtggcagctcgctgctcgagggaactagggagcagatgaattcagcgttaggcatgatcgggtacgactaaaatactgtgtgcatatacagtacatcgtcgaggtatagcccggtcaaggatctggtgacagtcggatggaaacgggagaaacccgcagacaggacgctgtgggtaaaggttttcgcaggtccagaaatgacaaagggcgcctttcggcgccctactcacaaacaggttggcttgtcatcgccgtttacctgtttggctctgcgattgctggtttcccaggatcctcagagtctcacaagtccctttcgggaacggatgcagtattgcgcaatattgcgtgaggcgcaattagctgcactgatatccgatgaacgctcgttagaggccaagcgctttggccacggctgttcttaccgctgcgaactgttctgcgttgagactgaaggtgacgtactggcggccaccgtggcgactcctgaccttgcatcgatccaagcgagcaaggctgacggtgtagatcatgtcgcatttagcccagcacactgtgctgtccccaggtagctgtgcagggagctcgatgtggtgatcttcgagaatttccggggcggtcgtgctcaatggaacaaccgtaaccagttgccggttgtgcttatgctggcgaaggatcacgacggggcggatcttaatcatttcagggacttcgtagcccctgaagtcgcacatcagaacggttcctgccttgggttgatactgtaagggcatccagaatactcgccggaaattagagggcgccacgatggcatgacgctatcttaccttgcgcgtgatcaaacacctgatgctaggcggtgatcggcttcagcttcccggccaactccgaggcgatgctggccttcgcagtaaatccactcgcatcacctgggctcggcgtcggtcctggctggtgggtatggctggccagctgggtattcatcgcctccaccaggtcgagcagatcgcacaccacctgcagcaggttcacgctctccgagccgagccacgtttgtggcgcgatgctacggcgaatgccctggatgcgttcctgcatgtcgccaccgatcgtggcgttgtgcttctggcccaccaccacgttaaggtcgcggccggtggcctggtgcagatcgtcgaccgcggcgaggctggcggatccgccggatagcagcttgagcgcgcctagggcctccactttcttgatgccgcccaccgattcggtggagtggtcgtccacctccaccgtgtggttctggtagcgctcggtgttgtccagggcttccacctggcgctccaccgccttgtcctcgatcttcccatccgtctggcgcagccagtttccgtcggcgtccacgcgctgctggcatgcctcgctgtgctgccacacctggtcgcccttcggcacgcggggcaggctcagcccatgcggcagcacggtctggatgaatggcttgtgaggcaggccgtaggcgaagcacaccaccaccaccgtgccttcctctgcgaagccgaagaagcccgcctcctgcccgccattcggcgccggcagcggcacgctggaaagaatcggcagatccggatcgggctcgccgtcgggcagcagcacttccacgtcaacggcgaagcgcgggcgaaagtcgtcgcacaggccaggcgccgccggcgcatccggtaccgccaccacgcgcccgaagcggggcaggtggtagccgccggtcagctcggggaattgccgctctacgctgcggcggattgcgtcgtccatcggatggccatcttgttgtcggcgagcgtcacgctggtgatccgctcgccctggttgatcgatgcaccagggcgcaagccgggcagggccgcgatcatggcgctctggttgccctggtaaccgtcgaacagctcgaccggcaattgcagcggtgctcgagcgccgaagaagctgtccgcccagctgccggcgaacagctcgccgtcgccctgctgctgccagatgaagtcggggatgctgaacacgcgggccaagctgtccatcgcctggtacccggcggcgaggctgtagaagaagggcgtcttcacctttgcatagggctgctcgggcacgcggaagcgcagcccggttttctcgctgattgttgcaagcaccatcgtcatgtcgacatggcgaaggttcatcggcatcgggttcgccaggatcgccgccagctctcggcacatcagcacctgctgcacgcggttggccgcggtgcagcgctccacgtagccgatgaagtggcgctgcagcgtcgcctcgttgtagccgatgtcgagcgtcaccagccccttcaccggggcgtccgcctggatggtgaacgaggcgcggcccgggcttttcagctccagtcgcacctcgtccttgaccagcgggtaggcggtaccggcgatggtcagcaccttgtgcagcttcatgctcatgctgtgccgcccaggtagttgtccagcttcttcagcgtcgcctcgaagccggtgagttcctgcccaggtgcggccgatccatcgccggcggcggtggcggtcgagctgaccgcctgcccgggcgcggactgactggtgaccgcgttgggctggcggcgcttctccacccgctcggggttggagagcttttccgccagggtgaactgcacccgccacgccgccagggtgtcgtcctcacgcgcgctgacgccatcggagaactgcacctgccgcacgccgaaagccgtggcggtgtcgttgacgatgcggtacgtcttcagttggccgccgccttcggtggcctcggccaggcgcatcaggtcgcgcagctgcacctggtcgacgaaggggatcatcagcgagacggtcagtgtcttcggcttgaaacccttgtgcgccgacgtgctgttgctcgtctgcccggacatgtcatcgctttcgatgcgcaggttggccgtgatcttgagccccttgccccgcaccttttcaccgtcgagcagcagcgtcatagtcctaccagctcccgtacaaagctcagcccgtccagcgaacccaccagcagcaggcccgcgctcaatacccattcgtgccctggcgcatcgccctcgagcagctgccggcgcagctctctcgcatcgccagggccaatcagccgggcgcgcatgctggtgtcggcgctgctgttggccagcagtgccttcaggtccgccagctgctggtcgcggccctgctgttggctggccttgcggctggccagcgcggcgaggtccgccatcggcgagctgtcggcggcgtagctctccagcatcgccaactggccggcgatcgactgcttcgcggccttggtcaccgtgcaacgctccaatggcagggcgccccaacggggcagcgggccggcgctgggcatctcccacttttccgcctcgaggcgcgacaggtgccgggcgcggcgctcggcgcgcaccaggtccggtaccggcagcaacgcattgaagcgcaccagggtgtcggccagctgatcaaagcgggtggagaggaacagcagggaaagggcgtactgcgccccgctgggtttgccttgatcggctgggtccaccatcttgccggcgagctgctgcaataggttcggcgccgatagaaaccgctggttgccacgcccctggccgattccgctctgaaagggcgtcaccgccaggcaggccggtacctcgcccagctggctgcccagcgccgcgcgcccggtggctatcacgccggcggcagcgccgccgaccggtcccgggttggtcgtggccagcccgtccagccccgcgagccgctgcgccgtgctggcaagttcgccgccggcgaggctcttggcgtcgtcaagctctgccatccactgggtggcctgctcgggccagcgcatggtcaccggggcccaggtcacggctgcggcgcctcccaagtgatcgcctcgagggcggccaagtcgccggcctcgagcgcggcatccaactgctgtttcagcgcgttggcgtgctgcagcagctgcagcttgtacagcgtgaagtcatcgcccacctggcgcagttgctcggcggagtgcagacggaattccttcacgccctgctcgtctcggcaggcgtagggcatgtcgagcccgcgcagcaccgcgccggtcaggttcagctggtcgtccagctggctgctgtagaagtgcggcgcgcccagcgcctccgaggtgaagccagcagtgatggcggcttcgcaggcgcggttgattgcggcggttcgattagcatgcgcggcctcggcttcgctgggctggtcccgcacggtgagcgtaggccgtccgtcgggtccttttgtgatggcgtggccggtaccttgcccggcgatcaaacgttgatgttcatcctgagtgatctcgatctcaccctttaccagcgaaaaagcgaatcgctggtccagctcattccaagtagcgaaaagacccattgttatctcccaagcccgaagcaataaacggtctgtcccgatgtagaaataggtgcgctgccgctagggttgccatagagcgagaggttgaacccagttcgggatagcccccacatctggccgaaatagaaattcggtgtgctctcggggatagcaccgggcgccgcgtagtagattgagctgggaaactccagcggccatgtcaccgatacgcccgcggatacggttaccggcacgggagtccattggaaaataaatccaccaagccatccgggcagtacaaagtagccgctatcgccaaagaggtacgcgaagccgcctagcatgtaccccgccagcttcttcggtgtcacgatcaccgagtcgtttgtgccggcgtttgtctgagcttgggtcgctatcttcgcgattcccaacactgtttcagttgcctgaacgaccttcttcgctatggcctgaaatacccgcaaagggctcatccagaggctttccgctgagccgttttcagcgtcagcttgagtggcatggtccgctgagtcgatcactttgacccaggccgtccaggtgtttccgtttagccccctccaccacatttgtcctgcgctggatggggtgccgtaaggctccgcaaattgttccaatgcgccaacaccatctgccaaagggaggcggacgtaggtccggcaatagaagtagatatcgccgcccggcccctgcgggttggatcccttgattaggcgggaatgcagcccttcgtttacaagcgtatcccagctgacatcgcccccttcaagttcttggctgatacgaaaatggcgagctgttgcggctttaggccccccaaagtctccagcgcgcagggcatcggtgatcccgtagccgttgagtgtcgtagggttagtgccaccgatcacgcgcccgcgcttgtccacggttacgctgcgataggtgcctgcggcaaggccaacagggcccgctgcgatctcaaagaggaggccagtggtacccagggcgatgggggcatccgttaccagctgccagaggctgtcgccgttggtgcccccttgttcaacgggtaccaacattccgggcgttacctccaggctcacgtcggcgtcgccggctcgcgaccaggcaccgctggcagcggtgtagatcccgttctgcgctgcggtgccttggtttttgactaggacccggtcgccggccgacagtgccacgccgtcaatggtctgcaggccgctcagaacgacgttggctgtggtcgccactcgcaccgactgcttgctgtcgagcttttccagctctgcccgaacgaacgcacgggatgcaaagtgctcgatcaaggcgcccgcgatgtcctccaccgaacggctgtcggcgatggtgttgctattcggcagatctgcgatggcgacgcagtagtgctgcacgccggcagtgtccacgtaatccacctttcctgcgccccataccacgctccaggtcgccactacgtcgttcagctcgcgctgcagagccacgtcgagccaggcggtggtggggagtgctggcggtactacgggcagcgctgcagcgcgctgcaggcgtacaccttcgatgtaggcggtgcccggcttgagctgataggtgtcgcccactttctccagctgcagggcgctgccgaagaagcatgctcggccgaagatatcgcggttgctctggcgctctcgctcgtcgatgccggccaggcgcacggtgaagtcgtgctgccaggtgctggcgtcgatcgtgataccggtcagcgcctgggcgccatcgaacaccaccaggaagttgcgggtgatgttgttgccgatctgcaatggtgggttgttccgacgcttctgctgctgcggtacgtaggccacggcaaacagcacgccctcggcgctttccagaccgatccagttgaagtcccaatcgcccacgtccgacccgacctgcaggctgtacacaacctgggcagggttgacgtagcccttgttcgcggagggaatttcagcgttgtagacgatctgcccggccggtggtttcggtgcagcgcggtcaacctcgttgttcgggttcaagcccggcacgttggcgaagatgaaccgcgtgatgttcagcggctgctgcgccacttgcttctgcgcgatcaggtcttcaccggccagagtgatacggggcatgcacggctcctacaggcgggcgaccagcgtctgctggtcgtcgttgaagtcggccagcgccacggaaagcggcactggcgtaatggtggaaaagtcgtagcggcggcaggtccgcccgtactgttgaatcagcacgcgcaataggtcggggttctgggccaactggccgtcggtaagctgcagcagcaccacatcccagtcacggtcgggctggcgctcctcaatctccacgtagccgacacccaggcgctgcaggatccgcttcatgccggcgacgctgccggcgtccactgcgttgatgaaggcgaacttcacgcgcaggcggtacagcgcctcgggttcacctttaaagcgggtgatgtcccgctgccaggccagcagatccagaatcgtcaggtggcaggtgtccgcgtccatctgtagcaggggccagcgcatccagccctcgacttttgcccaccaggacgcggccgcggccttgagcttggtcagctcggtaccggcgagccagaagggcagctcgagcttgatcatcggcgcacctcgcccgggaacttcatcaccgggcaccggtcagtgcgcgtgacggccggccggtcggacgcccctccccattggttttcgccggtcgccgtctttcctcccttacgcattcaccacctccaggctctggatgcggggaatgctcagctcggacacgatgtccgcattggcgaaatccaacgactcgatgcccgggaactgctgatgcagctcctcacccaggcggctgaatgaaaagcgcgactgcgggtacgtcaaagtcggctggaaatcacgtggcgtgctctcgcggaacgccgatcgcacgaacagcgccacttcgtcgcgcagcgtctcgcgttgcgtcgcggtcagggttgagcgcggccagatcgtcaggctgatgtcgtgcagggtttccggcatcaccatcacctgcaggtcgtcgccatggccatggttgccgctgtcgcggatgtaggcgttgatctcctcgaggtacgtttcgccgggcacgtccgcttcgaacagcacgtaggcgttggcgctgccaggcccgcgcggcgcaccgtgttcgaagtacacaccatcgggccgcacgcctgggaaggccgcgatcatcgcgcggtacaccgcatcggtgtgccactggttcaccgccgagaactggttgcgcacgcgcaggcgtagctcgctgtccggctccggatcggcgcccggcgaagccagccagccgtcgttgttcaccaccgcggcgatgcccggtaccggctgcggcaggatggcgtaatagcccggcgcaaggttgtagccgctgccgacgtccaccgcctccaccgggacttccaattgcatcaggccatcggtaaaggtgcccgctgtggtggtgaccaactggtagacgtgcccgttgatcgaggcggactgcaccaccgtgcccgcggggatctccagcgccccgccggcttccaagcgggtgaacagcagcacgccgcgcgctttggtcgcgcccttgcgctccacgttcaccgcccaggccagcatgtccagccaggcgccggtggcggtcttcacgaagaagttcggcagtaccgtgccgctgacgaactccagcagccacagcacgggcttggtcaccagcgcggtgacgacgcgccagaacggcgagtacgcgctggtgttgctcagcttgctgccctgagcggtcacctcactttcccaggcttggcgcaggcccgcctcggtggtggggatgcccgcatccatcagcgcttgtttgaagtccacgtcgctcacagggccacctcgatgctgccgaatttcagggtcttggcggtgaccaggtactggcctggctccacctgggtgatcagtgcggtgccgggtaccaggcgctcgtcggcctccaccagcagctccatctgctggatgcagtcgcgttggcgcagccggtcacgctcggcgaccagcgtcaccagcaggccgctgtcgcggatcatgtgggcgatgtcctgggcgatgctcgcgcggtcgtccaccagcagcggctggcgggacaggtccagcaccaggtcgttgtcggcgatcagcaggtcgatgtagtcgctcatccgcccaccgccatgcccagcatgttttccagctcgagcgggctcatcgccttgccggtgtggatctcgactttctcaacccgggtgccgcggtcctggttgctggtgttctggatgctggtcagcaggccacccggcggcaccgcggtggcgcgctgtggggaaaggctggggatggcgttgttgatcgtggcctgggctttctgcgagcgctctgcctgttcggccgcggtcatcgcgacctcgccgccgggcacgcttggcaccgcaggcatgtcgccaaaggtggtgtcgatgttgacgccagggatcttgttcagcagcgtgatcagaccttccagagccgacccaagcagcgcgaacggggaaacgttggtcagcccccagatgaagccgtcccagatggcttttgctgtcgtggtgacagcctccagcgaggacagccaggtaaccagctgaacaccgaagcccaccacctgctgcagtccgatccagagcacgttcatcacagcgcagaacacgcggaacaacatcaccactggcgtaagcatcacgacgattgcctggaaccaggcggtgtcgccgaatgcggctttcagatcgtcccagtagtagatggctaggccagcgcccaccgtaagtgcggcgaggccgataacgataagcgtgatcgggctggccaatatcgacagcatgccgatgacgccgtgcaggatcgtcaggccagctatcgccgcgatgaaccccagcacgcctagcgtcaccatgccgatgaccttggcgaggttcgggaacaggccagtccagcgtgtaatcgtggcggcaattgccgtcatccgctccataagcggggtaagcagcggaatcagcgcctggccgaacgcaatgcgcagcgtctgcaccgcggcgccgaactgttgccaggggtcgaccatcgccttggccatcttctcggcctgctcgaggccgtgcacgttgccaagctgctccatgctgttggccaggcccatggtgtcggtcatcagcagcttgatcaggcccacggcctcgtcggagccgaacgccttcttcagtgcgtcggattcggccacgtccagcgtatcgccgaacttgcccttgagcttgtccaggatctgcagcattggcagcatccggccctggctgtcggtgaacgaaaggcccagcttttcctgggccccgccgacgccagacaggaaggccttgtacttggtaccggcctcggcgccgcccatggtcgcctgcagcgtgccgaggatggcgacctgctcggacaggccgatgccggcggacgtcgcactggcgccgatcgacgtgaacgcgtcgctcatgtccttgccggtggtcttgaacatctgcacggcaagcgccgtctgccccgtcaggttctccacccactcggccttgcccatgacatcggcctgattcttgaagatgccgtacatggtgccgacgtagctggtgatcgtgccggcgtcggctttggtcgccttggccagcacgttgctcgcgttggtgaaagaggacagctgctcgccggtgagcccggcgattgccgactggatgtcgtatgccgaggccacgaagtcgcgggcgttcgcgccgtacgccacggagaactccaacgccttgtcgttcagccgctgcagcgcgtcctcggctacgccgagggatttcacctcgcccagggcgcggttcatctccagcgccggctgcagcgattcgttgatggctagcccagcgcccaccatgccggccaggccgaagcccatctgccggatgttgtcctgacctttctcggccagctcgttgaagcccatcttcaccttgcccaacggcgcgctgacctggtcggtcagcttcaggatgaagttcagggcggcgctgttcgtagccatcgatcacctaaccattcaacgcatgggcaatgccgttcgccactgcgatctccatgcgtctccagtactcgtcctccagccacttggcggtgcccatgttctcgggggtgggcgccgcgccaggtagccagcgttcagccagggccatcagctggcccaggccgtcttcggtcagtcgttcggctcggtgcagggcttttttactgccacctcgacgtccgggctgtactcctcgagcagcgcgccggccacctgcatggtcagcaccgggttggccagcagcgggcgcagcgcgtccttctgctcgggctgcacggtggtggtcagcaggttgtggccgggggcgaccttgttggtcggggtcagtgcgttgaagtacttcgtcacgtcctgggcggacaggttgaacgtgaagtcggtggcaccgatggtgatcacgatctggcgttgtgcggtcatgctctgttcctcataagggcttcgatgtgggcgcgcaggttgctttccagcttgtccatggcacgctcgaaatcggtggttttcgggtagttctgcgcgatctccacgcgcagctccaggtgctcgcgtcgcgcctcgctcacctgccggaacagatgtgcctggaagccgatcacggcggtcagcagcagctccggcagcaggttcatcaggttctccagcaggcccatgtcaggcgctccagttgccacgcccgccgatgcgcaccgcggcgtgcatcagccaggcgagggccttgttcatgccttcctcgaggagggcggcgtggaagatcctgtccgcctcgcgcttggtgaagcggtgggtcaggttcgtgtagatgaagtcgtgcaccacggccggccggcgggcctgcacgtggtcgcgcggcacgatgcgccaggccaggcgaggcacgctggcaaggtccgtgcggtaacccaccggcacgatcacgcggcgctggtcggcggtgcggtactgcagcggcttgaccaccttccacagcgcgtcgccgggcacatggcgcagctcaaggtcgctttcaaaaggcatcggcggcgcactccacgcggatccggttcggtgccgtgctggtggcgatcgcctcgcgcagcacgctgcggccgatctccggcgccgcgcagtagcggctaaccagcgtgccggcggcggtggccaccgggttgcttccggcgcaggcggcaatgccgagggtggtgaccagggcaagcgcgcaggccaacagctgggtcttgaacgaatacttcatggtcagtaactccagatcatcgggcggggcagctgctcggccggcgccatgtccaggtggatgaaccgcccgctgcctttctgctgaatgccgatgccggtgaagggcagcgtcatggccaggcgcaggatggaaaccgccgccgcaccgctgcaggcgatgtccagcgccgcgccggtgctgtgtgcgccgggcttggtcttgcgcgcctccaccgggtgctggcggcagcggtaggcgctgctcaccaccagcggctgggcgtacagcgtgcgcagctgctgcaccgcctccatgaaggctgggtccatctcggtgccgtcgctgccgcagcggccgcatttgcagcgcagctcggcgtagctgaagttcggccaggggctcttgctcatcgggtggctcgcttctcgaaaaaggtttggcacggggtgcagcgggtcaccccgcccagcgcgcggcgctcggcggggatctcctcgtcgcagtcctggcagtggtgcaggctcgggccgttcggtgagcgggccagctgggcggccaaggcgcgctccagctcccgttcttcgcggtcaaccgctcgatcgacccagtccgccatcagcgcaggccctcgatctcttcagcggcgaggtacggcacgccgttgatgcgaatgaagtccgggctggtgacgtcgaagggcaccttgtgcttgctcttctcgccgcccttggggtcaatgttgagcaggctggataccttcaacttgcagccgaaggcctccacgcgcagctcctcgtcgccggccttggcgaagaacaccgagtcgaagggttccaactggcggaagctgccggcgcgcttggcggcctcgatcagcaggttgaagttggcggtgtcgacttccatctcaccgctggcggaaacgtcgccgtccacgtgcccattgggcacgcccttgtcctgtgccaccgcggtgttgtcggtgatgtccagagtgcagctctcgacgtgaaccagcagatcgcccaggttcacgtcgaagtttttgccaccgatacgtgccatgcgggcttactccgaatcgtcgttggaaaggtcgagggcgatgttcgccgtgaggtctttcgggcagttgtagggcttgagcttcaggtaggcctcgaccttggtcttgctttgccacaccagcacgatgtcgccgtctttcggcggctcgatctcgcccgggaacacctggccggcgaactgcaccgaacgcgacatggcgcgcagcggtgccatcagcgcgctggtggccgcggccatggaattgggggtgctgttcaggcggcggtcggcgacccgctggatcagcaggatgcgcacgcggcgcgcggccttgtccgccaggcgcaggtactccaccacctggaagtcgctgcccggcgcgtcgagcatgttgccgtcgccccagaacacgcccgggtagtcggggtatgtctgcgacacgctgaaacgggcgctgtccagctcggcgcggatggccgagggcagcggaatgccgtcgacatccaccggcgtttcgcccaggcccagcacggcgcccgtggccacgcgcatggggctgtcggcaatgctcactgcggcgttggccaggcgcccggccagcacgcccaggtcgttgccgtgcagctgcggtaccaccagcacgcgcggagccgccaggtcctggacgatggcacgctgctcgatcaggtactggttccaggtctgcaggtccggatcgcagccggcggttgccgccatcacgaacacgcggcggccgtaggtgctgttcagcatcaccgcggcgtcgtgcatcgcgctcagctcggcgccactggtcaccggcgaggtgatcaccaccgcctcgaccgagaagccccgctgctgggagtactccagagcgtcctgccagcttccggccaccgcatcgatcggtgcagccaggcaggcccaacggtcgccgccgttcaggcgcgccgcggtgacctggcgtttcaggtcgctgtcagcaacgcccagcgccgcgtccagatcgctctgggtgttcagggggatcagctcgccgacgttcgccgcggccgggccgatgaaaaggaaatagcgctcgatctcggtcacggcaccctggccgaggttgagattgttgacgctgactttgccgagtgccatgcagtgcctcgctagcggggtgagttaaggatttgcgggagcaggtaggcgatcagctcgttgacttcctgctggttggccacgccgaagaactcgcgcttgggcagctcgatctcccaactggtggggccgggtttctcttgcttgagcaggcgaatcagcaggcccgcctggctgtacttgatgttctggacgatccagtcaacggagggccgcagccagcgctggccgccgcgcttggtcttgccggcgcggatcttgaaaccgagccggcgcaggcgcttggcctgctcggcggtcgccataagcggggtgactcggctgaaggcgcgcatctggccggcggtgcggtgctgcaccatcccggcgttgtggatgccggcgatcatcgcggtcttgcgcttgccccagcccagttcggcggcttcctcggtcaggcgcaccacggagaggccagtggccaggccggtcagcatctttggcttctggcctttcttgcgcttgcgggcgcggggtgcaaaggcgctgccgtgcaggtcggcctgttcacggacgcgcttgcgccacccggtacgaatgcgcagggcggtgcggttcatcagccggcggcgcagcttcggcggcaggtccagcagagcgagctgggcggccacgtcgagctggccgcgcacgtccaggttgaacgggttactggctgccactggccacctccccgtgttcggcaatccacaggtcgaacggcacgaaggcccagcgcttgccgaaggcctcgatctcgccgtcatcggcttcggccaggtactgcggttcgatgaattccagggtcagctcgacgtcggccaggtcgttgtccagctgctcgatgtcgaaggtcggcgccggcaggtcatcggcgcgatcggggtcgtggttctccagccagctgccgagcagggccatcagccggcccgggtgatcggcaaagcgttccatcacgatcaccgcgcggtagcgcatgtcgcctaggtgcaagccgttcaggtcgggcttccaggtgaggttgagcgtgacctgctcggcccagctgtcgagctgttccggagcgaccaaacggcgctcgagcagaaaggtggtcagggcgcggagcttgttcacagcagcaccgccgtaatccggcctcggccttgcagcaggcgcacggcctgttggctgaaggcgaggaactggtcttcggtagcgggtgactctttggcgatgttctcggccgactcgcggcggttcaccgtggcgaactgctgcagtaggtaggctttggcgcggcagtacacggcgcgcttgtacgtcgctacgtgaaatgtgcgctccggcaggaccatggggtccgcactttcaacgttggcgacgcccgccgcctgccaatccgccttgcgcttggccaggtcgacgttcacttcgcccatggcaaaggcgatgccctcggccagcagctcggtcaggtactccgccggcaggcggtaccccttctggaactcggcgacggagaggttcggccagaagccgtcgttctctatcgcttggtccaccagggtggtcggtttacctgaaaagctcattgctggccgctcgaatagggcggggtgactgcgtcgggtggtactggctcaaagccggaacacctgggcaggccccgctgggggggtagctggttacgcggtaccggcttcggcctgctgcttgcgcagcgccttctcggcaccttcaaggcgcgttttcacgccgatttccgggtacagctcggtggcacggttgaggtgcgcaacagccggggcccagtcctgacggtccatggccagcacgccgagtaacttgtggtagcgggccgggatgcgctcgaacagctgccaggaggcaggggcgggattctccggtccgtagatctggtcgtcccaggccgcatccacacgcggcagcagctgtgatacgtagggttccgggctgcggccggccttgtgctcggcctcggcccagtcgatcagctcgtcggcgacgaaggtctgcacgtcacgcttgaagcgttccggcagctgctggccctgcccaatcgcgaagtcggcaagctcgatgccggcttcgaactgcgccgtgtcgaacagccagaccagcacctgcattagcaccgggtttgggtggttcaggcccgactcgcggtagcgctgcacgtagtccaggtacttgggcagcagctcgtcgcgcttgagtgcctggcgtgcctcgcggctgttgatggcactgatgcgttccaggtccgcatcaatcgcggtggtcatcagggctaggtgcttctgtgcgttggcagggccggccagggcggtggcgggcgtgtaagtccgcgcaccggtggccgctgctgccgcaccctgttcgcgcacgcggcgcttatgggctagggccaggctcatgtcagacgaactccacgttggcggactcgatggccgcgaacttgcccagctgctcgatcacgtagccctcgttgcggctgttgtaatcctcaacctgggagcgcttggggttctcctggatgtgccggcgccagctggtgtcctggaagtagatggacaggttgtcccagctggtgaccaccacgccgcggctcgggaagtgcgggcaggtgaaagtcggcagaccgccataggtggcgatcacctgggccatctcgatgcgttctttctcggtcggagtgtcgccctgggcggcgtacagcttggccttgtcgtgggccagcagttcacggccgacgatggcgatcaggtcgccgccgtcgcggaactcttcgtcgatcatcagggacacgtcgtgcaccagggcgtcgaggttggcgtagtcgccagtcgcgccgatttggatcttgccggccaccttggcgccctcggccagtacctgctccggcgcctgctcgcgggcgatctgcagccagcccttgttcacgtcctgcagcagcgggttggctacgcggtcagtggtcgcggcggcgctggtaccgttccagccgatcatgatgcggtccagcgcgatctgcttttgcaccgcggcggaatagcgctgcgggaagttcgggaacttggcccaggcgtcgatgctggcgtacttcagtgccacgtcgctgtgggtttcgaacagctcgtagccctggccgtccaggcccagcacgttgcgagcgacgcggtcggcgttgctggtgtcggtacggccggtcaccgtgccgctggtacccagcatcactttctcgcccttgatctcgctgaccggaatcacgttgatccgggacaggaaggtcgagctgtgggtgatcttgtcgttcagcgtctgcgcgtgggtcggcgtgacgttgaattcctcgcgcaccgtttccacgccataggtggtggcgatcgcaacggcgagggcgctgaatttcaggcgggctgcttggctcaggctcatatcagtacacggcctctggcttgtcgtcggccgcgccagtggtgttgggcacgtctttgcccttgccctggttcagcgcggtgttgaatttctcggtcaggtcatccagcgaggttttcaggctgttgaactgctcggcggtgataccggtggccttgtcgccttcgccttccttaccggcttccggctcggtgacggcgggcttcgtgggctcggtgggtttcgcggcaaaggtggcagcgctcgtttccaggctggaggccacggtgccgagcttgtccaccgcagcggcgaaggcctgcgcggttttcgggtccattggggtgctctcgtctttgggggttgcgggggattcgggaccgcccttgccgagggcgctgaacagacgggtgaagaaggaaagggcggcggcttcgtccgtgtcgggttcggcgatcagctcgcccagcggctccaggttggcgaagtagttgcccttctccgcacggcgggaaaaatgcagttcttcggtgcccaggctggcgggctcgtcggtgacggccatgccacgcaggtacgctttgccggtgtcggcgaactcgggctggatctcgatgctggtgaacagcttctggccttccttgttcaggcgcagcaggtagtcgttgggctttaacttggcgaacagggcgactttgccaccgtccacgtcttcggctttcagctcggcaacggtgcccaggctgcccatgaagcggatgtgctcgtaccagatcgtcgcggtgtacagcgcggggtcgtaggcctcggccatgtcgcgcagatcctgcgcctcgatcgtgcggccgtcggcggttttgccgctggtggcgacgcgtttccagtcggtaacaagggagcggggcatgaacttttcggctctgtcggggttcagatgccgccaccataggcaccgcccaggtgcccctcaaacgctttgcttccgccccgttcctagctgcgaaatctaggaattactcgcaatttatctgcgcgtttgcctctttttcgccgcatagactgcggcgcatgccttactcaaccgagatcaaagaaaccgccaagcgcctgtaccttcgccgtgccaagccgcgcgaaattcaggccgaactcggcttgcccaacgtccggatcgtctactactggatcgccaagggcggctgggacgagatgctgacggacgaggaaccactgactgccgtcagccggcgcatcaccctgctgctggagaaacccggcacgctggcaaagggcgagctggacgagctggaccgcctcaccactgtgcgcgaacgcctgctgaagcaatgcgccaagccgcagcagccgtccagcgaggcgcccccagagcgcagcgagggcagggagccgcagggcgagcggcaacagcggcggggcggcaaaggtgggcagcgggagaagaagccgaagaacgacgtcaccggcctgaccgaagtcgacttcctggagaagttcacggccaacatgttcggctaccagcaggagctgttcgccgccaaacagaacccgctgacctgccgcatccgcaatgtgctgaaaagccggcaggtaggtctgacgtattacttcgctgccgaagccttcatggatgcggtgctgactggcgacaatcagatgttcctctcagccagccgggcgcagtcggagatcttccgcagctacatcatcgccttcgctgccgagtggttcggcattcagctcaccggcaacccgatcgtgctcagccgcgatggcaagccgtgggccgagctgcgctttctcagcaccaacagcagcaccgcccagggccaccacgggcacgtctacatcgacgagtacttctggatccgcgacttcgagaagctgaacagcctcgccggggcgatggccacgcacaaaaagtggcgtaaaacctacttttccacgcccagcgccgtcacccaccaggcctacccgttctggaccggcgaggagttccgcaacagcaagcgcggcaaaaagctcgggcaggagtggcccagcgaagcggccatccaccagggcgcgctctgtccggacggccagtggcgcaagatcatcaccatcgaggacgccgtggccggcggctgcgacctgttcgacattgatcgcctgcgcctggagaacgacgaagaccgcttcgatcagctctacatgtgcaaattcatcgacagcacgcagagcgtcttcagcctggccgaccttgagcgctgctactccgatcagagcctgtggaccgattacgacccagacccgaaggagccgcgcccgttcggcaacagcccggtgtggctcggctacgaccccagccgcacgcgcgacgacgccacctgtgtggtggtcgcgccaccgctggaagccggcggcaaattccgcatcctggagaagcacagctggcgggggcactcgttcacctaccaggccgggcaggtcaagaagctcaccgagcgtttcaacgtcgtgcacattggcatcgacatcaccggcgtcggctacggcgtgttcgacctggtgcgcgacttcttcccgcgggccacgccgatccactacagcctggagacgaagaacgccctggtgctcaaggcgcaggacaccgtccagggcagccgcatcgagtgggacgccggctggaacgacatcgccgcggccttcctgacgatcaagcgcggcgcgacagccagcggccagatcacctacagcgcctcgcgcaccgacgccaccggccacgccgacattgcctgggcaatcatgcatgcgctggcccatgaacccctcaacaccaacaaacggcggcgtagccgctggtcatcactcgaacaggtcagccatggcaaagcgcaaaccgcagcagcaacaagcaaccaaccgggcgcccaaggcgttctcgttcggcgcccccgaatcggtgctggccgaaaacatgggccagtacctgggcgtgttcgccagcgacgacgggcgcctgtacacgccgccggtgtcgcgcaccgggctggccaagctgctgcgcgccaacgctcaccacggcgccattccgaagttcaagcgcaacctgctgctgcgtgacttccgcccctcggtcggctgcagcgcgcagaccatggggcgcgccgcgctcgatttcatcgtcttcggcgaggcctacttccagcgcatgcgcaacatcatcggccaggtgctcgagctgcagcacctgccggcgatcaacatgcggcgcaaggttggcgggggcttcatgatgttgctgcccaaggggcaggaactgcacttcgaggaagacgaggtggagcacgtgatggattacgacgtcgagcagaacgtctacggcgtgcccgactacctgggcggcatgcactcgctgttgctcaacgagagcgccacgctgttccgtcggcgctactacaacaacggcgcccacgcgggcttcatcttctacaccaacgacccggaccttaccgaggaggacgagaagaagctccaggagcagatcaagggcagcaaaggggtgggcaacttccgctcgatgttcgtcaacatcccgggcggtactgaaaaggctattcagatcattccggtgggggacgtggccaccaaagacgagttcgagcggatcaagaacatcacccgggcggacgtgatcgccgcgcaccgcatgaacccggcgctggccggcatcatgccggagaactccagcggcttcggcgacatcgagaagatcgaccgcgtgttcaccaacaacgagatccgcccgatcgccatgctgttcctgcagatcaacgccacgctgcgcgctgataggcgggtggcctggaacgatccgctgccggccggtggttgataaggtatgccaatcaggcgaatggccatgatgtagtgttttgacgtcataaaaacactacaagtagtggggaagctggcagaataggttcctgataaggatccctggggaggggcgttatgcgggtctactgcaaggaatgtgggggtaagggccggatcgcttcacgcgacgaactatcccgcgagttcgcccggctttattgccagtgcctgtctcccgtatgtggccacagctgggtggccaatctcaccttctcccacaccctcagtccgtcagcgcaggccgtcgaccgcctgctgttcgatcgtttgcgggacctttcccgttcccaacagaaagagctattcgatcagctgggcagactgccttcggcgtaatcactgagcttcgcaacagccgcacttaaacggcgcacactagctatcccaaactccgtaaaacccaaacgccctcgctcagacagttcgacgtttgaagtggtgacgtcgacaacgaaggatagtgagttttcgcattcctggaattcttcccgtagttccatcatgcgttgtacgttgtttgtcataaccgtatctccgtattggcaggtctcaagtccggcgaactttacttgcggttttttgctgtcgtcaagctgtaattctgtttcccaagtccggcgccgaaattgccgaattcctatgtttggatttggtggcgtaatgccctgcaggacgcatgaataggggcttttgaggccctgattccgtttcgattcctaagcttgggatttaacgaattcgtgatttcgccaaatcgttaattagcagtgctgatgttttggtaccaaaacgctttaacgcattaacgcaaaagctcaaatgtacctaggcgtggtgccgtttgtgtgcatgtagataagtaactaagtaactaagtagttacggggttgcgtagttgcgtatcgcagtatcaagggcaaacggatcgctaggttcaagaaaacgaaaaggggcgccgaagcgccccgatgcagcaggaaatttagcggctaaatttcctgaatccctcggatctctaccacgccgtaacggcgctgcccgtaaaggttctcgaaggccaccacgaacagcccaggcgggagcgggatcatcgccactccattgcccgtatcgtgttgcagcagctgggtggcctccatcaaaaagaagtccgaaggcagggccagctgctctcgcgctttggcctgttggtcatccggaatggcgatgattcgaccgtcgatcagcatggcgttctcctcacatgcacatcggcgggttgctgccggtgcgctccaggtccaattgttcccataccgagagaagccggccgggcttggttcggttgcgcctctgcacgctgggcagctcggcgtaacaggccttacagatctcgctcagcccatccggtttggctgtctggcggaagaagaactcgctatcggccggccagtgctcgtcgcacttcctgcagagcttttcgggggcctcctcgagcacctggacgacggcgtcagccattggccacctcctcgagcagatcacccggatgggtgaaggtggtgcgctcgcgtgggttgagcagatcgggctgctcgaccagcaagccaggcgccaagcccaacttgcgtgctagtgcctcggcagcgtggcgggcgtcgatggtacagctcgccgtctgcttctcgccgcgcacggttgccatgtaggtcatgccggtgaagcgggtgcgtatttcaatcataggtcacctcaattcaaagtaggcgcagcggcacgaggcgcggcgcagggttgggcgagcagcttggtgatcaccgcggcgtcggccgggctgagttcaccgagccggtgggccatgtccgccacgctctcgaggcgaatgcgggcggcatcggttttttgcacctggtagctgaccaacgcctcgccgacgatggacgtggcggtgaccaatagctggcggggtgctgtggtagcctttgcagtgctgccgcttgggtgtgtcgcttgcatggtgttgctcctttgctggtggttggtgtcggggagttgcagctcctcgacacccttctttcagccccgccgtggtagggcgctggccgtgaataccgggcgcatctcgcgccgcacttcgaacattcccaattcgtgcccgtccaggtcctgcaggtgaacctgtgtgatcagcgcgggcagctcggtcgggttgtcacgccagtggcagctcgccgccagctcggccagagactcggctgtcattacctcgacgcaggcaaccggcagatcgatgtggccgctgacgccgttcgcgcagtaggtcagtcgcatggcgcttattcctcgcccgctttcttggcccagctcagcagctcatacggctcgacaatcgcgcgacgctcgacagagcagccgccctcgtcgtcaaaggtgacggtcatgccgcggagcgcgaactcctcggggaagttcttctcacccagctcgatggcccgattgcaggctgcggtgtaggcggtattgagatgggccacctgttcgtcgaaggactgcttggcctcggccagtcgctgctcggcgtcgatgacctcttcgtgggagcgctcgaggaggtggatggaatccagcagcttgctcatcggcttggcggtgggggtctgagtttgcttggtcatggtgttgctcctttcagtggtgagtgcggagtaggtcgaaggtggcggcgaacacgtcgtcccccatctggcgggcggtcaggtggccgtagtgcaggcccagctcgcgggtgatccagtgaacctgctcggggcgctccaggctgatcatcgtcagcagcaatgcgcggcgcggcaggtcgaggttgtggaggcttttcagcagcgcgggcagggcgcccagctgggcgtcagcccaggtattaatgccgtcctgggcaaatgggaacgcttcgccgccgattagctcggcacccttcttccaggcggcaaagtaggggtcagtgccgatcggcagcagcgggcccatggcttttgctgctgtggcgagttgttcgccggtgatcattggtatcaggcgttggctattcatcgttgcggtactcctctctgagttggttcaggcggcggcgcatgtcttcgcggtattggtcagggaaagtcgggtcagcgagccattcgcgaatctgccgaggcgtccagcggctcagcatgtcgagcgccaggcagtcccgtagcagggcttcgtcggaagaaacggcgatggtggtcatggcgcgtttgctccactcgaacgcgtcatgggttgccaccccccggaacatccggaacaggcatcaggaagaaggggctgtaagccagacaggacgcgggctgcagggtggtttcttttgttccgccgctgccggaacatgccggaacaggtttttacggcgaatcgctggaggccgcgcgggacacgggctacagcctgttccgatgaaaagggcttgccggaacatttccggaacatgccagaacaggttgttccggcgtgttccaccgtgttccggtacttccggaacagttttctctggttaactacttgttctataagagtttttatttcaataatttcattgttccggatgttccggactggcttgggccatacgcaccgggagccaataccccctatacgtgcacacacgcccgccagacgcatacgactcagcatgcccagttcccccgagcaaacacccagcattggagggatcgcttctcgatcaccgagcgcaccttacggttctccagaaagcggtaggtggtactgagcggcagggcgcgcatcagctgtacggcaggtatcacctcttgtccggccagccggcatgcgttgtgaaagtgttcgatgttgacggcaatcagccctttgtcgccgctgtggttcagcgtctcctgggtgatctctttgggggcctcgcctgactcctgcaccgtcaccacgcgctcgttcaggtagtggaagatctgccagaagcgcgaggcgatggtgtcctctttgctcacccgctgttgacgatctacagcccgggcctcgatgtgcttgagcagctggtccagggtgcggtcgctccagtcggggaagaacgcctgggtggcgtgggcggcggccatcagttgggcatggcagagcacgatgcgctggtggcggatggcgctgttctcctgcaggcgcttctcgtagacggggaaggcttcaaagtagcgttgcagccaggctgcttcgttctccaggcagtggcgcaggtagccggccagctcttcgtcgggcatgtccttcagctttagcgagagggccttcagctcgaaggtgtggtgcgccttggtggcgtgcatgtgcacgatccgcgtcattatcgactcgtcgccctcaacgctggcgttctggctgatgcacagcgccccgcggaagatcaggctgtcggtgtcattgctcgaggacttcacacccaccgtgcgcagcgtggcgttgtggtcgaatagcggcttcaccttctcccagttgtactgggtcaccaccactcgaccttgagcgtcgaccgacttcgtgtccgactcgatcagcaccaccggcaagttgctcacctgggagaaggcgcgaatcaggccgacgctggtcgagccttcgctgttgggcttcacgccttcttggttgggcctgcccagcaagcgccacaggaagcgcaacaggaatgacttaccggcaccggcctcgccggtcagctcgaagaacatccagctggcctggcgctggcgaatctgctgagcgaaaagagtcccggtccaccacgtcaatgaggccagcccattcaagtgggtcactgccagaaagtcagtgaaccagtccggcttgaagtcctgcccatgcaccacgcgataactattcagcgaggttttcaggccaccgcggccgacgtccaggaagccatgcttgttggctaggtactcccggcctttctgatagccgaactgctggaacacgtagatgcctgtctcttcgtcatagccgacgaaggggagtgtgcgcaccgtcatggcgttatccagccagcggctacgcagcatggccagtacgcgctcgccgccctggaagtcaccgcccggtgtgcgctcgagcattgccttggcgaagctgcggggctcgcctactgcgctgggggccagcggcaccttgcagtcctgctgggcattggggaaccgaaactggaagaagtactgctgatcgccggtgatggcgtcgcgctggatgtactcgaactccggcacgcagttggcaacctggccgacggagcagtgcttggcgaagtcggtgtagtgcccatccacttcgtcgccttccaggtccttttgcagctcggccacgttgatgcgcgccgagtacagacggttctcgtaatcgagcaggaagaagctgcgcttgcccttcatgtagagcaggtatgcaaccttcatcggtgacttggcgctgaacagccggccgcggtagcaggcctcctcgaggaaagcatcgtccaaatcgccgtcgcggtagacatcatcccagtcgcgctcgccggccagggcgacccagcccagctcattcagctcgcgcaactgcttccagtacttggggatgtacttgcgcccagctgggtcatcgtccaagccaatgcaccaggtgacgctcttgccgcggttctcctcgacgatgtcccaggggaagttgacgcagctgatggaggcgatcgccttgtagccggccaggtgcagtgcgatagcgtggaagatgccctcgacgatgtagacccggtcgcccttgttgatgacctggctcggcggtacccagccccggcccttgtagttcatgccgtacttgatgccggccttgtcgccttcgttacgcgccacggcggtggcatcgatgatccgctcccagtagccgtcgcacagcgggaaacgcaccgtgtccgcccagctctcgtctttgagcttgcgccttgcctggatgtaccagcctttgagcttgctagtgtcgaagccccggttgcgctgcaggtaggcatcggcggtggcgttggggttggcctctgtcttcggaaagcgctcgctcaggttttcgaacaggtgggcgtagcgttcgcgggtcttctgctcgaactggcattcgttgtcgcggttgcacttgagctggaacggcttcttgcggctgatgaacagcttgcgcttgccgcagcttgggcacaggcccttctgcaagtaggtgtcggtgatggactcaaagtccagctcccggtcgttctccagggcgtgaaccacatcccggtgataaatctcctcaaacttcatggcagggccccttagcgttgagctgagcggccagaaccgttcgcttggcgcatacgttcggcctggtcagccgcttccatggccatgtgaaccatgttgatcagcacggatgatttggagccctcgaccttcgggcggatgacgtagtgcccctgctcgatctcccggcgaatggagcgatcagacagcccggagcggcgagcgaactcctgaactgttaggtaaggcgtgtcgatggtgatctgcattctggtaacctctctagtgatattgccaagcaaagttccaaccttggaaccaatagtggttccaaggttggaacctgtcaagaggattgcagagtggatttgcccgagaagttgaaagcgatacgtgccaaggaaggtttgacgcagggtgagttttgccagcttgtcgatatcagcctgagcagctggaagaaatacgaggcatcaatcactgaaatggggcttctcccatttctaaagatcgtgaatcacgtgcggttcaagaagtacacgctttggttggcgaccggagatacggcaccagagtgcgggcagttcagcccaatctaagccgtgtctatcaagaagctggacaccggcgaatggcttgtcgactgccgcccagaggggcgcgccggcccgcggatccgccggcgggtcaaatcgaagaacgaggccatgcacctggaacgccgcatcatgggcgacggctccaagggagaattcgagaaggcccccaagctcgatgaacgtcggctgagcaagctgatcgacctctggtacacgctccacggccagaacctgaaaactggcgagcagcgcctggccctgctgctggcgatggccgagcgcatgggcgacccgaaggcgcacaagttcaccgccaaccactttgccacctaccgcgccgagcgtgccgcgggcaagcacaccagggcaaagccggggcgtgggctgagcaaggccgacgagaagcccaaaccgatcagcgccaacatgctgaaccacgaacttgcctaccttagcgccgtgttcaacgagctcgagcgcctgggcgagtggaaaggggagaaccccctggcgaaagtccgaaagctcaagttcgatgaggctgagatggcatatctgagcgccgagcagatccccgagctgctggccggcctgggggacgatacggcacacgtacgcctgatcgctgaggtgtgtctggccaccggcgcccgctggggtgaggccgaaagcctgcagccccgccaggtgcgccacgggctgatccactacagcaagacgaagtccagcaagaaccgctcggtacccatcgacgaccagctgcagaagcgcttggcgaaagccctgccgttcaagcccagctattcgaaattccgagatgtggtggacgagatcggccttgagctgccagacggccagctgacccacgtgctgcgccacaccttcgccagccactacatgatgaacggcggcgacatcctgaccctacagcgcgtcctgggccacgccaccctggccatgacgcagaaatacgcccacttcagcccggggcatttggctgatgtggtgaggctgaaccccttagccagacggagctaaacgtgagcgatcttctgaaattattatcaatagaggctgctgagcttaatacacgatttgaaaaagcctctctggaaggtcgcggaactcctcaagagatatctgatcgcagggaagcggttttcaaagctctaattgcgaagtatttccctttcccttttcgcgtcaccaaaggaaatatcatcgatagtttcgggcatcgtagcgcttcaatcgattgtttagtgctgaatccagatcacccacacactgtcagtgccgataatcagttttcggtaatactcgctgatggggttgactttgcgatagagcttaaaccggatctctccagcgtaagcgagattgagcggggcctgaaacagatctggactgttaagaacttgaggcgtgctcgctatggttctcttcgcagcgatccgttatcactcacaattccagggatactattctctaacacttcttacgcagacccctatctgcttgtgaagacgatagttgactactacgaacgcgagtcggttaaaagggcagagcagttcgacatcttggtagtgaataatagattcttgctcctcaatgccagagccaaaagctatatgacgcctattggcggagatattccacccggattgcaccttctggcgactgagaaaaataccttggcatgtttgctgatgtatatgaacacactccctctctcatcgcttcgtatcagcaactctgtcctcgctgcatatctcaaaccagagctgttcaatgggctctctacctatccaacgttaaatgatcggttgaatgccattgagggcgatgggtgacgatggcctaccttagcgccgagcagatccccgaactgctggccggtctgggcggcgatggcgtgtacgtgcatctgattgcagaggttttcctggccaccggtgcccgctggggtaaagctgaaggcctccagccccgccaggtgcgccaagggctgatttactacagtaagacgaaatccagcaagaatcgctctgtgccgatcggtgacgagcttcagaaacggttgaccgctgccttacttttaaacgcagctattccaagttcagagatgcgatcgaggcgatcggcctcgagctgcccgacggccagctgacgaaggtgctgcgccacaccttcgccagacgctacatgatgaccggcggcgacatcctgaccctacagcgcgtcctgagccacgccaagctggccatgacgcagaaatacggccacttcagcccaggacacctggccgatgtggtgaggctgaatcctttggcaacttggggaagcgcaagtgaaaattaacagtgtcgacatggaccagttcttgggtggggcgttttcccgaccgctgagggaggttcgcttgacccagagaacctccgagcagccccgtgttttctttggccctggttccatagacctgagtaacggagagatcaaggtctcgatctatcacgagtacgtcggcgatgagaaaaatcagtctttgagatccaatttttcaacgaaggcaggcgagattatccgcgacgatagctattactcgatggtcgcgaccgatatcaacggcggggaatggagctgcgagagcctttctctaggtggcgaattcggcgtgcactctgcgtttatcgtgacgtcatccaattcagcagtgacggtgggcgctactacaaagacatctgccgagcagctcacttactggatgcgaggagaacagccggttccgctcggaatgccggatcacagggtcacgatcccctatgctggaggagaggtgatgctacgaaatgagaatggcaacagtgcgttaattctctctgggggcgcagctacgcctgagcgcggggacggcctgatccaggcgctggaaatcatgtccggcagaatgatccaagtcgttgcgattcatcggagcggagggcaggggtcagttctggagctgtatccatacgacagtgagcttcagaacacagcgatgcctacaccgatccatataaacaggcctggcggtgctgcagcttttcaaagctatctgttatccgtcagcagttttttggccgaagaacagtgggtggctggctactggcacaaggtgaatcgtgtctggcaagcgggtcttatcaacgctggcctatcgattaccgtctcgatagaagggcttctgaaggccctttatgtttctaacggagttgatgaagaattcgctggtatggcgtctgcagctgtccctctcgttcaagatcttgatctcgaggaacgagttaagaatcgtttgatcactagcctgagaaccgcgggggggttcagcgcgaaggctgcgttgaagtcactcatcaaaaacccattcttccacagttcagctgaagctgattggtctgctctgaggaacgcagcggcgcacgctgatagaactgacagcgatcctcgtgcgcagcagaagctcgtaagcagaacgtttgcgaatctgcgccttttctacgatctcatagcttggcgagcgggctacagaggaaggagggtcgattactcgaccctcggattccctgtattggaggtctttgagcctgctgacgagagccattaccactgaccatcgtggacgtattgtggacattgcgtcgtggtgaaacttaatccggccgatggccagatatgcgaaagccgcgcagtgcgcggctttcaaggtggtgggcccacacggactcgaaccgtggaccaaaggattatgagtcctctgctctaaccaactgagctataggccctcagaggcggggcggattataccggtggtgttgccggtgcgccaagcgaagctggccgtagatcgttgttttgactggcctgaatgcaaaacccccggcgcggaccgggggttctggttttactcgtcgaggaaggagcgcaggtgctcgcttctcgtcgggtggcgcagcttgcgcagcgccttggcttcgatctgacggatccgctcgcgggtgacatcgaactgtttgccgacttcctcgagggtgtggtcggtgttcatgtcgatgccgaagcgcatgcgcagtaccttggcttcccgggcggtgaggccggagaggacttcgcgggtggcttccttgaggctctccacggtcgccacgtcgatcggcgattgcatggcggagtcttcgatgaagtcgcccaggtgcgagtcttcgtcatcaccgatcggggtttccatggagatcggctctttggcgatcttcagtaccttgcggatcttgtcctcgggcatttccatgcgctcgccaagctcttcaggcgtgggctcgcgacccatttcctgcagcatctgacgggagatgcggttgagcttgttgatcgtctcgatcatgtgcaccgggatacggatggtccgcgcctggtcggcaatggaacgagtgatcgcctggcgaatccaccaggtggcgtaggtcgagaacttgtagccgcgacggtattcgaacttgtccaccgctttcatcaggccgatgttgccttcctgaatcaggtcgaggaactgcagtccgcggttggtgtacttcttggcgatggagatcaccaggcgcaggttggcctcgaccatctctttcttcgcgcggcgagccttggcttcaccgatggacatgcgacggttgatgtccttgatgtcggcaatcgccagtgcgcactcttcttccagcgcgagcagcttttcctggcagcgctgaatatcgtccttgcgtgccgcaatggcttcggcgtacttgctcttgccgctggcgagctgatcggcccagctcagttccgtttcgttgttcgggaactggcgcaggaagtcggcacgcggcatccgcgcatcgcgtacgcagatctgcatgatggcgcgttcctgggcgcgaacctggctcaaggcgtcgcgtacacgctcgaccagcgcatcgtattgcttggggatgagcttgatcggcatgaacagtgtagccagctcctggagcgcgtcggtcgcctcctggctgccgcggccatgctttttcagagccttcttggccgcttcgagctgttctgctacggcaccgaagcgaacacgagcgacttccgggtccgggccgccatcgccttcctcttcttcgctatcggtgtcgtcttcttcctcgtcgtccttgtcgtcggcagccggcttcgccgtggtctgcggtgtgacgggctcgacttcttcctgcgggccggcggcgccgtcatcgtcagggtcgatatagccgctgaggatatccgacaggcggccaccttcgttggtgacgcgttcgtagtcggcgagaatgctgtcgacagtgccagggaagtgcgcgatggcgctcatcacctcgcgaatgccttcctcgatgcgtttggcgatttcgatttcgccttcgcgggtcagcagttcgacggtgcccatttcgcgcatgtacatgcgcaccgggtcggtggtgcggccaatgtcggtctcgacagcggccagggccgcagcggcttcttccgcggcggcttcatcggtatcggcttcggccagcaacagggcatcggcatccggggcaacctcgaatacattgatacccatgtcgttgatcatgcgaatgatgtcttccacctgttccggatcggaaatatcctccggtaggtggtcattgacctcggcgtaagtcaggtaaccctgctcacgaccacgctggatcaattctttgagacgagactgctgttgcgcttttccggacatataaccctatccactgacggttctggcgggctgaaaacaagctgagcattatagccgagcagggacctcacgcgccagttgaggtcgatttagggcacttctaaaaactatctccgctagcaatactgcgttaaaaaccaggctcgggctgctcatttagaccactaaactccgcgtcctcgcctgttttttccttgtcttgcctgcctcgccttcgtttttagccgtgcccttatgcgggtgttgagttgcgatgtagcaggttgcgcagttgctctttctcctctgcgctgagttcaccctgacgagctttgcggagcagcgtttcgaggctgcgctcgcgttgcctggcggccaaagtggttatggtgtcgaaaaactgttgttcaaggttatcggccgagatcagccattctttctcggccagtgcgcgtaaaaggcgcccttggtcggttccgtgccagcgtgcgatcagttgcaggctgcgcagtttggggtttttctgcagcgtgccgagaagggcgacgagtaactgcgcataagtgtcgtcttcagcggcgaagtggctcgcatcttcgaccttctgagcgagctcaggatggtgcagcaaggtgcgtagcgtggtcagagccggcggctctaccgtggccggtgttctgggtgcgcgtgctttgaagtctggacgctggccgggctttttccagtcctttttccattctttcttgccgttgcgctttggttgggcgggctcgggcggtgcgtagtagtcgccttcgtcgtgtcccgggctggcgtcgtaatagaggctgtcatcatattccggagctgcgctcggcgcagcggtgctcatctgttgcagcgcctcgctgtgcagcccggtgatctcgccgaggcgttggcgcatcagggcgcgaaggttggtgccgggtatcttttcgataagcggtgctgccagggtggccaggtgggccttgccttcgagcgagcgcggatcggcttcttcgctgagttgctggaagaagtagtcggccagtggttgcgcctgttgctgtatgcgggccatgaaggcatcggtgccttcgcgacggaccagactatccggatcctcgccttccggcagaaataggaagcgtgcgcggcggccatcctgcaggttgggcagtgccgattccagcgctcgccatgccgccttgcggccggctgcatcgccatcgaagcagaacagcacgctgggcacgatgcggaacaggcgcttgaggtgctcgtcgctggtggctgtgccgagcgtggctaccgcgttgcgcaggccctgctgggccagtgcaatgacatccatgtagccctcgacgaccatgatctcatccaggtcgcggttggccttgcgtgcttcgtacagcccgtagagttcctggcctttatgaaagaccggcgtttccggcgagttcaggtatttcggcttgtcgtcgcccagcacgcggccgccaaaggcaatgacgcgtccgcggctgtcgcggatcgggaacatcacgcggtcgcgaaagcggtcgtagctccggccggtttcggcattttcgatcagcaggccggcatcgatcatcgccttctgctgcagggcatcgccacccaggtgtttcagcaggttatcccagccgggtggcgcgaagccgaggccgaagtcccgggcgataacaccggacaggccgcgccccttgaggtattccacggcggccttgcgtgccgggtgccccttgagagcctgccggtagtattcggcggcagactcgagcagcgggtagagcggcgagtccacgggctggcgaggcttgcgccccggtccgctttcttcacgcggtacttccatgccgacgcgtttggccagttcctcgacggcctggggaaactccaggctgtcgtggtccatgatgaagccgagcgcgttgccgcccgcgccgcagccgaagcagtagtagaactgcttgtcggggctgacactgaacgacggggtcttttctttgtgaaacgggcagcacgccgtgtagttcttgcccgctttcttcagctggatgcgcgaactcaccacctcgacgatgtcggagcggttgagcaggtcatcgatgaatgattgcgggatcaagccggccataggggtatgagaatacgctcgcggtgttcgggccggaatgaaaaaaactccggccattcgcctgttggcgaagcggagttcctttcaaatgtaaagcccggctttggccgggcttgatgcagcttcagctgtactgaattagtacaggcgaacgctgcggcgctgttcgcgctgcactttcttggcgtgacgcttgactgcggcagcagctttacgcttgcgctcagcagtgggcttctcgtagaactcacggctgcggacttcagccagaacaccggctttttcgcaagaacgcttgaagcgacgcagagctacgtcgaatggttcgttctctttaactttaacgttgggcatccaggacgtaccttcacttgtttaccggttacaacgcgcttcggcaaatatcgcgagcacgctggttttaagggttgcggatgttaacgccttgccacgtggaatgcaaagccctctgatcgaaaagcgctggtcggtcgtcggccgtggcgattaatatgcgcggcttcattcgcttctctggaaggtcgaacccatgctggtgctggggctggaaacttcatgcgacgaaaccggtgtcgcgctgtacgacagcgagcatggcctgctggccgatgccctgttcagtcagatcgatctgcaccgggtctatggcggggtggtcccggagttggcctcgcgtgatcacgtcaaacgcatgctccccctgattcgccaggtgctcgccgaaggcgggcgcgaggcgagccagatcgatgcggtagcttacacagcggggcccgggctcgtcggcgccctgttggttggcgcgtcctgcgcgcaggcgatggcattcgcctggggcgtgccggcggtcggtgtacatcatatggaaggccatctgctggcaccgatgctcgaagagcagccgccggcgtttccgttcgtcgcgttgctggtatccggtggacacactcaactggttcgagtcgacggcattggccgctacgagctgctgggcgagtcggtggacgatgccgccggcgaggcgttcgacaagacggcgaagctgatgggcctgcgttatcccggaggcccggagatcgccctgcttgccgagcgcggcacgccgggtcgtttcgttttcccgcgccccatgaccgaccggccagggctggatttcagtttcagcggcctcaagacctcgaccctcacgacctggcagcaatgccgtaacgctggcgacgacggcgaacagacgcgttgcgatatcgcgttggccttccagcaggcggtcgtcgaaacgctgaccataaaatgccgacgtgctctgcagcagacgggcctgaacaacctggtaatagctggcggcgtgagcgccaatcaggcgctgcgccagagtctcgaacgaatgcttggcgagctgaacgggcaggtgttctacgcgcgaccgcgtttctgcaccgacaacggtgcgatgatcgcctacgccggttgtcaacgtttactggctggccagcaagacgggccgcagatatcggttcaagcacgctggccgatggaaacgctggcggccatatgaggctcggggccaggttagaagtgccgctcggtgcctgcgagcaggtcgcgcaggttgtttcggtggcgccagacgatcaggcacgccagcaatgccatgggccagagggcggcggattgctgccaggccagaaagggcaggcagagcggcagtgcgacaagagcggcgatagagctggtgcgggtcagtttgaatacggcgagccagatcaccagcgccagtaatgccgtcggcggatgcaagccgagcagggcgccggctgccgtggcgacacccttgccgccgcgaaagcgaaaatacagtggatacaggtggcccagaacggctgccagggcgatccaggcttgttgctcgacgggcaaacccagcgcggcggcgagcaggacaggcagcagccctttgagcagatcgccgaacaaggtgctgatcgccaggcgcttgccggccagccgcagcatgttggtggcgccgggattgcccgagccacccgctcgaggatcgggtacgcccgccaagcgactgagtagaatggcgaacgacagagagccggtcagataggcgagcagagtcagttgccagaacatggcatccatccggggcagggagctcctgagtctaacggcgcgcgatgacgttgtcgtgccgtgggagagagttgcgtggatacagttttcatcgaagggctggaagtggatacgctgatcggcgcctatgactgggagcgcggcattcggcagtgcctgcgcctggatttgaccctcggctgggacattcgtccggccgcggaaaacgacgagctggacaaggcgctggactacgctgaagtgaccgccgccatcgaccggttcgcgcaggcttcgcgcttcgagctggtggaaacctttgccgagcggttggcggctggcctcatgagccagttcggcatcccctggctgcggctgcgggtcaccaagccgggcgtcaatgcgcgcgcctcggcgctgggtgtggagatcgaacgcggatgtcgataacgcgcgtattgcttgggctcggcagcaacagccggcgtgaacagaatctgactgcggggctcgatgcgctggaactgctgctcggccagatgcgctgttcgcccgtgttcgaaagcctcgcggtgggctacaaaggcgacaatttctacaacctggtggtttccggcactacggagctgtcgctgacggcgctggatcgcaaactcaagttcatcgaggcggacaacggccgttacgcgccggatcgcaagggcctgccgctggatatcgatgtgctgatgtacgacgatctggtcggcagcttccatggcctggagctgccacgtccggagacgctgaaaaacgccttcgtgctttggccgctggctctgctcgcgccggacgtagtgcatcccggcatcggccgtcgcttcgccgagttgtggcacgagtcgactatcgaacagcagctctggccggtgcccttccagtggaagggcgtgcaactgacgccggccgcgctgctggcgtcggcgtccagttcccggacctgatggcgcctgccgagcgctagccgtggcgcggcaggtcgccgccgcgtcaggacgtggcgtggtcggattcgctggcgccgccctgctgccgacgctgataggcctgcacggcaagcaggcgttcgcgtttgagcgcctcgcctaactcggccgcctggtaaccttgctcgatcagcggtttgacctgcacgccgcgggcggcctcggcagcgccacgcaggtaatcggccgggcggtattcagcgggttcgggtaatgcgagggcccgcgcatccatctcgcaggcggcgaggaactgctcgaagcgctccgggcgacggtagatgtcgaagtgctgaagcatgtcgaacagcgccgtcgcggacagctccggcgcccgatgagcgcaggcgcaaaattccccgaccagcatggccaggtcctggcaatcgcgtggaaccttgtagcgagcgctgacggccgcgatcagcgtaaggtccgtcttgcccgcggctcgatcagcgccttccgtcgtctcgctcagaggtagcagcaggcaggcccaacgcaccgccagcggttgctggtgaatagcgctctggcgcagcacctcgagcagatgtgcgccgctcgcttcgggcgtactcgggctcggatgctgcgcatcgaacagccggtcgatctccggaaacagctccctcagcgcgccgcaatcgcgcaacacctgtacgaacacgtcgggacggtgctccatcagggcccgcgaaatttccttccagctgcgttccggggtcagggcctgcagttcgcccgactcggcgaggtggcgcatcaatgtctgggtatcgggcacgacgcgaaagccgagatcggcatagcgcgcagcgaagcgcgccacgcgcaacacccggagcgggtcttcggcaaaggcgggcgacacgtgcctgagctggcgagcggcaagatcggcctggcccccgtagggatcgatcagctgaccctgttcgtcctcggccatggcgttgatggtcaggtcgcggcggatcaggtcttcttccagggtgacgtccgggctggcgtagaaggtgaagccgccatagccccggccactcttgtgctcggtgcgggccagtgcgtattcctcacccgttgcgggatgcaggaacaccgggaagtccgccccgaccggccgaaagcctttggcctgcatttcctcggcgctggagcccaccaccacccagtccacctcggtcacgggtctccccagcaaccggtcacgtaccgctccgccgactttgtatatctgcatgtaggcctccgttgcggcggaggataaacgaaagcctcgctgcggcaagccgcgaggctcatgagaggggcgcgccgagccgatcagatcggcggcagcgccaggttcatgccagggaatttgctttcggcatccgattcgacccggggcggcatatggtgggtcgtgaccagcttgtcgtcctgcatcgattgcagatgcacgtcgaacccccacagccggtgcaaatgcttgaggacctcgtcggtggactcgccaaggggtttgcggtcgtgctgctggtggcgcagggtcagcgagcggtcgccgcggcgatcgacactccagacctgcacgttgggttcgcgattgccgaggttgtactgcgccgccaacagctcgcgaatggtgcgatagccactctcgtcatgaatagccggcaccagcagttcatccttgcggtcgtcgtcgagaatgctgaacagcttgagatcacggatcactttcggcgagaggaactgcaggatgaagctctcgtccttgaagttgttcatggcgaatttgacggtggtcagccagtcgctgccagcaatgtcggggaaccagcgcttgtcttcctcggtggggtgttcgcagatgcggcggatgtcctgatacatggcgaacccgagggtgtaggggttgatgccgctgtagtagggactgtcgaagccgggctggtagatgacgctggtgtgcgactggaggaattccatcatgaagccgtcggtcaccaggccttcgtcgtacaggtcgttgagcagcgtgtagtgccagaatgtcgcccaaccctcgttcatcacctgcgtttgacgttgagggtagaagtactgcgcgatcttgcggacgatgcgcaccacttcacgctgccagggctccagcagcggcgcgtgcttctcgatgaaatagaggatgttttcctgcggttcggcggggaagcgctggtctcgctgacgttcatcctccttctcgccgaacttgggaatggtccgccagaggtcgttgatctgccgctgcagatgctcttcccggtccttctggcgccggcgctcttcctcggccgaaatggggtagggtcgcttgtagcggtcgaccccgtagttcatcagcgcgtggcacgagtcgagcaggtcctccaccgcgtcgatgccgtgacgctcctcgcactgcatgatgtactgcttggcgaataccaggtagtcgatgatcgagctggcgtcggtccaggtgcggaacaggtagttgcccttgaagaagctattgtgtccgtagctggcatgggcgatcaccagcgcctgcatggtgatggtgttttcttccatgagataggcgatacagggatcggagttgatcacgatctcgtaggccaggcccatttgcccgcgggtgtaggatttttccgtgctgaggaaatgcttgccgtaggaccagtggtggtagcccagcggcatgcctaccgaggcataggcgtccatcatctgttcggcggtgatgacctcgatctggttgggatatgtatccagcgcatagcgttcggcaatgcgaccgatctcgcggtcgtaggcgcggatcagctcgaaggtccattccgagccggtggaaatgggctgtcgtttcatgctgcgtacctcagctagccatgcgccgctggaagagttcgcggaacaccggatagatgtcccccgcggtcaccagctgttgctgggcgaacgagtcaccgaaggcttcggccacctggttgtattcgtaccacagcgcctggtgttcgcgaggggtgatttcaacgtaggtgaaatactggacgaacggcatgatctggttgatcaggatatcccggcagatcggcgagtcatcgttccagttgtcgccgtccgaagcctgcgccgcgtagatgttccattcattgaccgggtaacgctcggccatgatctcctgcatcattttcagcgcgctggagacgatcgtgccgccggtttccctcgagtagaagaactcctcttcatcgacttccttggcgctggtgtggtgacggataaacaccacgtcgatcttgtcgtagttccgcttgaggaacaggtagagcaggatgaagaaacgcttggcgatgtccttggtggcctgggtcatggagccggacacgtccatcaggcagaacatcacggccttggagctggggttggggtgcttgaccagcaggttgtacttgaggtcgaaggtgtcgagaaaagggacgcggtgaatgcgtgcgctgagccgctcgatttcctcttcggccgcctggatatcggtgaagttggcgggctcctcgagcttgagccgtgccagttctgccttcacctcgcgcagcttggcgcggctgctgcctgacagtgcgatgcggcgtgcgtgggccgagcgcagcgtacggacgatgttgatgcgcgacgggttgccttcgttgctgatgccggcgcggacggtcttgaaggtatcggtgccggtcagatgacgtttgaccaggttgggcagctccaggtcctcgaacatgaagtcgagaaattcctcctgggtgatctggaagacgaagtcgtccatgccttcaccgctattgctggccttgccggatccctggcctccgccaccgccctgcggccgaggaatacgctcaccggcgacgaactccttgttgcccgggtggacgattgtttgcctaccgccgcgcccgtggtgcaggatcggctcatcgatatcgcggccaggaatgctgatctgctcgccgtgctccatgtcggtgatggagcggcggccaacggcttcctccacagccttcttgatgtgtcctcggtagcgttgcaggaatcgctggcgattcactgtgctcttgttcttgccgttcagacggcggtcgatcacgtaactcataaatgccctccgggcgctacaggctacaggccacaggcggcaggtaactgctccgcttgcgcctgcagcctggggcctgcagcctagggccgcgttactgcgacttacgtacccgcagataccattccgagagcaggcgtacctgcttctcggtgtagccgcgctcgaccatgcgcacgacgaaatcgttgtgcttcttctgatcctccttgctggccttggcgttgaagctgatgaccggcagcagatcctcggtgttggagaacatcttcttctcgatcaccacgcgcagcttctcgtagctgagccaggacggattcttgccattgttgttggcgcgggcgcgcagcacgaagttgacgatctcgttgcggaaatccttcgggttgctgatgccggccggcttctcgatcttttccagctcttcgttgagcgccgcgcggttgaggatctcgccggtttccgggtcgcggtactcctgatcctgaatccagaaatccgcatagagtacatagcggtcgaagatgttctggccgtactcgctgtaggactcgaggtaggcggtctggatttccttgccgatgaagtcgacgtagcgcggcgccaggtattccttgatgaagcgcaggtagcgctcgcgcacctcggcggggaattgttcttgctcgatctgctgttccagcacgtagagcaggtgcaccgggttggccgcgatctcgtgggggtcgaagttgaacaccttggacaggatcttgaaggcgaagcgggtcgatagcccgttcatgccttcgtcgacgccggccgtgtcgcgatattcctggatagacttggctttggggtcggtgtccttgagattctcgccgtcatagacgcgcatcttcgagtagatgttggagttctccggctctttcagccggctcagcaccgagaattgcgccagcatcttcagcgtgtcgggcgcgcagtgcgctttggacagcgagctgttgaacagcagcttgtcgtagatcttgatctcatcggtaacgcgcaggcagtacggcaccttgacgatatagatgcggtcgatgaaggcttcgttgttcttgttgttgcggaaggtgtgccattccgattcgttggagtgagccagcaggatgccgttgtaggggatcgcgccaaggccttcggtgctgttgtagttgccttcctgggtggcggtcagcagcggatgcagcaccttgatgggtgccttgaacatctcgacgaactccatcatgccctggttggcgcggcacagcgcacccgagtagctgtaggcgtcggcgtcgttctgcgggaattcctcgagcttgcgaatatcgaccttgcccaccagcgccgagatgtcctggttgttctcgtcgcctggctcggtcttggcgatcgcgatctggttgaggatcgaggggtacagcttgaccacccggaactggctgatatcgccgccgaattcctgcaggcgcttggtggcccagggcgacatgatcgaattcagatagcggcgcggaatgccgtaatcctcttcgaggatctgcgcgtcctcggccggattgaacaggcccagcggcgactcgaaaacgggcgagcccttgatcgcatagaagggcactttctccatgagttgcttaagtttttcagccagggatgacttaccgccgcccaccgggccgaggaggtagaggatctgcttcttctcttccaggccctgcgctgcatggcggaagtaggacacgatctggtcgatgcagtcctccattccatggaagtcttcgaaggcgggatagcgacggatcaccttgttggagaagatccgcgacagccgtggatcggtcgaggtgtcgatcagttcgggctcaccgatcgccatcaacaggcgctcggcggcagtggcgtaggtgccccggtcttccttgcacaggtcgaggtactcctgaagcgagtactcctcctgacgggttgcttcgaatcgttgctggaaatggctgaaaatgctcatgacttcacctcggacaatgctcggagccggtgttgtcatcaggcattcaggtgcggccgacttgtcggccctggagtccccccgaacacctaatggtcgaaaacctgaggcccggtagccgctacacggctttcatttgtttggatggcctgaactgaaggatagttcggattcagcaaattcaagggagcagagccgcttttaccgctgcgtttcgtcggatcgcaggcgcaaggccgcgccattcgcggccttcgaggttagatattttttacgtgggatcgccttgctcgacgtcctggggaaaggtctggcgccacagctcgaagccgccgtcgaggctgtagacgtcggagaagccctggttgatcaggtaagccgcggcgctctggctggaatgcccgtgatagcaggtgacgacgagcggatgatcaaggtcggctgcggcaataaaatccggcagcgagtgattgtccagatgtgtcgaacccgcgatgtggccactggcgtagctctgcgcatcgcgaatatcgacgaagacgccacccgaattgcgcaatgcctgggcctgctcgggggaaatgcgtttgaagtcagtcatggggtgcctcgcagtcgcagcggtgcatctctccgctgtcgagattcatcagggtcatggtattgccccacacgcaaccggtatccagtgcgtacacgttgggctcgtcgcaatggccttccagcgcagcccagtggccgaagatgatcttgcagccgcgggtcttgcgattgggatggctgaaccagggcgcgaagcccggtggtgccgaatcgagcccttccttggcctgcaggtcgagcgtgccgtctgccttgcagaagcgcatgcgggtgagatagttggtgatcaggcgcaggcgtggcacgccgtgcaattccttgtcccatttggcgggttggttgccgtacatgccgtcgagaaagggcgtcagcatggcgtcatcgctcagcgcctgctcgacttcggcggcgcgccgcagcgccttggccactgtccactgcggcgggataccggcatggaccatggtcgtctctcgttcgctgtcgtgatggatcagcttctgcagccgcagccagtcgatcagctcggcccgatcgggcgcgtcgaggatgggctgaagcgtgtcggatttcttcaggcgctcgatattgtgtgcaacggccagcaggtgcaggtcgtggttgcccagtacggtgaccgccgagctgcccaggtcacgcacgtagcgcagcgcctcgagcgattgtgggccgcggttgaccaggtctccggcaagccacaggcagtcgcgggagggactgaagtcgacttgctgcagcaagcactggagaggttcgaggcaaccttgcaggtcgccgacggcataggtagtcaatgcagcgctccgggtacggccagtcggaagggcgcgatgatggcgtcgaaacggtgtccgtcctcggcaagcatctggtagctgccctgcatggtcccaacgcgggaggccatcagcgtgccgctggtatagacgtggcgttggcccggcgcgatcaccggttgctcgccgaccacgccggcaccgcgaacttcctgcacctgaccgtcaccatcggtaatgagccagtggcgggacaacagctgggcggtgagttggccattgttttcaatggttactctgtaggcaaaggcataacgattttgttccggttgcgactggtcggccaggtaggtcgggctgacactgacgtcgatccggtagcgcaggtcttcgggcatggggactcctgctggtcgcccgcgctcagccacgggcgcagctgcgggcggaaagttggtctgacaatcttacgaacgcggccaggtccagctgttccggacgcaggctgccatcgacctgtgccgcggcgatggcgtcggcatcgagcaggcccttgagcgtgttgcgcaacgtcttgcggcgctggttgaaggcctggcggactacggtttccagttggcgatgatcgcgcgccggatgcggcagcacctcatggggtaccagccgcacgatggccgactcgaccttgggcgctgggttgaaggcgcctgggccgacgttgaacaggtgttcgacgcgacagtggtactgcaccatgatcgacaaccggccccagtcgccgccgccgggctgcgcggcgagccgctcgaccacttccttctgcagcatgaaatgcatgtcgcggataagggtggcgtgctcgagcagatggaagatcagcggggtggagatgttgtacggcaggttgccaacgatgcgcaggctgcggggcgtttggctcagctgggcgaaatcgaacttcaacgcatcgccctggttgagcgcgaagttgtcccgctcggcgaatttctgctcaaggatggggatgaggtccagatcgagctcgactacgtcgaggtgcgcgccgctgtcgagcagcccttcggtgagcgcgccctgacccggcccgatctccaccatgcgctcgcccggtttggcatggatggcacgcaggatgcgatgaatcacgccggcatcgtggaggaagttctgaccgaaacgcttgcgcgcccggtgttggtactcggacatggagagctccagggagcagcttgaagcctgaagcttgaagctggaagcgaaaaaggagcgcattttaacaggctgggcgagaggaaagacgactacggcgctggagccggaaaagcgcgcgggccgaccgtgtcgttggcacgaacgccagtcgccaaactactccggctgctggcttccgacttgcggctatctagccatttggtacgccgtttccagcgctacctgcaggctgccggtgtcgactcggccggtgccggcgagatccaacgcagtgccgtgatcgacggaggtgcgcacgatcggcaagcccagggtcacgttcaccgccgcgccgaagcctttgtatttcagcacgggcagcccttggtcgtgatacatcgccagcaccgcgtcacagctatccaggtgcttgggggtgaatagcgtatcggctggcaacgggccgacgagatcgatcccttcgtgccgaagcgcctcgagtgccggctcgatgacctcgatttcctcgcggcccaggtgcccgccctcgccggcatgggggttcagcccgcagactaggatgcgcggccgggcaataccgaacttgctcaccagatcggcatgcaatatgcgcgtcacccgctgcagacgctcggcagtgatggccgcggccacgtccttgagcggaagatgggtggtcaccagggccactcgcagaccacgggtggcgagcatcatcaccacctgctcggtgccggtcagctcggcaaggaactcggtgtgtcctgagaaggggatgccggcctcgttgatcacgcccttgtgaacgggggcggtgatcatcccggcgaaactgccatccacgcagccgttgccggcgcgttgcagggtggtgaggacgtagggggcgtttgccgcggtgagttggccgctcatgacgggcgaggccagtggtgtgtcccagacatacaggctgccggcggccgctggctggtccggccaacggtcaggggtgacctcgatcagcgtgatgtccagccccaactcggctgcgcgggcgcgcatcagctcgatgctggcgatggcgatcagggcgtgaggctggctgtcgcgcgcgagcaacaggcagaggtcgggaccgatgccggcgggctcgccgggggtcagggcgaagcgtttggcggtcatgtcgatcagccttccggtcgataaaaaacgggccggccaaactggcaggcccgcgggtagcgtgcgcgattgcgtcggaatcagatcttgatctcgacgtaggcttcgtcgcgaatctggcgcagccaggtttgcagttcttcatcgtatttacggttgcgtagcagcgtttgcgcctgctgctcacgtacctcttcgctggcgtcagtggcgcggcggccgagcacctcgagaatgtgccagccatacggagtcttgaacacttccgacaactggccgttgggcgtgttggccatgacctcgcggaattccggtaccagtgagttcggatcgatccagttgaggtcgccgccattgagcgccgaacccgggtcttcggagaagttcttcgccagctcggcgaagctttcaccggcgaggatgcggtcgcgcaggcgctgtaccaggcgacggctttcttcgtcgctgcggatctggctcggcttgatcaggatgtggcgaacgtggacttcttcgcgtacctggttgtcgccgccgcgcttgtccagcaccttgagcaggatgaagcctggcggcgtacgaacgggctgggtgaagtccccgacgttcatggtgctgacttccgtgtcgaacggtgggggcagttgcgcggccttgcgccagcccatgtcgccgccttccagcgcgttttcgctggccgagcgcgataccgccagcttggcgaagtccgcaccgttctgtagctgctcgtaggtgtcgcgggcgatcttctcggccgcctggatggccgtcgagtcggccgattcgggcaccgggatcaggatgttggccaaccgatactcttcggaaagctgcatcttgccgaggtcggaggcgaggaaattctcgacttcctgcttcgatacctgaatgcgctcgccaatgcggcgctggcgcacgcggctgatgaccatctcccggcggatctgctcgcgcgcggtatccaggctcaggccgtcacgctcgagggcggcgcggaattgatcgaggctcatgttgttgcgctgggcaatggtggccatcgcctggttgagttcctcgtccgagatgcggatgcccgagcgctcgccgatctgcagttgcaggttctcggtgatcaggcgctccagaacctgctgctgcatcacgtcccgtggcggcatttcggcaccgcgcttttcgatggtctgttcgacctcgcgaagacgctggtccagctggctttgcatgatgacgtcgttgtcgacgatggcgacaatgcgatccaaaggccgcacctcggcggaggccgaggctaccagggtggcgttgcctaacaggagcgcgcccaccagtagcgggcgcaggtaatcagaaagcttgatcttcacgttcacggtagccttgtatgccttcgtcgaggaatgtctcggtggtgctgccgaacacgccgccgagtcccttgaggacgatttgcaggaagatgccgttgtccggctcgtcattctgcgatgggttgagactggtttcgtcgtagtcgatccagtagcgattgatcaggcgcagcttccagcagcagttgtcgtactcgaagccgccgaaggcttccagcgtacggttgcggctgtagtcgtgctgccagcgcgcaatcacgctccactgcggcagaatcggccagatggtggagatgtcgtgctggttgatcttgtagtagttcttgatgtactccggcgtacctggtgtgccgtagtccccgccgtaggtccatagaccggtagcctggtcgaatcgaacggtatcgttgcgatagcgatagccgacattgacgatcttgttcgggttgtcggccggctggtagtgccacatggcgctgccggagcgggtgctgtggctgtccgggtcccagttgaaggtggaggtaaagcgccagtcccggttgtagcggtacatgtactccagcgcgtagggcgataccgaagaggtcgcgttggcgcgcgtccggtagtcgatgccccgaagctggaccttgcggtcctcgaagtagaatgcctggccgatgctcagacgctggcgctcgaacccgttcggctcgatccagcgattggtcacgccgagcgatatctgattggcgtcaccaatgcggtccttgccggagaagcggttttcgcgccacagcgaggaatagccgaacgagctttcgccagtatcgaagattggaatatcgtcctgatcctcttctggcacgtagagatagaacagccgtggttcgagagtctggcgataatccttgccgaaccactgggtgtcacgatcgaaatacaggccactgtcgacgctgaagatcggcacgctgcggttttgcgattggtcgaacgactcataggcggccagcgtctgtcggccccgggcatcgaggtccagatcgtactgggtgtaggcgtacttgagcgacggcttgacgaagccccaggtccagtcgagcggcaggctgacgcccggctccagatgcaggcgctcgccttcggcacgggccaggcctctcaggcggtcgtcgtaccagcgatgctcgggcaggccggtgttgccatcttcatccgtgaagaatccgtcacgcaggctgcgctggaagttgacgaactcggtgttataagcaaaacgcaagccgcccggctggaaaggcaacgccccgtttagggtcaactgcggcaagcgctcgtagggcgtcacgtcagtgacggttgcgcgctcgtaggcttgcacgttcaaccgggcggtgtagctgtcgccgcgataggtcagggtgccgcgctggtcgaggtgatccggctggtcgatgcccagttgggtatccagatcctggaagtaataggggtcgctgatgtcggtgtagtcgacttcagccagccagcggctgtcgaggccggtacggtgctgccagctgtacatccagcgctggtcttcgtactcggactgcagcttgcgatcgtcgttgctgtcgtcgaggtaggcggcgccgaactgaccctcgctgctgcgcgtcaggtagcggaactcgccttccatcagcaggccgcggtcgctcatgtagttcgggtacagcgtggcgtcgaaattcggcgccaggttgaaatagtagggtgtgaccagcgatagcccggtatcgctcgacgagctgatgctgggggcgaggaagcctgactggcgacggtcgtcgatcgggaagtggatgtagggggtgtagaacaccggcacacccttgacccgcagcgtcacgttggtcgccgagccgaagccggtcgctgggttcagggtgacgttgttcccctgcaggtaccagtcgttgtcgcctggctcgcagcgggtgtaggtcccgtccttcaagcgaatgatggcgtcgtcggtgcgcttggcatagagcgcactgccacgaactttgccttcgtggaccacgtactcggcgttctcgacctgggcttcaccggtatcgaggaagagctcggcgcgatcgccgaccatcagcgcgccgcggtcccgcaggcgcacattgcccttcagttcgccacggttctccagctggtgcaggctggcctcgtcggcctcggcctggatactgccctggcgcagcaccacgtcaccggccagcgtcgcgacttcctgctgctgttcatagcgtgtggctttcgccgacacataggtcggcgcttcgctcattggcgtattgtcgaactgacccgggcggctcggctcgacataggtgccggcgcagtacgggccggtctcggccagctgagcattggtcagctgatcgcgcggcacccagtccagatggctatagtcggcgctacgcgatgccagcgcgcgccccctgctttcgttaaccagcttggtggtggcggttggcgccgccttggccttgctggtgcgtggctgggcagcgctgtcactggcagcgctaccgcggtgcacgggccggggcggtagctcggggctggcggcgtcggaggcacagctccaaccaccgccggcaccgggttggcaggcgaactgttcggctgcgatcgcaacgggcatcgcgacgggctgcaatgcgagcagaccgccggttaccagtagagggaattttttacgaaaagcgggatgtttgactgccatcttgttttttaggtccgtgcttgcggcgagccatcggccgggctgggccgcacgcctctcgatgggctgaaaaagatgctggataataaagcatgacccgtctatcggctagcgccgcggagagcactgatatgccgcaacacgatcaacgcctgcaggacctgagtgcctggttggcgcctcaattaagcgagctttttgcacgccgtggttggggcagcgtacctgatgcaccactggttccggccagcagcgacgccagtttccgccgctactttcgctgggaagcgcaggggcacagcttcattctgatggacgcgccgccgccgcaggagaactgccggccgttcgtcgcggtggcgtcgctgctggcaagcgccggcgtcaatgtgcccgagatcctcgctgaggacctggaccgcggctttttgctgctgaacgatcttgggcgtcagacctacctggatgtgatcgatgaaaccaacgccgatcgactgttcgccgatgccatccaggcgctactggcctttcagaggctgcctctgccggcatcgctaccgagctatgacgaggcactgttgcgtcgtgagctgcaactgttccccgagtggtatgtgcagcggcatctgggccatcaattcagcgcggccgaacttcaggtttgggaacgcacgtgccggctgttgatcgattcggctctggagcaaccgcgcgtgctggtgcaccgcgactacatgccgcgcaacctgatggtcagcgaacccaacccgggcgtactggacttccaggatgccgtcgtcggcccggtgacctacgacatcacctccttgttcaaggatgcctttctcagttggcccgaagcacgggtgcaaggttggctgcatggctattgggacgccgcgcgcgcggcggctatcccggtccacgaaagttttgacgaattccagcgcgccagcgacctgatgggccttcagcggcacctgaaagtcatcggcatctttgcgcgcatctgccatcgtgacggcaaaccccgctatctggccgatgtgccgcggttcttcacctacatcgaaacggtgacggcgcgccggcccgagctggccgagctgagtgctctgttgcaaagccttccgcgcgagcaggtgcagccatgaaagcgatgattctcgctgccggtaagggcgagcgcctgcgcccgctgaccctgcacacgcccaaaccgctggtgcaggtgggtggcgtgccattgatcgaatatcacgtgcgcgcgttggcgcgtgcgagcatcaccgaactggtggtcaatcatgcctggctcggtgagcagatcgaggcgtatctgggggcgggcgatcgtttcggcgtccatatcgactactcggccgagggcgagccgctcgagacggggggcgggatcttccgcgcgctgccactgttgggcgatcagcctttcatcgtggtcaacggcgatatctggaccgactacgacttcgcttcgctgaccctgccgccagcgtcgttggcgcacctggtcctggtgaacaatccgccccatcacccggcgggcgacttcgtgctggctgacggcaaggtcgtggaaggcagcgcagcggcgacctttacctacagcggcattgccgtactgcatccgcggctgttccagggttgccctgccggcgccttcaagctggcaccgctgttacgccaggccatggcggaaggggcggtgagcggcgagcacttccgcgggaactgggtcgatgtcggcacccacgagcggctggccgaggtcgagggcatcctggaggcgcgtcgctgaatgttctggcccataacgctattgggagcgctgatcggctggttgattgcgagcatccccggggcgctgctcggcgcgctgcttggtcagggccttgatcggcggctcgggctgacgtcctggaccaggctgcgcgagcgcatgagcggcgcaaaaccgtcgctacaaggcgatgagctgttgttcttcctccttggacggctggccaagagcagcggtcgtatcagcgaagcgcacatccaggccgcacgcagcgagatgcagcgccgccagctcgctccagctgcccagcgagcggccatcgatgccttctaccgcggcaagtccagtggagacggtctgcgtgatcctctccagcgcctgcgtgggcaccgtgacgaagccaaggcagtgcttcaggcctgctggcggatggcgcgcgcccaggggcaaatcgatgcgcgcgagcatgaattggtgatgctctggggtaagtggatgggctgggatgcggctgccatcgctgcgctggatccgcgcggcggacgccggcagggcgcgccgagcaacctgggtggggcttacgagcaggcgttacgcttgctcggggtgcgtgccgacagcgatccacaggcgatcaaacgggcctaccggcgcctactcagcaagcatcacccagacaaacaggccggggcgggtgcgaacgccgctcaggtgcgcgaggccacagagcggacgcgcgaactgcacagcgcctataacctagtgcgcgaacgtcgagggtttcgctagcaccgctcgttatggctttttcgccagccagccacgaacgcgccgcagcagctgttcatcatcgacctggcgatctccggtctgcggtggcagtgctacctggccgtagctggggtgccggttgcgtcggctggcattcaagcgatcccgggcagccgacaggttgccggtgccttccttgtagtagaaatcgccggtcggcagtttgagcggcgccaccagctgtgcgagcggctcgtcctgtccgtcgggttggcgcggttggaccatgaccaggcgcgtgacgcccggcggcccctgttgttgcaggaactgcgcgccccagtaggcgccgctgccgtggccgagcagcacgatggcagccggctgcttgctgcgggcgaaagccagtgccgcctcgatgcgtttggcgactcgctcggcctgggggatcggtgggacgggcgctgtggatgcgtcggtggcgtcgggctcgtcagccggggcgcctgccgtttcaggggctgccgcggttgtttccggtagatagccagcctcgttgggggccggcgcctgctcggactgtgggggtttgctgtcgtcctgctcgggcgctgcaggatcagcggcgggttcggctggttcggccgtgacgggcgcggcgggtactctggcgtccggcaggctcaggctcaatgtgtgccagccgtgatcgggcaatccgcgccgtagcgggccgatgccgcgcggccaatccgcgctttcgccctcgccgggcagcaggatgacgacgcctttcggattgccgtcattggctggttgccatagcgcgacgaagtcctcgtccgcggcgttcaggttcacgaattcgcttgctggcaactggcgtttcagttcggcggcgatggtgtcgctgcgtgtggccggcaccgggtgttcggtttggaccggttccggcgcgggctccggcgtcgcgggctcgtccgccgccaaggcagcatgcgtgggcactaccacgcagagcatggcgagatagctgaacagtgggcgaatacacaacatggtcttcctctcgggtaccgacctggcggtgacgacgctggcgccggcggtgcagatgcactacaaaagcgtttcggcctgtctgccgatctcgtgaggcctatggtgtcatctctgctgcgtggctgcctgctgctgctcctgttggttcatctacccgcgcatgcctggaacgttccgctgagcgatgcgcaactgtcatggctgggcgagcaccggcaatggcgcgtcggtgtggtgatgacctcgccctatgccgaatatgaccagcgccagcgacggctgtccggtttcaacgtgcagttcatggagcggctcgcggccgggctcggcgtcgagctgcagtggcatcgcttcaccgacgacgccgcgctggaagaagccatgcgcgccggcgagatcgacctcgcccccgggctgcgtcagacccgcgaagggctgcgcacctggcgctacagcgatccctttctgcgcgtgccgaggctgatcatcggcgacgtcaacggcccgcgcgcgatcgatctcgaacgcctggacagcgacgacgtgatcgccctcgaaggccccggcccggtggccgactacatgcacagcaactatccgagccagccggtggtggaggtgcccagccaattcgaggcactgcgtcagctggtcgaggcacgggtgcgctttgccgtggtcgacgagccgctctacgctcggctgtcacagcgcgccgaatacgcctcgctggatgtcgtcggcgaccttggcaatccgcagctgctgcggatcggctcacgccgcgacagcccggtgatgagcgcggtgatcgaccaggcattgcgcagcttccccgcgcagcagctcggccaactccaggagcagtggttgaagtcgcgcagcatcgatcaatcccgacgcatcagccactggcgcagcctcagcctgttgctgggcctgttgctgctggcaacgatcaccgggctggtctggcagcgacgccagcaggggctgctcgaggcgcgcctgaaatcggcacgacgggacatcgagctgcgcgaggccgccgaagaggcgcagcgccttacccagttctgtctcgaccacagcaccgtcggcatcctctggctgaattgggacagccacgtccgctacgccaaccaggccgccgaggacctgctggggtatgcctcggaccagctgatcgatcaaccgttgcaggcactggacccggccctgggtatggatgactggctgcagctctggcgagatgcgcgcagcggtatcgacgatcaccaggtacatgagcgcgactggcagcgagtcgatggcagccgtttcccggcggcgatcaccctgagtttcctgcgcttcggcagtaaggagtacctggtggtgttcctcgccgatatcaccgagcggcgccgtgccagcgcggcgttgcaggaaagcgaggtgcggctgaaggccatggccggcaacgtgccggggctggtgtttcgcctcgagcggcaggcgccgggcgcgccggtgagcatcggctacatcagcgaagccagccagcgactggtcggctattcggcggagttgctgctgcaaccgggccgcggcattcgcagcctggtccatcccgatgatgagccgggttactggagcagccagcagcaggcgctggacagcatgagtgactggcactggcagggccgcatcctgacccgttcgggcgaaattcgctgggccgatatccgcgcctcggtccgcgggcagttggcgggacggcaggtctgggacggcatcgtctgggacatcaccgacaacaagcggatcgagttggagctggacgcctcgcgtgcccagctgcgcaagctggcggcgcacgtcgagaccgttcgcgaggaagaaaaggcgcatatcgcccgcgaagtgcacgacgaactgggccagatgttgacggtgctgaagctggaaatttccatgtgcgagatcagcttcgccgagctggacccgggcctggctgcgcgcctgcagagcatgaagcggctgatcgctcagttgttccagcaggtccgcgacgtggcgaccgctttgcgtccgccgatcctggatgccggtatcgcgtctgccatcgactggcaggcgcggcggttcgaggagcgcactggcatcgcctgcctggtcgaggtgcccgaatgcccgccgcagctgagcaatgccaaggccgtcggcctgtttcgcatcctccaggaagccttgaccaacgtcatgcgacacgccaacgcccagaccgtgagcctgcgtctggagcagcggggggatgtgctcagcctgagcatcagcgatgatggccagggcttcgtcgtgcagtcggggcggcagggcttgtcgtttggcctggtcggcatgcaggagcgagcgcagatgctcggcggtacgctggtgctggagagccagccgggtgagggcaccttgatccaggtctccgtgccgctggacgcaccggcccagcaggcgccactgatcagcacattggagagctaggccatgattcgggtaatcgtcgctgaagaccacaccatcgttcgtgaaggcatcaagcaactgatcgggctggccaaggacatgcaggtgatcggtgaggcaggcaacggtcagcaattgctcgaccagttgcgccagacctcgtgcgatgtcgtcctgctggacatctccatgcccggggtcagtggcctggaagccattccacggatccgcgcgctgagcgatccaccggcgatcctggtgttgtcgatgcatgacgaggcgcagatggcggcgcgtgcgctgaaggtcggcgcggccggctacgccaccaaggacagcgatccggcgctgttgctcaccgcggtgcgcaaggtggccgggggcgggcgctacatcgatcccgagctggccgaccggatggtcttcgaggttggcctgaccgactcccgcccgccccatgcgctattgtccgagcgcgagtactcggtgttcgagcggctggttcatggcgattcggtcaatgacatcgccgccaagctggcgctgagcagcaagaccatcagcacccataaggcgcgcctgatgcagaagctggtcgcccattccgtcgccgacctggtgcgctacgccatggagcacaagctcgtctgaaccggctggaaccaacgtcgctccgggcctctgccgtgtcatctcgcacgctggctggctggctggctggctggcggtcgcgtgcggcgcttgcgtatgcgtcagttgtagggcattccctacagacgcctctccgtttcgctgagtccaatcactccgctgcaccgatgttcgcggtctcgcggggctcctaacctgtggtcacggaacaacggaacacaggtgcggcatgctcgactctcaagcgaacgatgtactggtcagctttcgtggcattcagaagagttacgacggcgaagcgctgatcgtcaaagacctcaatctggatatccgcaagggcgaattcctcaccctgctcggcccgtcgggctccggaaaaaccaccagtctgatgatgctcgccggcttcgagacgcccactgccggggagatcctcctggctggtcggtcgatcaacaagttgccgccacacaagcgcgacatgggcatggtgttccagaactacgccctgtttccgcacatgacggtgtcggaaaacctcgcctttccgctcagcgtgcgcggcatgcccaagctcgatgtgaaggagcgggtcaagcgcgcgctgtcgatggtccagctcgaaggcttccgcaaccgctacccggcgcagctctcaggtggccagcagcagcgtgtcgcgctggcccgcgcactggtgttcgagccgcaactggtgctgatggacgaaccgctgggcgcgctggacaagcaactgcgcgagcagatgcagatggagattaagcatctgcaccagagcctcggcgtgaccgtggtgtacgtcacccacgaccagggcgaggcgctgaccatgtccgatcgcgtcgcggtgttccatcagggcgagatccagcagatcgacgagccgcgcgcgttgtatgagaagcccgccaataccttcgtcgccaatttcctcggcgaaaacaatcgcctgccggcgcggctggtcagccgcaatggcgacaactgcaccgtcgagctcggccgcggcgagcgggtcgaggcgctggcggtgaaggtcggcgcgccgggtgctccggtcaatctgtccattcggcccgagcgggtgcgcctcaacggggccagtgccagctgcccgaaccgcttcaccgggcgggtggccgagttcgtttatctgggcgatcacatccgcatccggctcgaggtgtgcggcatcagtgacttcttcgtcaagcagccgatcgccgaattcgatcccgccctggcggttggcgacgtcgtgccgatcggctggcaggtggaacacgtccgtgcgctggatccgctgcaagcggcataagcagggactacaacaagaagctgttttcaaccgcatcatggagcgaacaacaatgctgaacactctgaaactgaccgccctgagcatcggcctgatctgcgccgcccaggcctcggcggaaaacctcacggccgtgaccttcggcggggcgaacaagcaggcacagatcaaggctttcaacgagcccttcgaggcgaagaccggcaacaagatcatcgccggcgaatacaacggcgagatggccaaggtgaaggccatggtcgacaccaacagcgtgtcctggcacctggtggaggtcgagtcgccggagctgtcgcgcggctgcgacgaagggctgttcgaggagatcgacccctcggtggtgggcaacccggacgacttcgtcgagggcgcggtgcaaccctgcggcgtcggcttcttcgtctggtcgacggtgctcgcctacaacgccgacaagctcgccagcgcgccgagcggctgggcggatttctgggataccgagaaattccccggcaagcgcggcctgcgcaagggtgccaagtacaccctggaattcgccctgatggccgacggcgtggcgccgaaggacgtctacaaggtgctggccaccaaggaaggccaggaccgcgccttcaagaaactcgaccagatcaagcccagcatccagtggtgggaagccggggctcagccgccgcagttcctcgcctccggtgacgtggtcatgagcagcgcttacaacggccgcatcgccgcggtgcaggacgaaagcaatctgcagatcgtctgggatggcggcatctatgacttcgactcctgggcaattccgaagggcgcgaagaaccagaaggaagcgctggagttcgtcggtttcaccgtccagccgcagcagcagaaagcctattcggaaaacatcgcctacggtccggcgaacaagaaggcgatcgatctgctggacaagaaagtgctgaagaacatgcccaccacgccggagaacatcgccaaccaggtggccatgaacgtgaccttctgggccgactacggcgagcaactggagcagcgcttcaacgcctgggccgcgcgctaagcgagcctgcaccctcgcaatggccggctggcacgccggccatgcgccgtcatctgaactatcgcggagttcgccatggctactgccgtctccctgcctgtccccgagttcgccgagcccgacctaaaacgtcggctggcgcgtgccgagcgcatgaaccggctcaaatccaaggcgttgatcctgccgctgcttgtgttcctgctgttgaccttcatcctgccgatcgcctcgctgctgtggcgcagtgtcgaaaaccccgaggtggtcggcagcctgccgcgtaccgtcgaggccatcgcggcctgggacggtcgcggcctgccggatgatgcggtgtaccgtgccctgagcgaggacctggtcgaagcccggcaggcacagacgattggcgatctgtccaagcggctgaacatggagcaggccggctaccgcagtctgctgaacaagacggcccgggcgctgccgttcaaggcgcagccgcaatcctaccgggacgcgctcgaggccctcgatgagcgctggggcgatccggcttactggcaggtgatccgccgcaacgacagcgcgatcaccccctattacctgctggccgcgctcgatcaccgtatcgatgacctgggcgagctggcgccggtgtcgccggatcaggcggtgtatctggacatctttgcccggaccttctggatgggcctggtaatcaccgcaatctgcctggtgctggcctatccgctggcgtacctgctggccaacctgccggcacgcaagagcaacctgctgatgatcatggtgctgctgccgttctggacctcgatcctggtgcgcgtggcggcgtggatcgtgttgctgcagtcgagcgggctgatcaacggtgcgctgttgaagatggggatcatcgaccagccgctgcagctggtattcaaccgcgccggcgtctacatcgccatggtccacatcctgctgccgttcatgatcctgccgatctacagcgtgatgaagagcatctcgccgagctacatgcgcgcggcgatctcgctgggctgccatcccttcgccagcttctggcgggtgtacttcccgcagaccctcgcgggcgtgggtgccggttgcctgctggtgttcatcatttccattggctactacatcacgccggcgctgctcggcagcccgaacgaccagatggtcagctacttcgtcgccttctacaccaacaccaccatcaactggggcatggccacggcgctgggcggcttgctgctgctcgcgaccatgctgctgtacatcgtctacagctggctcgtcggcgccagccgtctgcggctgggctgagatgacggcgccgctgcggcaaccacggccaacctttcgtatatccgggcaggagacctttccatgctgagcccttacatgtcgcccatcgagcgcgtctggttctacacgttgcgaatcatatgcgcgctggtgctgctgtttctgatcgtcccggtgctggtgatcgtgccgctgtccttcaactccggctcgttcctcgtctacccgctgcaaggcgtgtcgctgcgctggtacgaggcactgttcagttcggctgactggatgcgctcgctgaagaactcgatgctgatcgcgccggctgccactgcgctggcgatgatctttggcacccttgcggcgataggcctgacccgcggtgaatttcgcggcaagtcgctggtgatgacgttgctgatctcgccgatggtggtgccggtggtgatcgtcggcgtggccagttacctgttctttgcgccgctgggcatgggcaacagctacctgtcgctgatcctggtgcatgcggtgctgggcgtgcccttcgtgatcatcacggtgtctgcgacgctgcagggcttcaaccataacctggtgcgcgccgccgcgagcctgggtgcgtcaccgttgacgaccttcttccgggtcaccctgccactgatcgcgccgggtgtgatcagtggcgcgttgtttgccttcgcgacgtccttcgacgaagtggtggtgacgctgttcctcgccggtcccgagcagatcaccctgccacggcagatgttcagcggcattcgtgaaaacctcagccccaccatcgccgcggcggcgaccctgctgatcgcgttctcggtggcgctgctgctgaccctggagtggctgcgcggccgctccgagaaaatgcgcacccaacaacctacctgatccggatgctttcatgaccctgtctctcgaccatcccggcctgttgcgccagcaggcctacctcaacggcgactggtgcgatgccgacgcgggcggccgcaccgccatcttcaaccccgccaccggcgagcccatcggcgaggtgcccaacatgggccgcgcggaaacccgtcgcgccatcgaggccgcgcaggcagcccagccggcctggcgcgcactgactgccaaggagcgcgccgcccgcctgcgccgctggtacgagctgatgctggagaaccgggaagacctggcgcggatcatgaccgccgagcagggcaagccgctgtccgaggcgcggggtgaggtggcctacgccgcgtcctttctcgaatggttcgccgaggagggcaagcgcctttatggcgacgtgattccggcccacgccggcgacaagcgcatcctcgtgcaaaaggagccggtcggcgtcaccgcggcgataacgccctggaacttccccagcgccatgatcacccgcaaggtcggcccggcgcttgctgccggctgcgccatggtgctcaaaccggcgccacagacgccgttttccgcgctggccctggctgcgctggccgagcgtgcgggcatcccggcggggctgttcagcgtgatcactgccgatgcggcaacctcacgcgaggtgggcgccgagctttgcgaaaaccccatcgtgcgcaagctgtcgttcactggctcgacagcggtcggcatccacctgatgcagcagtgcgcgccgaccttgaaaaagctctcgctggagctgggcggcaacgcaccctttatcgtcttcgacgatgccgacctcgacgcggcggtggagggcgcgatgatttccaaataccgcaacgccggacagacctgcgtctgtgccaaccgcatctacgtgcaggacggtgtctacgatgcgttcgccgaccggctcggcgccgcggttgcgaagttgaaagtcggcaatggtatggaggaaggcgtcaccaccggtccgctgatcgacgccgcggcggtggccaaggtgcagcgccatctgcaggacgcgctggccaaaggcgccacgctgctggcgggtggcaaaccgcacgccttgggtgggactttcttcgaacccacgctgctgggcggcgtcaccgccgagatggcggtggcgcgcgaggaaaccttcggtccgctggcgccgctgttccgcttcagtgacgaggcggacgtgatctgccaggccaacgacaccgagttcggtctcgccgcctacttctttgcacgtgatctgggtcgagtgttccgcgtcgccgaagccctggaatacggcatggtcggcatcaacaccggtgtgatttccaccgaggtggcgccattcggcggcatgaaggcctctggactcggtcgcgagggctcgcgatacgggctggacgagtatgtggaaatcaaatacctgtgcgtgggcggtctctgaaccatcctgcatttgggcgtgcaaaatattgcacgtgctattactgttatccgaacgcccggttggcccagcagtcgatcatcgtatgctgccggcccggcttccaggcgttcattcagacccgcgccgacgatgagcggctaccgaggagcttatgagcaagaccaacgaatccctgatgcaacgccgtgtcgccgccgtccctcgtggtgtcggccagattcacccgatctttgccgatcacgcgaaaaacagcagcgtggtcgacgtggaaggtcgcgaattcatcgatttcgccggcggcatcgctgtgctgaataccggtcacctgcacccgaagatcatcaaggcggtggaagatcagttgcacaagctgacccacacctgcttccaggtactggcctacgagccttatgtcgagctctgcgagaagatcaacgcgcgggtgccgggcgatttcgccaagaagaccctgctggtcaccaccggctctgaggccgttgaaaatgcggtgaaaattgcccgcgccgccaccggccgcgccggcgtgatcgccttcaccggcgcctatcacggtcgcaccatgatgaccctcggcctgaccggcaaggtcgcgccctattcggccggcatgggcctgatgccgggcggcatcttccgcgcgttgtatccctgcgccatccatggcgtcagcgtcgacgagtcgatcgcaagcatcgagcgcatcttcaagaacgacgccgagccgcgtgatatcgccgcgatcatcatcgagccggtgcagggcgagggcggcttcaacgtcgcgccgaaggacttcatggtccgtttgcgcgcgctctgcgatcagcacggcatcctcctgatcgccgacgaggtgcagaccggcgctgggcgcaccggcaccttcttcgccatggagcagatgggcgtggtcgctgatctgaccactttcgccaaatccgtcggcggtggcttcccgatcgccggggtgtgcggcaaggccgagatcatggacgccatcgcccccggcgggctgggcggcacctatgcgggcaacccgctgtcttgcgcggcggcgctggcggtgatggaaatcttcgaggaggaaaagctgctcgaccgttgcaaggcggtggccgagaagctcaccagcggcctcaaggccatccaggccaagcacaaggagatcggcgaggtacgcgggctcggcgcgatgatcgccatcgagctgttcgaggacggcgatcatgcgcgacctgctgccgcgcttacctcgcagattgttgccagggcgcgggagaaggggctgatcctgctctcctgcggcacctactacaacgtgctgcgcgtgctggtgccgctgactgcggaggacgagctgctcgaccgcggtctggccatcatcggcgaatgctttgatgaactgacctgatccacccgcgcgcgtcagacattcgtgatggatgtccggcgcgccgcaactccgaccctcgggtacaatgcgcggcattccgccgtgctacccgaggtcgtcatgcagccgttcgccatcgctccctccatcctctccgccaatttcgcccgcctgggcgaggaagtggacaacgtgctcgccgccggtgcggacatcgtccatttcgacgtgatggacaaccactacgtgcccaacctgaccatcggcccgatggtctgctcggcgttgcgcaagcatggcgtcaccgccccgatcgacgtgcacctgatggttcgtccggtggaccgcatgatcggtgactttctcgaagccggcgccagctacatcaccttccacccagaggcttcggatcacatcgatcgctctctgcagctgatcaaggacggcggagccaaggctggcctggtgttcaacccggcgacgccgctggacgtgctcaagtacgtgatggacaaggtcgacatggtcctgctgatgagtgtgaaccccggcttcggcgggcagaagttcatccccggcaccctggacaagctgcgcgaagcgcgtgcgctgatcgatgccagcggccgcgagatccggctggagatcgacggtggcgtcaatccgaagaacatccgcgagatcgctgccgctggcgccgacaccttcgtcgccggctcggccatcttcaatcagccggactacaaggcggtgatcgaccagatgcgcgccgaactggcgctggctcgcccatgacgcgtctggaacagctgttccacggcaggctgccgggcctggtgatgttcgacctggacggcaccctgatggactcggtgccggaccttgctgccgcagtcgacaagatgctgatgctgctcggtcgtgagcccgccggcgtggagcgggtgcgcgactgggtcggcaacggttcgcgtgtgctggtgcgtcgcgccctggccggtcagctgcagcatgagggtgtcgctgacgagctggccgatgaggcgctggcgctgttcatgcaggcctattccggcggccatgagctgaccgctgtctacccgggcgtcgtggagtgcctggattggctgcgcgatcgcgacgtcaagctcgcgatcatcaccaacaagccggcacagttcatcgagccgctgctggaggagaaaggcctggccggatatttccagtggctggtgggtggcgataccttgccgcaacagaagcccgatccggccgcgctgttctgggtaatggacagagctggcgttgcgccaggcgagtcgctgttcgtcggggattcgcgcaacgatgtccgcgcggcgaaggcggcgggcgtgccctgtgtcgcgctcacctacggctacaaccacggcgaacccatcgcccacgagcagccggcgctggtccttgacgacttgcgtgagctggttgcttcggtcccggggctgcgctagtgtggcgcctgttccgtaacccgcctggacgagatcagatcgtggtggtcacccgcaaacaatggacgaatgtcatcaaggccctggcccgttggcgctggcgcgcctgactcttcctgccggctctgcccggtacgtttgcacagctcgaccttaagcagttcccctccgaccacgaggctgacatgacccgcgaagaattcctgcgtttggccgccgaaggccacaaccgcattcccctgtcgttcgaaaccatcgccgacttcgatacacctctgacgctctatctcaagctcgccgacgcgcccaattcctacctgctcgagtccgtgcagggcggggagaagtgggggcgttattcgatcatcggcctgccgtgccgcacggtgttgcgcgtccaggatcaccgcatcagcgtgaccaccgatggcatcgagaccgaggcttgcgaggtcgaggatccactggccttcgtcgagtccttccagcagcgctaccgcgttgcgccggtcgacggcctgccgcgcttcaacggagggctggtgggttacttcggctacgacagcgtgcgctatgtcgagcgcaagctggcgagctgcccgaatcccgatccgctgggcacgccggatatcttgctgatggtctcggacgcggtggtggtattcgacaatctcgccggcaagctgcactgcatcgtgctggtcgatccggcgcagccagatgcctttgatgcggggcaggcgaaactgcaggccctgcgcgaaaaactgcggcagtcgatcacgccgcgtctgggcctggacttcgaaagcggcgccggccacgagcccgcgttccgttcgagcttcagccgtggggactacgagcaggccgtcaaccgcatcaaggactacatcctcgccggcgactgcatgcaggtagtgatctcccaacgcatgtcgatcccgttcaaagcggcgccgatcgatctctaccgcgcgctgcgctgcttcaacccgacgccctacatgtacttcttcaacttcggcgatttccacgtcgtgggctcgtcgccggaagtgctggtgcgggtcgaagaaggcctggtcacggtccggcccatcgccggcacccgcccacgcggcgccaacgaggaagcggacctggcgctggaaaaggatctgctcagcgacgccaaggagctggccgagcacctgatgctgatcgacctggggcgcaacgacgtcggtcgcgtggccgagaacggctcggtgcggctgaccgaaaagatggtcattgagcgctactccaacgtcatgcacatcgtttccaacgtcacgggccagctcaaggcgccgctgaccgcaatggatgcactgcgcgcgatcctgccggccggcaccctttcaggcgcgccgaaaatccgggccatggaaatcatcgatgagctggagccggtgaaacgcggcgtgtatggcggggcggtcggctacctggcctggaacggcaacatggataccgcgatcgccattcggaccgcggtgatcaaggacggcgagctgcacgtgcaggcaggcgccgggatcgttgccgactcccagccggcgctggaatgggaagagacgctcaacaagcgtcgcgccatgttccgtgcggtagccttggcggagaagggcgcggactgatcggttgcgcctaggcggtcagtcctgggaaattgcgactaaagtccgcatggattgtatggtaatggcatctggctatccttatagtcgcaggtagccgagctagagcgctcggctacccaaccctagccggtcgcaccagccgatgccgttattgcccagccatccttcgcgcgccaattcgcacagcttgccgctggtatggatgctggtcgccgccctgaccgggttgctggttctcgtctatctgttatcgaatctggcggacttcaacggcagcccggtgtggttcccgttgccgctgcacatcgtcgccgaaactttctcgatcgcggttgcggcattggtgttcgccgtggcctggcatgcccagcaaccgcggccgctatcgaacccctggctggcgtgcgcgtttctggccatcgccctgttggacctggctcatatgctgtcttacaagggcatgccggccgtggtgacgccggcttcgccggaaaaggccatcgcattctggctggtctcgcgtcttgtgctcgccttgacgctgctcgcggtggcctggcgggtatgccatcggctcggggccttgccccggcccgtgctgctgtcctcagcgcttggtctggtcgcgctggtcgtttacctgcagcttttccagccgcagctatggccgcggaccttcatcgaagggcagggtctgacccgcttcaagattctcgctgaatggctgatcatcgctttgctcgtcctggcggcgtggccgttctggcgggccccggagagcgacgaaacaggctacttcgacggcatgctggccgcgacgctggtgtcgattcttgccgagctgtgctttaccgcctacgccaacgtgaacagcttctacagcctgctggggcatgcctacaagatcgtttcctacggcttcatctatcaggtggtgttcgtctcgagcgtgcgcgcgccctacgagcggctggcaatcgaaatgactgagcgagttgcggcgcagaaacgtgccgactacatggctcacttcgacggcctgacggggctgcccaatctgagcctgctcgaggatcggacgcggcaggccctggccgccgcgcttaagctcaagggggccgtggcggttctgtatgtcgatctcgaccatttcaagatggtcaacgactccttcggccgtgctttcggtgaccaggtcctgtgcaccatggcgaccaggctgcagcaggccctgcccgatgatgcggtgctggcccgcggaggcggcgacgagtttgtcgtgctcctggcggacctcgccgacgccgaagctgcatcggcggttatccagttcgtgctcgacaccttggctgaaccctgcgtcgttcaacgccaggaagtggtgatgtccaccagcatcggtgtggccgtcggtccaggggacggcatggacttcccctgcctgctgcgcaacgccgagatggccatgtacaaggccaaggaggccgggcgacgcacctggtgttattacaacgctgcgctcgatgccgagatgcgcgggcggctatacctgatcaacgggctgcgggtcgcgatcgagcgtgacgagctgtttctggactaccaactgcaagtggatctggtcagtggcgaggtggtgggcgccgaagcattggtgcgctggcaacatccgcaatgggggctggtcgcgcctgggcagttcattccggcagcggagcagagcggcctgatcgtcgatatcggccaatggatcattctcgaggcgtgccggcaggccgcacggtggcgcgccgaagggctgtgcatcccgcgcgtggcggtcaacgtcgcggcgatacaactgcaccagggtacgctggaacggaccgtttccagcgcgctggaacagaccgggctgccgccatcggcactggagctcgagttgaccgagtccagcctgatcgagaacaccgagcaggtgatgatcacgctggcgcggctgaaagcgctgggcgtgacgctggccatcgatgacttcggcacgggttattcctgcctggcctacctgcgccgactgtccgtggacacgctgaagatcgatcgatccttcgtcaatgacctgctcaccgacgatggccatgccatcgtcgccgccatcattcacatggccgattcgctgggcctcagcacgctggccgagggcgtcgaagacgaaggtaccgcagcggaactgcgccggttgggctgccggcaggcgcagggcttcttctatgcgcggccggcgcgtgcttgcgcgctgccggccatcgtcgcggcgctgtcgcaggagccgagcgcggccgggtggtaacgcgccggttccgcccgggttgcgctctggtatagtccggttgaatcgtggcctggcatgggctactttgcgccgtaagctctgcgagacctatccgtgaaattcagcagcacactcctgatgcgcgtgttcaaggccaatgcccgctggcgttggcgcgtctgatccttgccggctccacgccggagtacctaagtttgcctgtctccaccaccgtgccgcactgcgccggcgcggcgtgtgatgacagcgccggatcagcttcaaaccctagggtgacgccaaatgctgctaatgctggataactacgactcctttacctacaacgtggtgcaatacctcggcgagctcggtgccgatgtcagagtcgtgcgcaacgatgaactcagcgttgccgagatcgaggccctgaacccggagcgcatcgtcgtctcgccaggcccctgcacgcccaacgaggcgggcgtctcgctggaactgattcgccatttcgccggcaagctgccgatcctcggcgtttgccttggccatcaaagcatcggccaggccttcggtggcgatgtagtgcgtgctcgccaggtcatgcacggcaagaccagcccggtctatcaccatgaccagggtgcgttctccgggctgaacaacccactcacggtgacgcgctaccactcgctggtggtcaagcgcgaaacgctgccggactgcctggaagtgacggcctggacgcagcacgaagacggaacccttgacgagatcatgggcttgcggcacaaggccttgaatgtcgagggcgtgcagttccaccccgaatcaatccttaccgagcagggacacgagctgttcgccaactttctgaagcagaccggaggcgtgcgctgatggacatcaaggaagccctcaaccgcatcgtcggccaactcgacctgagcaccgacgagatgaaggcggtgatgcgccagatcatgaccggccaatgcaccgatgcgcaggtgggtgcgtttctcatgggcatgcgcatgaagagcgagaccatcgatgagatcgtcggcgcggtgcaggtcatgcgtgagctcgccgaaccggttcatttcgatacgcaccggctggtcgacacctgcgggaccggtggcgacgggatgaacatcttcaacgtgtccaccgccgcggcgttcgtcgtcgcggccgccggcggcaaggtggccaagcacggcaaccgggctgtctcgggcaaaagcggcagtgccgatctgctcgaggcggccggcgtcaatctcgacctcacccccgcccaggtggcgcgcagtgtcgatgccgtgggcgtcggcttcatgttcgcaccggctcaccacggggcgatgaggtatgccgccgggcctcgccgcgaactggggttgcgcacgctgttcaatatcctcggacccatgtcgaacccggccggggtcaagcatcaggtgctcggtgtgttcagcaaggaactctgccggcccatggccgaggtgctgtcgcgcctcggaagccagcatgtgctggtcgttcacgcccaggatgggctggacgagatcagcctggcggcaccgacccatgtggccgagctgaacaagggcgagatcagcgagtatcgtgtccagccggaagactttggcatcaagagccagagcctgatcggcctcaacgtcgaggacgcgcaaggttcgctggccttgattcgcgacgcgctggggcgacgcaagaccgagaacggtcagaaggccgcagacatgatcgtgctcaacgccggtgccgcgttatatgcggccgacgtggccagtagtctcaagcaaggcgtcgagatcgcccatgacgcgctgcatacgggcctggcgcgcgacaagttcgaagagctggtgtccttcaccgtggtgttcaagcaggagcaagcgcaatgagcgtgccgacggttctggaaaaaatcatcacgcgcaagcgcgaagaggtggccgagcgtcgtgctcgggtcgggctcgccgagctggaagcagcggcggccgcggcagatccggtccgcggttttgcacggcgcttgcaggagcaggcgggacacaagcaacccgcggtgatcgctgagatcaagaaggcctcaccgagcaaaggcgtgctgcgcgaagacttcgtgccagcggacatcgccaagagctacgaggcgggtggggcgacctgcctgtcggtgctgaccgacatcgatttctttcaaggtgccgacgaatacctgcagcaggcgcgcgctgcctgcaaattgccggtgattcgcaaggacttcatggtcgatccctaccaggtgatcgaggcacgggcgctgggcgccgattgcatcctgctgatcgtcgcggcgctggaagatgggcagatggctgagctggctgaagtggccaaggcccaagggctcgatgtgctggttgaggtgcacgacggggcggaactggaacgggcattgcgcctggatacgcccttggtcggcgtcaacaaccgtaatctgcataccttcgagctgagcctggagaccacgctcgacctgcttccgcgcatcccgcgtgaccgtttagtcgtcaccgaaagtgggattctgcatcgcgccgatgtcgaactcatggagatcaacgaggtgcatgcgtttctggtgggcgaagccttcatgcgtgccgagcagcccggcgtcgagttgcagcggctgtttttccctggccgcagccgaccgcggttggcgagcgatccggattgatgggagcttaagccggtgatcgcaggcctggcagcagcgctgcgctgggcctgaaaaaatcagcaagaaagcgcgtgtttatcgagcgtaactgcacttttttgctgattttgcttgggttgacggccactcattacagtctggtgagctgcacctctcgcgttcgtcgatgctgacgcagccttcaacgcgtgccgaacaccaccatggttttccctttgacatgtaccaggccctgcgactccaggctcttgagtacacgcccgaccatttccctcgaacagccgacgatgcgaccgatttcctggcgggtgatcttgatctgcatgccatcgggatgggtcattgcgtcgggctgtttgcagaggtcgagcagagtgcgggccacgcggccggtcacgtcgagaaacgccaggtcgccaaccttacgggtggtattgcgcaggcgttcggccatctggctacccagtgcgtacaggatgtcgggatcctgctgggtcagttcacgaaacttcgcgtagctcagttcggcgacttcgcactccgtcttggcgcgaacccaggcactgcgttccttctccatgccctctttttcgaaaagacccatctccccgaagaagtctcccgaattgaggtaggcgatgatcatctcgcgaccgtcatcgtcttcgatcaggatggtgaccgagcctttgactatgaagaagagcgtttcgcagcgatcgcctgcgtagatgatggtgctcttggcggtatagcgtcgtcgatggcaatgcgcgaggagtttgtcgatgttcttgatcttgggcgtgagtgtaatagcaaccatgctttagtcccggaagatgtgtccaattagaggcaggttcttattatgtttgactgagttctgttatcaggctgagggagcttaacagacaggtctcgatcgacaacaaaactgcgacacgaaatcaactttcgcacattcatttcgtcggattgccgactccagtcgtgaccggaggtcatgctaagcttcgctccttttcaaccggagtctatcgatgaaagcgcgcattcagtgggctggcgaagcgatgtttcttggtgaatcgggaagcggccatgtcgtggtcatggacggtccaccggagaacggagggcgcaatctcggtgttcgtcccatggaaatgctgctgttggggctcggtggttgcagtaacttcgatgtggtaagcattctgaagaagtcacggcaggcggtggaaagctgcgaggcgttcctcgaagctgagcgcgccgacgaagatcccaaggtgttcaccaagatccacctgcgtttcgtcgtcaaaggtcgcggtttgaaggaagcgcaggtcaagcgcgccgttgagctttcagctgagaaatactgctcggcgtcgatcatgctcgggcgcgccggtgtggaaatcagccacgcctacgagatcgtcgagctgggctgagccgtcagtgtcggattgcggtgctcgataccggcgcggcggcagatggagctgatgccggtcgatggaatttgaggtcgcgggcactggaaccccaggccatcaatctgcataatgcgcgccccgtttttcaacggggcgtttcgttagaacacacagccacggtcgcaattgcgaagaggtgtatacggtcctacgcagatacagcggtatctgacgggcatgctcaatcacgcggtgcgccgcatcgaagagagtctccaatggtgaaaagcaaactcaagctccacgggttcaacaacctgacgaagtccttgagcttcaatatctacgacatctgctatgccgaaacccaggaagaccagcaggcgtacgtgcagtacatcgacgaacagtatgacgcgaagcggctgacgcagattctgaccgatgtagtcgacatcattggcgcgaatattctcaatatcgcgcggcaagattacgagccgcagggtgcgagcgtcaccattctcatctccgagcagccggttacgccgactgacagccagatcgaggaatcgcctggtccgttgccggataccatcctggcgcacctggacaagagccacatcaccgttcatacctacccggagatacatccggtcgaagggatcgcgacgttccgtgtggatatcgatgtatcgacgtgcggcgttatttcgccactaaaggcactcaactatctgatccatcagtttgattcggatatcgtgacggtcgactatcgcgttcgcggcttcactcgcgatgttgaaggcaaaaagcacttcatcgatcatgagatcaattcgattcagaactatctctccgaagacactcgctcggcctatcagatgaccgacgtgaatgtttatcaggagaacttgttccacaccaagatgctgctcaagaacttcgagttggagaattacctgttcggagacgccaccagcaatctgtctgcggaacagcgcgagcaggtggaagatcgcctccgacatgaaatgctggaaatcttctatgcccgcaacatgccgggctaagtaaacgaaagggcgcctctccggcgcccttttcgtatccgctcgacccgccccgttagatccgataggtggtcttggtcatcaccttggccatcaaactcatgccgaacttgatcggtgcggggaagcgcagaccgccggcatccagcgccgtggtcgaatgctgagcctcgtcctcgcgcatctgctcgaggatcgcacgtgacttctcatcggctgccggaatctgctcgaggtgctcatccaggtgcttgcaaacctggtcttcagtcgccgcgacgaagcccaggctgatgcgatcgctgatcaggccggcggatgcgccgatgccgaacgacaaaccatagaacagcggattgagcacgctggtatggctacctaactggtggatccgctgttcgcaccaggccagatgatcaatctcctcgtcggccgcgcgctccatcgcctcgcgcacgttcggcagccgtgccgtcaaggcctgtccctggtacagcgcctgggcgcaaacctctccggtgtggttgatgcgcatcagcccggctacgtggcgcgcttcgctgtcgctcagttctgtctcgttcttcaacaccgcaggtgtcggccgatggggctggccactgaagggaagcagcgttctaagcgccgcatcggcttgcatcagcagacggtcggcaggtgagtattcacgttggttgggcatgacgcctccagatgtatcggagcagccgtgattgaaagtgcgcgcctcgggtggctgcggtcagcctggaggccaatgcatctggcgctggccgagcacgtgcatatgtatgtgatagaccgtctggccacccaggtcgttgcagttcatgacgacccggaagccttcctggcagccttgctgctccgccaggcgttgcgcggtaaagaggatgtggccggccagcagcttgtcatccgcctcgctcaggtcatgcagtgttgcgatgtgcttctttgggatgaccagaaaatgcacgggcgcctggggcgcgatgtcattgaaggcgatgacctggtcgtcctcgtatatcttttgcgcagggatgtccccggccacgatcttgcagaacagacaatccatggcgtttctccaccaagtggcacgattgggcagtgtaacaggccgttctaagcctggtcagcccgcgcgggggatagcgaatgaagaacgatatccgtgatctggcgtaggtgtccgaaacaagatgctgactaggagcgggcgaatccttgggcgagcgacgggggctgggaaacgctgatcggccgccaatcgcggcctggctttacgcctggtccgtcacggagggctcggtggacaaggtgtgcagctgggcttcgggccgcacggtgctggcccgatccgggttggcataacaatgcgcgtcgtatcagctttgctgataagccggcagggcgatagcggccaggatgccaatgacgggcacgagcagccagagcgccgcgaggattctcacggcccgactgttcggcggttgcggcgggccgaagctgttcgggccgtcattgcctggcatcaacagtatcgccagtgaaaagaggttgccgactatcggtaccagattcagcagcatgagccagccggaccacccgatatcgtgcaggcgctgtacgcagatctgtatgctgacgaacaggaaacccaagcagagaacgccggtgagaatggagccgagcactgcagagacagcgaacgccacgcttgcgaccagaagcagtccaagcgcggcagccatgagtgacatggaccaggccaggtagcgcaagcggccgattctgccctgaatggtaaagaccttgagctcgccgtactccggggctggctcgccgatctgcgcacgaggtggggcgtagggttgcgcagccgcgtgaatttcgctctgctttgacgcttcggcctgctgtgcctggcgtgccaaatatttctggataacgatgccgcagcttctgcactggatggcggtcggctgggcgtgtccgcacttcgggcactccatctgatcggctgtcgctggcgcctgtggtggcgcgtcgtcaatgaggctcagcgtcgtcccgttctttgcttccggctccttgcgcgcccgcgctccggctcgtagcagcgcctgtaggtatcggtctgcttcgacggcgctcaaatcgcgcttgatattgaccggggcgtgactgaagaggcgttcgaccttggcggcatcgctcttgaacagcctggccagattgctcctgacggtgtcggctggaatacccggtacgagctcaccatcgaagacgattctgtataggtcggcgctcatgcaacatccttgttcccgggggattcgctaaagcctaaagcggcgccgtagagcccacaagttacagctgagaggtagggctgggctttatctgaaatgggaggcgcgtcacggtcgccgtggccagcgctgcgagagctgagtcgcttgccccagggccgctcggtattcgtgatccaggcgtgcgatcagttcttcggcgctcggcagatcatgtatctctcccaccccttggccggcggaccagacggtcttccaggccttggcctcatcgttgacgggtttgagcttctcaccgtagttcatctggccagtgctcttcaggcgttcctcgtcgaagccggcctgttgcaggctttgcctcagaaagctcgctggcacgcctgacacggcggcggtgtggacgatatccgccgcatgggcctgcagcagcatgtgtttgtatgcgtctggggcttggctgtcgcgggtagcaatgaagcgcgtccccatgtaggcgaggtccgcccctagtagctgggctgcgagtatttcgtggccatggttgaggcagcccgatagcagcagtgtcttgtcgaagaactggcgaatctcggcgataagggcaaatggactccaggtgccggcgtggcccccggctccggccgcaaccgcaatcagaccgtcgacgccggcttcggcggccttttccgcgtggcggcgtgtggtgacgtcgtgaaagaccaggccaccatagctatgcacggcgtccacgacttctttcaccgcgccgaggctggtgatgacgatcgggacgcgctgctgcacacagatttcgaggtcggcctgcaggcgcgggttgctgtggtgcacgatcagattgacggcgtatggcgcgggttcgtgcgtgccggagagctgctgatctatctcctgaagccaatcacgaaagccgctgctctctcgttggttgagtgccggaaagctgccaaccacgccgctgcggcaacacgcggtgacgagcgccgggttggataccagaaacatgggtgcggcaaccaaaggaaggcgcaggcgttgttcgaggaggggcggcagcgacatggcagaatccttgatcagcttcagaacggtttgacgaccaccagaatgacgatggccagcaacagcaacaccgggaattcgttgaaccagcggtagaacacatggctgcgggtgttctcattgcgcgcgaagcgcttcagctgagcaccgcatacatggtggtaaccgatcagtaccacgaccagggcgagtttggcgtgcaaccagccgccgctgccgaacagcgcggggttcagggcgatcatgcctattccgaaaaccagcgtggcgatcatcgagggcatcatgatgccgcggtagagcttgcgctccatgacctggaatcgctcgcggctgactgcgtcctcgctcatggcgtgatacacgaacagtcgcggcaaatagaacagcccggcgaaccagcagacgatcgcaacgatgtgcagggctttcagccagagatagagcattcgacggttccttggtttcgatgtcgaggtcgatagtagtggctgcgaggtccgcgcgccatctaggtggttggccctgggcgcaggcgcctttatcatctcggttcttaattgttccagcgcgcgaggcagctcatggtcaaggtcggaatcgttggcggtacaggctataccggggtcgaactgctgcgcctgttggctcagcacccccaggccgaggtggccgtgatcacgtcccgttcggaggatggggtcaaagtcaccgacatgtttcccaacctccgcggacactacgacgagctggcgttcagcgttccggataccgcgacgctgggcgcttgcgatgtggtcttcttcgcgactccccatggtgttgcccatgcactggccgctgagctgctggatgccggaacccgggtcatcgacctgtccgccgattttcgtttgcaggacgccgacgagtgggccaagtggtacggccagccgcacggtgcgccggccctcctgccggaagccgtctatggtctgccggaggtcaatcgtgagcggatcaggagcgcccggctgattgccgttcctggttgctacccgaccgcgacccagcttggctacctgccgctgcttgaaaacggcctggccgatacctcacgactgatcgccgactgcaagtcaggcgtcagtggcgccggtcgggcggcgaagatcgggtcgctgttcaccgaggcgggcgagagcatgatggcttatgcggtcaagggccatcgccacctgcctgaaatcagccaggggctgcgccgtgccgcacgaggcgacgtcggactgaccttcgttccgcacctgacgccgatgattcgcggcatccatgccacgctgtatgcgaccgtcactgacacatctgtagatttgcaggcgctctacgagcagcgctacgccaatgagccgttcgtcgatgtcatgccggcaggcagccatccggaaacgcgcagtgtgcgcggtgccaacatgtgccgtatagcggtgcaccgtccgcagggtggcgatctggtcgtcgtgctctcggttatcgacaacctggtcaaaggtgcgtccggacaggctttgcagaacatgaacatcgccttcggcctggacgaacggctcggcctgagcaacgcagcgctgctaccgtaaggatggctcggtctgttgcctggaagtggctttgtacccaggcgaccgttgatgacggaatagttgaccgattttgtaggagaagccgataatgcgacgtcaacgcagtaatgggcgctcccgcgccaggagaaccaaatgagtgtcgaatccttcacgcccaccgcgattcagttcagtcagggtgccgcgagtaaggtgaagagtctggtcgatgaagagggcaatccgcgcttgaagctgcgcgtcttcgtcacgggcggtggctgctctggtttccaatacggctttaccttcgatgaggatctggctgaagacgacaccatcatcgagcgcgagggcgtgagtctggtggttgatccgatgagctaccagtacttggccggcgctgaggtcgactatcaggaaggtttggaaggttcgcgcttcgtcatcaagaatccgaacgccaccacgacgtgcggctgcggtcagtcgttttcgatctaatctgctcgctagaaaaaaacaccgtgccttggcgcggtgtttttcgttggggctgtctggatcgcagcctgacctttgagcgtcaggccgggtagattgcgcccaaaactcgagcgccacgcgccccggtaacgcttggtcggctggcggcaatgccttcgaggcaacaatgcgccagccaggcgaaggccatggcttcgatccagtcgggctcgatcccgtagtccgctgtgcttttcaccgtgcaagagggcagcaatgcctgtagccgctgcatcaatgcgtcgttatgcgcgcctcctccgcagaccaatacgtcctgcgtctcgggctgggccgccaatagtgactgggtgatgctgcgcgcggtgagttcaagaagggtggcctggacgtccttgggcgccatatctggtagtgccgcgagctgagtatccaaccatggcaggttgaacagctcccgcccagtgcttttaggcccttgggtcgcgaagaacgggtcatcgaggagtcggtcgagcagcctttgatcgacagtgccggtggccgcccatgcgccgctccggtcgtaagagtggccatggtgtctattgatccaggcgtcgagcaggacgttgcccgggccacaatcgaagccgcgggtctcttgctgcgggtgaagcaggcttacattgctgaacccaccaatattcaatacagcccgcgggcggtctgggtcgccgaacacggcttcatgaaatgccggaaccaggggggcgccttgtccacctgccgccatgtcgcggcgtcggaagtcggcaaccacggtgatggaggtaagctctgccagtagcgccggttggccgatctgaatggtaaaaccgcgctggggctcatgccgaacggtttgcccgtggctgccaatggcccggataggggtggcgtcgatccgcgccttatgtagcaattggtgcacaccgtagctcgcctgctcggcccaggcctgctccgccacggcggctcgggcaagttcgtcggggcccgaagagcacaggccgagcaggtcctgctttagctgatcaggcattggctcgtaatgcgtgccgagcagcttcgtgctatcgccctgctcgatcagagcgaagtccagcccatccaggctggtgcctgacatgaccccgatgtagagcggcactactcgctcttcatggccagcatggtcgagcgttcttcatccatgcgcgccattagcggtttgctcaattggaggaagcgttgcttctcgttctttgcaatcgggtcggccataggaagcttcagcccgagtggatcgacgtgaactccatcgatctggaactcgtaatgcaggtgcgggccggtggacaggccagtcgtgccgatgtagccgatgatctggccctgcttgaccgttgcgccattgcttatacctttcgcaaaaccttgcatgtgtccatagagcgttcggtagtggttaccgtgctgaatgaccaccgtgttgccgtaaccgcccttgcggcccgccagcaggactttgccgtccccagcgctcttgatcggtgtgccgcgcggtgcggcatagtccacgcctttatgagcgcggatcttgttcaggatggggtgtttgcgaccgttggaaaagcgggagctgatgcgcgcgaaatcgaccggcgtgcggatgaaggccttgcgcatgctctgaccgtcggcagtgtagtagctgctgttgccttgcttgttcgtgtagcggacggcggtataggtcttgcctcggttggtgaagcgcgccgcgagaatgttgccggtaccgacggtttcaccgtcgaccttctttttctcgtataccacttcgaacgtgtcgcctttgcgaatatccagggcgaaatcgatgtcgtacccgaatacgttcgcgagatccatcgtcaggttatggctgaggccggcccgctttgcagccaggaacaggctgctctcgatacggccgtaggcgtatgacgtctcgatttccggtttgagcttttctttcttgagtacgtaaccggaatcggagcgttgcaggtggatgctttcaagcttgctcagcgggctgcgaagctgcaacaggttgccctgctcgtccagttcgaactcgaggcgctgaccgaccttgaggttggtcagctgtttggcgtctttgctgctggcgagcacgtcatgtacgacggatggctggagtccgaccttggcaaacacggtcgaaagcgtatcgccattagccacgacgacctgctttaccggtgattccgcctcagcgacctcggtaggctcgttggactctggcgatggcgagagttgttgcgcagcggcctggtcgatttgagcgaaaggcgtttggtcgtcctcggcggatagctctggctcgggtgcatcggcgttgaattcggccgcagagtcgatgcgaaggtcaagaaaggttttcttggcttcgacttcgcgggaggggaacacaagaagtgccaggctcagaagcgcagctacaccgcttgcagccaggagatggctcttcgggtagagaggtgctttcgattttgaataggtcattagaagtctggagatgtctggcggtgttttgtacaggaaaaatatctgtctaaaatataaccaaagcctcgctgaggcaaccctcgcgttcttttgcggcttgccggtttgcgttcggcaccgttgaattttctcggcattcttgtaaggttgaccgcctttatttcctggtgtggggccttcaatgaagtcggttcaagagcagctgtcagtgatcaagcggggcgctgacgaagtgcttgtcgaggcagagttgatcactaagctcgagcgcggcctgccgcttcgaatcaaggccggcttcgacccgacggcgccggatcttcatctcggtcataccgtgcttataaataagctgcggcaattccaggatctgggccatcaggtcgtctttcttataggtgacttcacggggatgattggcgatcccagtggtaaaagtgcaacgcgacctccgctaacacgcgatcaggtgctggagaacgctgagacctataagagccaggtattcaaaattcttgatccgaccaagaccgaggttgcgttcaactcgtcgtggatggatcagctgactccttcagacttcatacggttggcttcgcaatacaccgtcgcgcgcatgctcgagcgtgatgatttcagtaagcgctattcgactaatcagccgatagcgattcacgaatttctgtatccgctcgtccagggttatgactctgttgcgctgcgtgcggatgtcgaactcggcggtacggaccagaaattcaatctcttgatggggcgtgagcttcaacgctcctacggtcaggaatcccaatgcatcgtcaccatgccccttctcgaggggctggacggtgtgaaaaagatgtccaagtcgttggggaactacgttgggattcaggaagcgccgggtgttatgtatagcaagctagtatcgatcccggatgcgctcatgtggcgttactttgagttgctgagtttccgtgatatggaggaaattaaaggcttccaggcggatgtagagcgcggcgcgaatcctcgcgacgtcaagatcaagcttgctgaagagatcgttgctcgcttccatggcgaagaggccgcagcgacagcgcatcgctcggccggtaatagaatgaaagaaggcgagctgcctgaggatattccgcaaatccagcttcgctctgccgaagacatgtcgatcgctgcggtactgaatcgagcgggcttggtcaagaacgcggccgttgcgcgcgacttgctggcttccggtggggttcgggtcgacggtcaagtagttgatcgctcattcatgttcaagcttggaagcgctcatgtttgccaggctggaaagaaagcgttcgggcaaatttcgcttgaggctgaataaaagccg

SEQ ID NO: 16 - DNA, 544691 bp, Pseudomonas sp.
accgtcgaggttcctgatctgctcgatgatctccggcgcggtcttcgacggatggccaccgacctgcagcagggccaggaccagcgaggtgaattcgtgccccatcggaatgccggcgaagcgcaggctgatattgccgccgatgcggttgagcgcgaacgacggacgacgaacatcgtcgccatcggtgcgcagcgtgatcttgtcgctcaggctggtgatttcttccagcagctcgagcatttcctgggatttctcgccgtcaccgagggacgcgacgatctcgaacggctgggtgaccttttccaggtaggttttcagttgcgctttgagattggtgtcaagcatgcggaattcctctgcagctaaggttcataagttgatgaacacagcttagggggcagatccggattctctaaattgattaaaccaaggatgccgattgactcgtcctatggcgttccacgtggaacaaaaagcccggcttgcgccgggcttgtagatgttgcaaccacgagacgcttagaaatccaggttggatacggccagagcgttggattcaatgaaatcgcggcggggctcaactgcatcgcccatcagcgtattgaatatctgatcggctgcgatcgcgtcttcgatggtgaccttgagcatccgacgaactgccggatccatggtggtctcccatagctggtccgggttcatctcacccaaccccttgtagcgctggacgctatggcggcgcgtgccttcggtcatcaaccaaccgagtgcttccttgaacgtggagaccggcttcttgcgctcgccacgctgaacgtaggcgccttcttcaagcaggctgttcagcttctcacccagcaccgtaaccgtcttgtagtcgttgctgccgaagaagtcccggttgaaggtgatgtagctcgccaggccatgggaaacgatctccacttctggcagccacagattgcgctccttgtcctcgcgcaggctcgccttgtacgtcagaccggagcgctcgacacccttgagcagggcagcgtagggctccatccaggcctgcatggccgcctgatcgccgagttgctcgatcgagacccgaggcaggtagatgaagtgctcggtaagctcctgtggataaagacgcgaaagcctatccagcgtcttcatcacggtacggtaatcgttaaccaaccgctccagcgcttcgcccgacaggccaggagcgtgctcgttgacgtgcaggctggcatcctcaagcgccgactgggtgaggtattcatccatcgcctcgtcgtccttgatgtactgctcctgcttgccgcgcttgaccttgtacagcggaggctgagcgatatagacataaccgcgctcgatcaactcaggcagctgacggaagaagaaggtcagcagcagggtgcggatgtgcgaaccgtcaacgtcggcatcggtcatgatgatgatgttgtgataacgcagcttatcgatgttgtactcttcgcgaccgatgccgcagccgagcgccgtgatcagcgtgcccacttcttgtgaggagatcatcttgtcgaatcttgccttctcgacgttgaggatctttcccttgagaggaaggatggcctgcgtcctgcggttgcggccctgcttggcagaaccgcccgcggagtcaccctccactatgtagagttcggagagggcagggtccttctcttggcagtcggcgagcttgccgggcagcccggcgatatccagggcgcccttgcgacgggtcatttcacgcgccttacgcgcagcctcacgcgcgcgtgccgcatcgatcatcttgccgacgacggccttcgcctcgttggggtgctcgagcaggaaatcggcgaaatgcttgcccatttcctgttctaccgcggttttgacctccgacgagacaagcttgtccttggtctgcgagctgaacttgggatccgggaccttcaccgaaataatcgccgtcaggccttcgcgcgcatcgtcaccagtggtcgacaccttgtgcttcttggccaggccttcctgctcgatatagttgttcaggttgcgcgtcagtgcagaacggaaacccgccagatgggtaccgccatctcgctgaggaatattgttggtgaagcagagcaagttttcgttgaagctgtcgttccactgcaacgccacttccacaccgacgccatcgtcgcgctgaacgttgaagtgaaatacctcgttcaccgccgtcttgttggtgttgaggtaggcgacgaatgcgctgagaccgccctcgtacttgaacagctcttccttggcgttgcgctcgtcgcgcagcacgatacccacgccagagttcaggaacgacagttcacgcaggcgcttggccaggatgtcccagctgaaatggatgttctgaaaggtctcggccgagggcttgaagtgaatctcggttccggagtcgccggtttcgccaaccgcagccaacggcgcttgaggtacgccatgacggtaggtctgctcccagaccttaccctcacgacgaatcgtcagcaccagctcctcggacaacgcgttgactaccgaaacacccacgccgtgcaggccaccggaaaccttgtacgagttgtcatcgaacttaccgcccgcatgcagcacggtcatgatgacctccgcagcagacacaccctcttcatggatgtcgaccggaatgccgcggccgttatcgcgtacgctgatggactcgtccacatggatagtgatgctgatttcactgcagtggccggccagcgcttcgtcgatcgagttatcgaccacttcgaataccatgtggtgcaagccggtcccgtcgtccgtgtcgccgatgtacatgccgggacgcttacgtacggcatcaagacctttcagaaccttgatactggacgaatcgtacgtgtggttttcgctcatgccttcactcccgaggggccgtggacttgggctatcgcaccgtgttccacgtgaaacattgagaccggcgtatcttcacgccagccttctcgcaatacgttcgaatcgacgcaggtaatgaaaacctggcaattcagctgttccagcaaccggcacaacgcaagccggtgttggtcgtccaattcggacgggaggtcatcgaccagataaatacactgaccgcgcttcgtttcgctcaccagatgcccctgggcgatccgcagggcacagaccaccagcttctgctgaccgcgtgataacgtctctgctgcgttatggttagcgatccgcaaccgcaggtcggcgcgctggggccctgcctgggtatgtcccatcagcctgtcccgctcgatcgaagcagccaaaacctcagccagaggacgctctttgtcccagccgcggtagtaactcaactgaaagccttcaagcgacaacagcgaagccaaggtacgttcgaataccggcttcaaggcctgtatgtatgcccgccggtagccatcgatttcatcgctcgcggcactgagctcgcggctccacgccgcttgcgaagcggcgtccagtgtaccacgccgcagccaggagttccgttgtcggagtgcctgctggagcctttgccaggcctgcaagaatcggggttccacgtgaaacacaccccaatcgaggaactggcgtcgaagcttgggcgcaccttcgagcaaacggaaactgtcaggattgatgagctgcaagggcaacgcgtcggccagctcagcggcgcttcttacgctctggccgttgatgcggatgcgcacttcgccatttcgatctcgagatatgccaagcgcgctggactgctcctgcgacagctcaacctgtccgaagaccgtacagctactttgttcgtggctgatcaccggattcagacgggtgctgcggaaagagcgggccataccgagcaggtgaatggcttcgagaaaactggttttcccgctgccgttgtcgccatgaaggatgttgatgcggggggaggggtttaacgtcaccggctgcagattgcgaatgccggtgacggagatacggctaagtgacattcagtagtgcgttacaaacgcatcggcatgacgacgtacgccgaatcgtcgttatcgaactcttgaaccagcgcgctgctgttggcatcggacagaatcagtcggacctgatctgtggtcatgacgcccagcacatcaagcaggtagctgacgttgaaaccgatttccaacgaacttcccgaatagtcgactgcaacctcttcttcggcctcttcctgctcggggttgttagcctgaatcttcaacaacccgctctcaagctgcaggcggataccccgatacttttcgttggacaagatcgcggtgcggctgaacgcttcgcgcaacgtctgccgctcacccaccaccagcttgtcaccgccgcgcggcaacacgcgttcatagtcggggaacttcccatcgacgagcttcgaggtgaaggtgaactcgccggtcgtggcgcgaatatgatgctgccccaagacaatagcgacttcgccatcctgatcggtgagcagacgcgccaactccagaatgcctttgcgcggcacgataacctggtggcgatcgggttgttcgataccggcttgcatggagcacatcgccaagcggtgaccgtcggtcgcgaccgctcgcaacatcccgctggaaacctcgatgagcatgccgttcaggtaatagcgaacgtcctgctgggccatcgcgaagctgctgcgctcgatcagacgacgcatcttgccttgattgacgctgaagttcagcgagcccgggccctcttcgaccgtagggaaatcattggccggcaaggtggacagcgagaaccggctacgcccggatttgatcacgaccttctggtcgtccaaacgaatgtcgatcagtgcatcgggctgcaggctcttgcagatatccatcagcttgcgcgccggtacggtgatctcgccaggctcggacgcatcctccagcgcaactcggccaaccagttcgacctcaaggtcggtaccggtcagggacagctgatgatcctgcacaaccagcaagacgttggacaacaccggcaaggtctggcgccgttcgacaacaccggcaaccaactgcagaggtttcaacagggcttcgcgttgaatagtgaaatgcatggtctggtcccttgcctattaattggccgcagtctgttaggtcgtcaaagtgcgcagcaggtttttgtaatcttcacgaatatccgcatcaagctcgcgaagttcagcaatcttacgacaggcatgcaacaccgtcgtgtgatcccgcccgccaaaggcatcaccgatttcaggcaggctgtggttggtcagctctttcgacaacgccatcgcaacctggcgcggccgcgccaccgagcgcgagcggcgcttggagagcaggtcggaaatcttgatcttgtagtactcggctaccgtccgctggatgttgtcgacgcttaccagcttatcctgcaacgcgagcaaatccttcagggattcgcggatgagttcgatggtgatatcacgccccatgaagtgcgcatgggcgatcacacgcttcaacgcgccctcaagctcgcggacgttcgagcggattcgctgagcaatgaagaatgccgcgtcgtgtggcaagtcgacattggcctggtccgccttcttcatcaagatcgccacccgcgtttcgagttcgggtggctcgacggctacggtcagaccccagccgaaccgcgatttcagtcgctcctccagcccatcgatttccttcgggtatcgatcactggtcaggatcacctgctgcccgccttcgagcagggcattgaaggtgtgaaagaactcctcctgggatcgttctttcttggcgaagaactggatgtcatcgatcagtagcgcgtccacggagcggtagaagcgcttgaactcgttgatcgcgttcagttgcaacgccttgaccatgtcagccacaaaacgctcggagtggagatagaccaccttggcgttggggttctttttcagcagatggttgcctaccgcgtgcatcaggtgcgtcttgccgagacctacgccgccataaaggaacaacgggttatagccatgcttcggattatctgcgacctgccaggcagcggcacgtgccagctggttcgacttaccttcgacgaaattctcgaaggtaaaggtgcgattgagatagctggtgtgcttgagaccaccttcgacctgtacgttgcgctcggcacgcgccggagcaacggtaggggaggcctcgaccgcagccatgaccggagcttccgccggcccagcttgcgggggagcggcggcggcaggcgcgccgaccggctgctggttgcgagtcgccgacgccaacggctgcggcgcagccgccgtacgcttgctaccgatcagcaaggacaacgacggcgccaagccggtagcgcgctccgacagcagctcgagcaatcgggacaggtacttttcattcacccaatcgagaacgaaacgattcggcgcgtagacccgcagttcgtccccttcggcctcgacctgaagcggccggatccatgtgttgaattgctgggccggcagctcatctctcaagaggtcaatgcattgctgccaaagttccaccgacacggaatctcctagacgctgtcgagctttaaacggcagccattgtagcctccagacgggcagttatccacaaagcgaagccttttatctcggtaacagacagatccgagaccgctggttcggtgtacggagggctgttgataaaccgccttgaaggcttaggaaaacgctgtggattgctagaacgaaaccgcggttgtggataaaagcacaaaccgtccacaggaaacccaagccatgcccaccgtgaacgcaccgtttccacagaaggtttcgcctctaacgcaacgcccgtagtgcgcggcctacaagcttctatccacagataaccggacatacatatataagctctgcattaagaaagctttaacttcttttctttctatttattttctccgtctagggtgctggttggaaattgacctggcgacgcagcttctctacaatcgccggtctcttaaaagggggccattccggcccgcaacggatcaccaggtaacgcatcatgaaacgcactttccaaccaagcaccctcaagcgcgctcgcacccacggtttccgtgctcgcatggctaccaagaacggccgcgctgtcctgtcgcgtcgccgcgccaaaggtcgtaagcgcctggcagtctgaacacgtcggaacaggtagtgagtcgagacttcggtcgggaaaagcgactgctgaccccgcgccagttcaaagcagtcttcgactctccctccggcaagataccgggcaggaacatcctgctcctggtacgcgagaatggactgccgcatccccgtatcgggctggtgatcggcaagaagagcgtcaagctcgcggttgagcgcaatcgcattaagcggcaactgcgtgaaacctttcgtctccaccagacggaattgacggggtgggacatcgtggttatctcgcgcaagggattggctgatctggataatcccgaactggcacggcaattcgccaagctctggaggcggttgtctcgtaccccgtcccaggccgccagccaaccggaacagggcaagcccgtccatgcgtaaactggccttgatcccgatccggatctaccgctatgccatcagccccatgatggcgagccattgtcgtttctaccccagttgctcctgctacgcacaagaggccatcgaacgtcatggcctgctgcgcggtggctggctgagcctgagcaggcttggccgttgccatccatggaatccgggcggctatgatcccgtgccttccaaccacacctccaattcatcttcgatgaccgagtaaccatggatatcaaacgctcgatactgcttgtcgcactggcagtcgttgcctacctgatggttttgcagtggaaccaggactacgggcagaccgtgatccccgacgaggcgcgccaggagcaagccccgtcttcgcaggtgccggctactcccgcacttggcgaaaattcagctggcacgcatacggacataccagccgttggcgaagggcaggctgccagtgcgcttccggacgctcagccgagttcacagctgattcgggtacgtaccgatgtgttcgatatcgccatcgaccctcgcggcggcgacatcgtcgatctgcgtctgcccaagtacccccgtagccaggatcgtcccgatgtgccgttccagctgttcgagcgcagcgccgaacgcacctacgaagcacagagcggactgattggcgatggaccggacaaggccagcgggcgtccgctgtacagcagcgagcaatcgcaatatcagctcagcgaaggccaggatcagctggtcgtcgatctcaaatacagcgaagacggcgtcagctacaccaagcggttccgtttcgaccgcggcgactacgatttcaacgttgcctatctgatcgacaaccagagcgacaagccctggaccggccatatgttcggtcagctgaagcgcgacagcagcaaggatccgtcatcgagcaaggccaccggcaccgcgacctacctgggcgccgccctgtggaccaaggacgaaccctacaccaaggtctccatgggcaacatggatgacaagaacctgaagaaaaccgtcgaaggcggctggatcgcctggttgcaacactatttcgtgaccgcgtggatcccgccggccgaccagaccaaccaggtccagacgcgcaaggatagccagggcaactacatcatcggctttaccggcccggccgtctcggtcgcacccggcagtcagggcgagacatccgccaccctgtatgccgggccgaaaagccaggatcagctggaagagctgtcccctggactgcgcctgaccgtcgactacggcattctctggttcatcgcgcaaccgatcttctggctgctgcagcacatccatgcgctgcttggtaactggggctggtcgatcatcgcgctgactgtgatcatcaaactggccttcttcccgctgtcggcagccagctacaagtccatggcccgcatgcgtgccgtgtcgccgaagatgcaggcgctcaaggaacagttcggcgacgaccgccagaagatgtcccaggccatgatggagctgtacaagaaggaaaagatcaacccgctcggcggctgcctgccgatcctggtgcaaatgccggtgttcctgtcgctctactgggtgttgctggaaagcgtcgagatgcgccaggcaccctggatgttctggatcaccgacctgtcgatcaaggacccgttcttcatcctgccgatcatcatgggcttgaccatgttcatccagcagcagttgaacccgacgccgccggacccgatgcaggcgaaagtgatgaaactgctgcccatcatattcaccttcttcttcctctggttcccagctggtctggtgctgtactgggtcgtcaacaactgcttgtcgatcgcacagcagtggtacattacgcgcaagatcgccggaaccaccgcgaccgcgagctgattccgccgagctatacagaacgccccttgattggggcgttttgctttttcgatccgcctgggagagagccgcatgagccaagatcgcgaaaccattgccgcagtcgctaccgcgcccggacgaggtggaatcggcgtggtgcgtgtttcggggccccgagcaaaggccgtcgcaatcaccctcagcggacgggaaccgatgccgcggtacgcgcattacgggccattccactccgatgacggcgaggtgatcgatgaaggggtgatgctgttctttccaggccctcattcgtttaccggtgaagacgtactggagctgcaggggcacggcggccccgtggtcatggacatgctgctgcagcgatgcgttgaactcggcgttcgcttggcacgcccgggtgaattcagcgagcgggccttcctcaacgacaagctggacctggcccaggcagaggctatcgccgacctgatcgaagcgagctcggctcaggcggcacgcaacgccgtgcgctcgctacaaggtgatttttcccgtcgggtgcatgcactgaccgaacagctcatccagctgcgcatttatgtcgaggcggctatcgatttccccgaggaagaaatcgactttctcgccgatggccgggtgctcgccttgctgcaggcggtccgacgtgagttgcaaatggtcatccatgaagccgggcagggcgcgctgctgcgtgaaggcatgaacgtggtgatcgccgggcgccccaacgcgggcaagtccagtctgctcaacgccttggctggacgcgaagcggccatcgtcaccgatatcgctggaaccacgcgcgacgtattgcgcgagcatatccatatcgatgggatgcctttgcacatcatcgataccgccggcttgcgtgacaccagcgaccaggtagagcgcatcggggtggagcgagcgatcaaggccatcgaggacgccgatcgagtgttgctggtcgttgacgccagcacagcggacgacgacggcgaaaggccggaatttctctggttcaagccgaatcatgccaagaccacccttatccgtaacaaggcagatctgactggcgaagctgctgagctgagcgtcgccgcggatggctttaccaccctcagcctctcggcccgctccggtgaaggactcgagctgctacgtgaccacctcaagcgctgcatgggctacgaccagacctccgaaagcggcttcagcgcgcgtcgccggcacctggacgcattgcacaagaccgccgagcacctcgatcatggccatgcacagctaaccctcgccggtgcgggcgagctgcttgccgaagacctgcgccaggcccaacaaacgctgggcgagatcaccggcgccttcagttctgacgatcttctcggtcggatcttctccagcttctgcatcggcaagtagcctcgccacatcacatgccgcctgccgacggcatcccccctctggtaatcgctcgaggctgagctgggctagcgcttgccttttgcatcgcgcctgtcccgcttccgttggcctacagctaccccttcgcatcctctgcttgagtatcaaattcctctcgcagcgtctgcctgagccttgtggaaaacccagcgtaaggtcggtccataaacctatggataacctggcatcgattcgctctgtggataactggcagttccatacacagggtattaacggttagcacacggccaaagctcagcttcagcacaggctttctatcgcttgtaatcgagttgatacggggccttcagcgatctatccacagaaatccggtcaccatctataaacataaaaataagctttaaagacattttctttatttttctatatctaccgatcgattcgaacctgaccgtacgattggtcattttttatccagagcccttctttcaggaacctgcaacccctatacttgcgcgtttcccagaactcatctgaacaggcacgaggtgcgtggtggatttcccttcccgttttgacgtcatcgtcatcggcggtggccatgccggtaccgaagcagccttggcggccgctcgaatcggtgtgaaaaccctgctgctcacccacaatgtcgagacactcggccagatgagctgtaatcccgccattggtggtatcggcaagagccatctggtcaaggaaatcgacgctctcggtggtgccatggcgaccactaccgacaagagcgggatccagttccgcgtgctcaacagccggaagggtcccgccgtgcgcgctacccgcgcgcaggctgaccgtgtgctgtacaaagccgctatacgcgagacgttggagaaccaggcaaacctgtggatatttcagcaggcagcggatgacctgatcgtcgagtcagaccaggtcaaaggcgtggtcacgcaaatgggactgcgttttcttgccgattcggtcgtattgaccaccggcacctttctcggcgggcttatccacataggcttgcagaattactcggggggacgcgccggcgatccgccttcggtcgcactggccaagcgtctgcgcgagttgcccctgcgagtcggtcggctgaaaaccggaacgccgccgcgcatcgacgggcgtagcgtggatttctcggtaatgaccgagcagcccggagacacccccatcccgccgatgtcctttcttggcgaagccgcgcagcacccgcgtcaggtcagttgctggatcacccataccaatgcgcggacccacgaaatcatcgcggccaacctcgatcgctcgccgatgtactccggggtgatcgaaggcgtcgggccgcgctattgcccctcgatcgaagacaagatccatcgtttcgccgacaaggagagtcatcaggtcttcatcgaacccgagggtctgacgacgcacgagctgtaccccaacggtatctcgacctccttgcccttcgatgtgcagctgcagatcgtccagagcattcgcggcatggagcacgcgcacatcgtgcgtcccggctatgccatcgagtacgactacttcgacccgcgggacctgaagtacagcctggaaaccaaggtcatcggcggcctgttcttcgccggccagatcaacggcaccaccgggtatgaggaagctggcgcgcagggactgctcgccgggaccaacgcagccttgcgcgctcagggcaaggacagctggtgcccgcggcgggacgaggcctaccttggggtgctggtcgacgacctgattaccttgggtacccaggagccctatcgcatgttcacgtcgcgggccgagtaccggctgatccttcgcgaagacaacgccgatctgcgcctgaccgagaagggccgggaattggggctggtcgatgatgtccgctgggccgccttcgagcgcaagcgtgaaagcatcgtgcgggaagaacagcgactgaagagcacctgggtacgtccggggacaccgcaaggcgacgccattgccgcgcgtttcggaacaccgctgactcacgagtacagcctgttgaatctgcttgcacggccggagatcgactaccgcagcctgatcgaactcaccggcatgggcgtcgaggatgcgcaggttgccgaacaggtcgagatcaagaccaaatatgccggttacatcgatcgccagcaggatgaaatcgcccgcctgcgcgccagcgagaacatcacattgccggcggatctggagtactcgagcatttccggcttgtccaaggaaatccagcacaagctttccctggcacgccctgaaaccctgggtcaggcgtcacggattcccggtgttacgccagcggcggtgtcgctactgatgattcatctgaaaaaacgcggcgctggccagaaactggagcagagtgcctgatggcagccgaatacgagcgctacgctgaagaactccgccagggcgcggcggcgctgagcgtcgagctgagccatacccagcaggagcaaatgcttgcctatctggcgctgctgaacaagtggaacaaggcttacaacctgacagccgtgcgcgatccggccgagatggtctcgcggcacctgctcgacagtctcagtgtcgcgccgcacgtgcaaccgggcggttcgagttggctcgatgtgggcagcggcggcggaatgcccggtattccgctggccatcctgtttcccgagcgacgcttcaccttgctcgactccaatggcaagaagacccgctttctcatccaagtcaaacttgagctgaaactcgccaacgtcgaagttgtccacagccgcgtcgaacagttcagaccggccgagccgttcgcgggcatcacctcgcgagcgttcagttcgttggaggatttcgccaactggacgcgtcacctcggcgatctcgatacgcgctggttggcgatgaaaggtgttcagcccgacgacgagcttcaggcactgcccttggatttcaaggtggagcgctgcctggttctcaaggttcccggttgccaagggcaacgccatctgttgatactgcgccgcacttcatgactccggacagacactgaccatggctaaagtatttgccatcgccaaccagaagggcggtgtcgccaagaccaccacctgcatcaatctggccgcctcgctggtagcgacgcgccgccgtgtgctgctcatcgatcttgatccacagggcaacgccaccaccggcagtggtgtggataagttgagcctggaatattcgatctatgacgtgctgatcggcgaatgcagcctggtcgatgcgatgcagttctccgaacatggcggctatcagttgctgccggccaaccgggatctcacggccgccgaggtggccttgctgaaattgccggccaaggaaaaccgtctgcgcgaggccctcgcgccggtgcgtgaaaactacgactacatcctgatcgactgccctccctcgctgtcgatgctgaccatcaacgcactgacggcggcagacggcgtaatcattccaatgcagtgcgagtactacgccctggaaggcctgaccgacctggtcaactccatccagcgcattggccaggcgttgaatccgtcactgaaaatcgagggactactgcgcaccatgtacgatccgcgcagcagcctgaccaacgacgtcaccgagcagctcaagacgcattttggcgagaagctttacgacacggtcatcccgcgcaatgtgcgcctggccgaagcgcccagccacggtatgccggcgttggtctacgacaagcaatcgaagggcgccttggcctatctggcgctggcgggcgagttgtcgcgccgccagcgccgagctgcccgcagcgtaaccgcataaggaaattttcatggcgaccaaaaaacgaggcttgggacgcgggttggatgcgctgctcggcggcgccaacgtagcggcggtgcaggaagaggccgctcaggtcgatcgcagtgagctacagcagttgccggtcgacatcattcagcgtggcaagtatcagccgcgtcgcgacattgaccccgccacgctcgatgaacttgcccattcgattcgcagccagggcgtgatgcagcctatcgtcgtgcgttcgatcggctcgggacgttacgagattatcgccggtgagcggcgctggcgcgccagtcagcaggctggtctggacaagatccctgcaatcgtccgcgaggtttccgacgaagcggccatcgccatggcgctgatcgagaacatccagcgcgaggacctcaatcccatcgaggaagccgtggcgctgcaacggctgcagcaggaattccagctgacccaacaacaggtcgccgacgcggtgggcaaatcgcgtgtgaccatcagcaaccttttgcgcttgatcgccttgccggacgagataaagacgctactgtctcatggcgatctggaaatgggacatgcccgtgcgttgctgggattgccgggcgaacggcaggttgaaggtgcgcggcacgttgtcgcacgcggtctgaccgtacgccagaccgaggccctggttcgccagtggctgagccagaaagaagacgacaaaagcgcgcccaagagtgatccggacattgtgcgtctggaacagcgactggccgagcggctgggctcgccagtgcagatcaagcacggcgagaagggtaagggacagctggtgatacgctacaactcgctggatgaactgcagggtgtgctagcccatatacgttgaaacaatttcacacggatggggttgtagtaatgcttggaattcactaccgaacggttgtacctgattcggccgccccatataatctgcgcgcatttttgaagacatgggcatggcgctaaatggcatgccggcgaaagccaagggaaaatattggtcggttccgtgcagaagcttttagccatccatcggatcgcggtctttccagttctgttggcgcagttggcgttgttgatcagcgcggcgatgttgctttggcagtgcgtggatcctgtcgccggctattctggtttgctcggcggcctgatcgcttggttaccgaacatttattttgcccacaaggcctttcgctttagtggcgcccgtgctgctcaggctattgtccggtcattttatgccggcgaagcagggaaactgatctttacatcggcgctgtttgcgctggtattcacaggggtgaaaccactgaacccactttccttgtttggtgtgttcatactgactcagggagtcggctggttcgctcctctgctgattaagaaaagaatttcaaattgatccattgaggcaatcatggcagcagagaacgcttcgggttacatccagcatcacctatcgaatctgacctatggccgccttccgactggcgaatggggcttcgcccattcggccgaacaagccaaggaaatgggattctgggcgttccacctggatacgctcggtgtatcggtagtactcggtctgatattcatcctgctcttctggatggtggccaggaaggtaacgtccgggcagccgggtggcgcgcagaacttcgtcgaattgatggttgagttcgtcgacaacagcgtcaaggacaccttccacggtcgtaatccgctgatcgcgccgctggctctgacgatcttcgtttgggtgttcctgatgaacttcatggatctcttcccggtcgattggctgcccatgctggccgccaagatcaccggcaacgagcacctgttcttccgggtggttccgaccacggatccgaacgccacactgggtctggctctctctgtatttgccctgctgcttttctacagcgtcaaggtcaagggcatcggcggtttccttggcgaattgactctgcatccgttcagcagcaagaacatggccgtgcagatcctgctcgtgccgatcaactttcttctcgaattcgttaccctggtcgccaagccggtatcgctggcgctgcgtctgttcggcaacctctacgccggcgaactgatcttcatcctgattgccatcatgttcgcaaacggtctggtgctcggtgggctgggtattgttctgcagtgggcatgggcggtgttccatatcctgatcatcgtgctgcaggccttcatcttcatgatgctcacgatcgtctacctgtcgatggcgcatgaagataacgatcactgattcgattcgctttacctaaacccttaaccaatacgacataaagtcggaggaaagatggaaactgtagttggactgactgctatcgctgtagctctgctgatcggcctgggtgctctgggtacggcaatcggcttcggcctgctgggcggaaaattcctggaaggcgctgcgcgtcagccggaaatggttccgatgctgcaagtgaaaatgttcatcgtcgccggtctgctcgacgccgtgaccatgatcggtgttggtattgcactgttcttcaccttcgcgaaccccttcgttggtcaaatcgcaggctgattcgcttcccagtgaattggtttgacggacaacgaacgagcgaggtgttggcgtgaacattaatgcaaccctgattggccagtccgttgccttcttcatcttcgtgctgttctgcatgaagttcgtatggcctccggtcattacggctttgcaggaaagacagaagaagatcgcagacggcttggacgctgccaaccgcgcggctcgtgatctggagctggcccacgagaaagtggccgagcaactgcgcgacgccaaaggccaggctgctgaaatcatcgagcaggccaagaagcgcgcggctcagatcgtcgacgaagcccgtgaccaggctcgtgtcgaagctgaccgtgtgaaggctcaggctcaggccgagatcgaacaggaaatcaacggcatcaaagacgccctgcgtgcccaagtgggtagcctggcagtcagcggtgcggagaagatcctgggcgcatccatcgaccaaagcgcgcatgcggagctggttaacaaactggcagccgaaatttaagcgagggcgcgatcatggcagaactgaccacgctggcccgaccttacgccaaggctgccttcgagcacgcacaggcccatcagcagctggccaattggtcagccatgctcggcctggctgcagcggtgtcgctcgacgacaccatgcagcgcgtgttcaaggccccgcgtctgacgagtacagaaaaggccaccgccttcattgaggtgtgtggcgacaagttcgacgcccaggcacagaacttcatccaagttatcgccgagcatgatcgtctggcgttgttgccggatatctacgcccagttcgagctgtacaaggccgagcaggaaaagtcgatcgacgtggatgtcaccagtgccttcgcattgagcgatgaacagcaagacaaactcgccaaggttctcagtgcacggctcggccgagaagtgcgtctgcacgccgcggaagatgccaccttgattggtggtgtgctgatccgcgccggcgacctggttatcgatggctcagttcgcggcaagctcgcgaaactggccgaagcattgaaatcttgagtttgaaggggcagcagagctatgcagcaactcaatccatccgaaataagtgaaatcatcaaggggcgcatcgagaaactcgacgtcgcctcccaagcccgcaacgaaggcaccatcgtcagcgtttccgacggtatcgttcgaatctatggtctggccgacgtgatgtacggcgagatgatcgagttcccgggcggcgtctttggtatggcgttgaacctggagcaggattccgtcggtgccgttgtgctgggtgcgtacaccagcctggccgaaggcatgagcgccaagtgcaccggtcgtattctcgaagtgccggtcggtccggaactgctcggtcgcgtcgtcgatgcgctgggcaacccgatcgatggcaagggtccgatcaacgcggctgcgaccgatgcggtcgaaaaggtcgctccgggcgtgatctggcgtaagtcggtcgaccagccggtgcagaccggctacaagtcggtcgatgccatgatcccggttggccgtggccagcgcgagctgatcatcggtgaccgtcagatcggtaagacagccctggctgtcgacgccatcatcaaccagaagaacagcggaatccgctgcgtctacgtcgccattggccagaagcaatcgaccattgccaacgtggtgcgcaagcttgaacagcacggcgccatggctaacaccatcgtcgtggccgcttcggcttccgaatccgctgcgctgcaattcctggcaccctatgccggctgcaccatgggcgagtacttccgcgatcgcggcgaagacgcgcttatcgtgtacgacgacctgtccaagcaggccgtggcttatcgtcagatctccttgctgctgcgccgtccgccgggacgtgaagcctaccccggcgacgtgttctatctccacagccgtctgctggagcgtgcttcgcgcgtttccgaggaatatgtcgagaagttcaccaatggtgcggtcaccggcaagaccggctcgctcaccgcgctgccgatcatcgaaacccaggccggcgacgtttccgcgttcgttccgaccaacgtgatttcgatcaccgatggtcagatcttcctggaatcggcgatgttcaacgcaggcatccgtccggcagtcaacgccggtatctcggtatcccgcgtgggtggcgccgctcagaccaagatcatcaagaagctctccggtggtatccgtaccgctctggcgcagtaccgcgagttggcggcattcgcgcagtttgcctctgacctggacgaagctactcgcaagcagctcgagcatggtcagcgcgtgaccgagctgatgaagcagaagcagtacgcgccgatgtccatcgcggacatgtccgtatcgctttatgcagccgagcgcggtttcctgaccgatgtggcagtggacaaagttggcgccttcgaagcatccctgctgggctacttcaatcgtgagctggccgatctgatggccaagatcaacgtgaaaggtgacttcaacgacgaaatcgacgccgccatcaaggctggcatcgagaagttcaaggccacccaaacctggtaagccgcagcgggcatcgtaaggtgcccgcctgctaacccgataggtgtcaaatggcaggcgcaaaagagattcgcagcaagattgcgagcatcaagagcacgcaaaagatcaccagcgccatggaaaaggtggcggtcagcaagatgcgcaaggcacagcagcgcatggcagctagccgtccctatgcggagcgtatccgccaggtgattggtcatctggccaacgccaacccggagtaccgccacccgttcatggtcgagcgcgagatcaagcgcgtcggctatatcgtggtgagcagtgaccgcggtctgtgcggcggcttgaacaccaacctgttcaaggctctggtcaaggacatggcgaaagatcgccagcagggcgcggagatcgatctctgcgtgattggcagcaagggagcggcattcttccgcaactttggtggcaatgtcgttgctgcgatcagtcacctcggcgaagagccttcggtcaatgacctgatcggtagcgtcaaggtcatgctcgatgcctacctcgaagggcgtatcgatcgcctgtccgtggtctcgaacaagttcatcaacaccatgacgcaaaagccgacactggagcagctcgttccattggtggccgatccggatcaggagctcaagcatcactgggactatctgtacgagcccgatgccaaggagctgctcgacggcctgatggttcgctacgtcgaatcccaggtgtaccaggcggtggtcgagaacagcgcggccgaacaggcggcgcggatgatcgcgatgaagaatgccaccgacaacgctggcgagatcatcaaggacctgcagcttgtgtacaacaaggcgcgtcaggcagcgatcacccaagagatttcggaaatcgtcggcggcgctgccgcggtttaagaacggttcaaatattctgaggaaccaaagatgagtagcggacgtatcgttcaaatcatcggcgccgttatcgacgtggaattcccgcgtgacaaggtgccgagtgtttatgaagcgctgaaggtgactggcgccgaaaccactctggaagtccagcagcagctgggcgacggcgtggtacgtaccattgccatgggttcgaccgagggcctcaagcgtggcctggacgtcgatagcactggcgcaggcatccaggtaccggtaggagtgaaaaccctcggccgtatcatggacgttctgggcaacccgatcgacgaagcgggtccgattggcgaagaagagcgctggggcattcaccgtcctgcgccgacctacgccgaacaggctggctccaacgagctgctggaaaccggcatcaaggttatcgacctggtctgcccgttcgccaagggcggtaaggtcggtctgttcggtggtgccggtgtcggcaagaccgtgaacatgatggaactgatccgtaacatcgccatcgagcacagcggttattccgtgttcgccggtgtgggtgagcgtactcgtgagggtaacgacttctaccacgagatgaaggactccaacgttctcgacaaggttgccctggtctacggtcagatgaacgagccgccaggtaaccgtctgcgcgttgcgctgaccggcctgaccatggccgagaagttccgtgacgaaggccgtgatgttctgttcttcgtggacaacatctaccgctacacactcgccggtaccgaagtgtccgcactgctgggccgtatgccttcggcggtgggttatcagccgaccctggccgaagagatgggtgttctgcaagagcgcatcacgtcgaccaagaccggttcgatcacttcgatccaggccgtctacgtacctgcggacgacctgaccgacccgagcccggcgaccaccttcgcccacctggacgccaccgtcgtactgtcccgtgacatcgcctccctgggtatctacccggcggtcgatccactcgattcgacctcgcgtcagctggatccgaacgtgatcggccaggagcactacgacaccgctcgcggcgtccagtacgtgctgcagcgctacaaggaactgaaggacatcatcgccattctcggcatggacgaactctccgaagaagacaagcagctggtatcgcgtgctcgtaagattcagcgtttcctgtcccagccgttcttcgtggccgaagtcttcaccggttcgccgggcaagtacgtgtcgctcaaggacaccattgccgggttcagcggtatcctcaagggcgactacgatcacctgccggaacaagcgttctacatggtaggcagcatcgaagaagccatcgagaaagcgaagaaactgtaatcacccgtgcgtccggcaacggacgcgtaaaggatgcgggcaccgcccgcgtcctgtcacgtgaggcaagcgaatggctatgacagtccattgcgatatcgtcagcgcggaagcggagatcttctccggtctggtcgagatggtgattgcgcacggtaacctgggagatttgggtatcgctccgggccacgcgccgctgatcaccaacctgaagccgggtccgattcgtctgatcaagcaaggtggcgaagccgaggtgttctacatctccggtggcttcctcgaagtgcagccgaacatggtcaaggtcctcgccgataccgtgcagcgtgctgccgacatcgacgaagctgcggctcaggaagccctcaaggcggccgagaaggcgttgcacgagcagggagcggagttcgactacggttccgctgctgctcatctggccgaggttgcagcgcaactgcgtaccgtccagcagcttcgcaagaagttcggcggctaacgccagcggcttcaaccgcgttgggagaaagggtagccttggctacccttttctttttctccgttttgtttagcagtcctggccctcggctgaggtactgcatccggatcagttccggttaccgaaaggatctgcctcatgtcgctcgatatcgtcatccttgctgcgggccaggggacgcgtatgcgttccgcgctgccgaaagtcctgcatccggtcgccgggcaatccatgctcggtcacgttattgccactgcacggcagctctcgcctgatcggattcatgtcgtgatcgggcacggtgccgacgaggttcgccagcggctggccgccgatgatctgaatttcgtcgtccaggcagagcagctcggtaccggccacgcggtggcgcaggcgctgcccgccctgagcgccgagcgagtgttgatcctctatggcgatgtccccttgatcgaggtggccacgctcgagcggctcttgcacaaggtcggcgcgcagcagattgcgttgctcacggttaacctggacgatccgaccggctacggccgaatcgtgcgtgatgaccaaggcgtggtgcaggcgatcgtcgagcacaaggacgcatcggccgagcagaagctgatcaccgaaggcaataccggaattctcgctgtgccgggggagcgtctcggtgactggctcggacgcctctccaacagcaacgcgcagggtgagtactacctgacggacgtcatcgccatggcggtagccgatggcctggtggtcgccacggagcagccactggatgcgatggaggtgcagggcgccaatgatcgccgccagctcgccgaactggagcggcattaccagctacgtgctgctcaccggctgatggcccagggggtcacgctgcgcgatccggcgcgcttcgatctgcgtggcgaggtcactgtcggccgtgacgtgctgatcgacatcaacgtgattctcgaaggcaaggtcgtcatcgaggatggcgtcgagatcggtcccaactgcgtgatccgcgacagtacgttgcgccgtggtgcagtgatcaaggccaacagccatcttgaaggcgccgagctcggcgagggtgccgattgcggtccctttgcccgcctgcgtcccggcgcggcgctcggtgccaaggcgcacgtcggcaacttcgtcgaggtgaagaactcgcacctgggtgagggcgcgaaagccgggcacctggcctatctgggcgatgcggatatcggctcccggaccaacatcggcgctggcaccatcacctgcaactacgatggtgcgaacaagttccgcacggtgctgggcgaagacgtgttcatcggctccaacagctcgctcgtagcgcccgtgagccttggcgatggtgcgaccactggcgccggctcggtgatcaccgccgacgtgccggccgggaccctcgcattgggccgcgcccggcaggcattgatcgaaggctggcaacgcccgcaaaaaacgcgcaaataagccgcctggctcgtgcaagacgatgcccggccggcaagtggttatgcctgatagctaaagagatcgtacatctggccgatctcttaaggcataaccacaaaggacgtcgtcatgctcttgctcaatcgcctgtccatccagtggaagctcactctgctggccggtctctgcctcctgctgatcgtcggcttgctggtcggtgcttcactttatcaatcccgccagaccgttgccctcgtcaatgcctcgagcagtaccatgctcgaggagtccgcgcgcaacaacttgcaggcacgcggtctcgcgcaggcactgcgtatcgaacggcagttcaacgacgcctatcagtacgggctgggcctgacgcgtcaggtgttgtcgctgcgagagcagtccatcgaacgcatgtcgaatgccttcgagctgcgcgaggatttgcgtcatcagctggagatggcgctacaggccaaccccgacctgatcgggctgtacgccgtcttcgagcccgacgcgttggatgacaaggacggcatgttcatcggcaacgccgagatggggggcaatgatagcggtcgcttctcactgtactggtcgcagcgtacgccaggtcagctcaacgcggaaatcatgaacgaggacttgctcggcgatacgacgccagggatcagcggcgcgccttacaacgcctggtatgcctgcccccgcgatcgcggccgggtctgtttgctcgatccctatttcgacgaggtggacggccagcaactgctgatgaccagcatcgcctttccgctgatcgaagccggtaaggtgattggcgtcgtcggcgtggacatcagtctcgcgtcgctgcaggcattcagcgaacaggcgcatcaggacctttaccagggcgagggccaactgagcgtgatcagcccggccaaactcctgggtggtcacagtcgcaatgccggcctgctcggcaagccattgagcgaggcgtacggcgcggacagcgaggcaatcggccgtgcggtcgactcgggtcagaaggcgatgctccagaacggcgacatgctgcgggtgttgcagccggtgcaaccaatacccgaactcgctccctgggccgttctgctggaagtgccgcggcaggtgctgctcgcgccggcgttgcgtctcgagcagagcttgcagcttcagagtcgcaaggacggcatggtcgccttggccatcggacttgttgccgtgctggtggggctggcgttgatgtggctgaccgcgcgcggcgtcacccgaccgatagaaggcgttgcagccatgctcaaggatatcgccagcggcgagggtgatctgacgcgtcggctgcaatatgaccgccaggacgagctgggcgccctggccggctggttcaaccgtttcctcgacaagctgcaaccaaccatcgccgatgtgaagcggtcggtgcaggatgcccgcagcagtgccgaccagtcggccgtgatcgccagccagaccagtgccggcatgcagcaacagttccgtgaggtcgaccaggtggcgaccgcgtcgcaagaaatgagcgccaccgcgcaggacgtggcccgcaacgcggcccaggcggccgaagcggcacgcgacgttgatcaagccacgcatgagggcttgaggatcatcgaccacaccacgcacagcatcggcagcctggccaacgagctgaaccaggcgatgacgcaagtcgagagcctggccgcgagcagcgagcaaatcggctcggtgctcgaggtgattcgcgcaatcgccgagcagaccaacctgctggcactcaacgcggctatcgaggctgctcgggccggcgaggctggtcgcggttttgccgtggtcgctgatgaagtacgcaacctggctcagcgaacacaggaatccatcgaagaaattcgccaggtcatcgagcgtttgcagaatggaacgcaggatgtggtgacggccatgcagggcagccgcaatcaggcccagggcagcgtcgaccaggtcgggcaagcggtcgcggcgctgcgcaagatcggcgatgcggtggcggtgatctccgatatgaacctgcagatcgccagtgcagccgagcagcagagtgccgtcgccgaggagatcaaccgcaacgtggccggcatccgcgatgtcaccgagtcgctgtcgggccaggcggaggagtcagcgcaggtcagccaggcgctcaaccagctggccaataaccaacagacgctgatgggttatttccgtgtctgaggcgcgccagggttgactgaacgggtgctttaggttttgattcgcggagttttctttcgaatcgaaacttaagcatgtcgaaacgcaacactccgcagcgacgccacgccatactcgccctactcaacgagcagggcgaggtgagcgtcgacgagctgtccaggcgtttcgaaacctctgaagtgaccatccgcaaagacctcgcggccttggaaaagaatggcctgctgctgcgccgctacggtggcgcggtgcctttgccgcaggagctgatcggcgacaccagccaacccgtctcgccgtggaagcaggccatcgcccgagccgccgttggctgtatccgtgaacatgcgcgcatcatcatcgacagcggcaccaccaccgcggccatgattccgcagctgggccacaagcatggcctgctggtcatgaccaactcgttgagcgttgccaatgcgttgcgtgagctggagcacgagcccacactgctgatgactggcggtacctgggacccacattccgagtcgttccaagggcaggtggccgaacaggtgctgcgctcctatgacttcgaccagctgttcatcggcgccgacggcatcgatctgcaacgcggcacgaccaccttcaacgaattactgggcctttcgcgggtcatggctgaagtggctcgcgaggtcatcgtgctcgccgaatccgacaagatcggtaggcgcatacccaatctggagttgccttggggcgacatccataccctcattacggacgaacgcctcacggtcgaggcgcgttcgagcattcaggcccgcggcatcaagctgatctgcgcggccatcgaaacctctcaggagacctgatcatgtgtggcatcgtcggcgcggttgctgaacgcaacatcactgcaattctgctcgagggcctcaagcgcctggaataccgaggttatgacagcgctggcgtggccgtgctggatgccaaaggtcagctgcatcgcctgcgtcgttccggcaaggtagccgagctggagcaggcacaacagcaggaagagctggtggggcgtctgggcatcgcccatacccgctgggccacccatggcgccccctgcgagcgcaacgcgcacccgcatttttccggtgaagagctggcggtggtacacaacggcatcatcgagaaccacgaggccctgcgtgcgcaattgaaggcgctgggctacgtattcgtctccgataccgataccgaggtcatcgtccatctgctgcgccacaagctcgacgaggtcggcgatctgaccgtcgcgctcaagtcggcggtcaaggagttgcacggtgcctatggcctggccgtggtcaatgccaaacaacccgatcggctgcttgccgcccgcagtggtagcccactggtcatcgggctgggcatgggcgagaacttcctcgcctccgaccaactggccttgcgtcaggtgaccgaccgcttcatgtatctggaagagggcgacatcgccgagatccgtcgcgacagcgtgcaggtctgggatgtcgatggccagcccgttgaacgcgagagcgtgcagtatcacgagggcgccgaagctgccgacaagggcgaataccgccacttcatgctcaaggagatccacgagcaacccaaggtggtgcagcgcaccctggaaggccgtctcggcgatcaccaggtgctggtgcaagctttcggcccgcaggccgccgagctgttcgccaaggtgcgcaacgtgcagatcgtcgcctgcggtaccagctaccatgccggtatggtcgcgcgttactggctggaagagctggcagggatcccctgccaggtggaggtcgccagcgaattccgctaccgcaaggtggtggtgcagcccgacacgctgttcgtgaccatttcccaatccggcgagaccgccgattccctcgcggcgctgcgcaatgccaaggcgcgtaccgagcaggaaggccgctatctcgccagcctggcgatctgcaacgtcggtatcagctcgctggtgcgcgagtctgatctcaccctgctgacccaggccggaccggaaatcggcgttgcctcgaccaaggcgttcaccacccagctggtcggcctgttgctattgacgctgtcgttgggccaggtgcgcggcacgctggcacccgcgctggaagccgaactgatcgacgagctgcgccgcctaccgacccgcctgggtgaggcgttggcaatggataccactgtggaaaaaatctccgagcacttcgccgagaagcaccacacgctgttcctcggccgcggcgcgcagtatccggtagcgatggaaggtgcgctcaagctcaaggaaatttcctacatccatgccgaggcctatccggccggcgaactcaaacacggcccgctggcgctggtcgacgcggacatgccagtggtgaccgtggcgccgaacaacgagctgttggaaaagctcaagtccaacctgcaggaagtgcgcgcgcgcggcggcgagctgatcgtcttcgctgatcgcgaagcgggtatcgagaacggcgagggcacctttatcgtcagcatgccgcacatccacgatgtgctggcgccgatcctctataccctgccgttgcagctgttgtcctattacgttgcagtgctgcgcggcacggacgtcgaccagccgcgcaacctggccaaaagtgtgacggtggaataaccgccggctggcgcggtaaacacaccgcgcctgctgcggctccgcaatggcgagagccgttagcccgatattgacgttctgttccgcaaccggcgcgccccgcccgcggtgcagggcggccatggtatcaggatcctgccggtgcaagcgcctgcaattcgtgcgcggcggcgtgcaggaactgttcgaacgctgtgcgaaccccggccgacaattgagtgcggtctattgatggggcgtgctgttcgaactgctcgagaaagcgtggccacaatggggttccctggccatgggcgaggtagcgcagtggcgcgtcgcccaagccctctcggacacactgagacaggactcggccgcccagtcgcgagccttccagcacataggcgacaccccagtgccagccttcgtcccaacccggttcgacgcctagcggtgtcgggatgccgagttccagcgcctgtagatcctcacggagtgcggcgctgcggcggcgctcgggccagtcggtcaatagacgctcgatcccgccttgctccagcgccgcttccaggtcgaacagcgccatgccgtgggcgcgcaggaagcgtccatattcatgcctgtcgctcaggtcgaagcgagagaatgcagcgtcgacgcgctcgtgcagtggagcgctgctgtcacggacccattggcgcaacgataacatcaggccgggctcgcttcggtgagcgcgctacggaccttgctggccagctgttcctcgcggaagggcttctggatgatggtggtgctgcccatgccgagctcgcccagctccgcgtagccggtgatgaataccacgggtaatgccggataagtcgattgaacggcacgagccagttcgccaccgttcatgcccggcatggcgaagtctgccagcagcaggtccacggcggtgccgtcttccagcagctgcaaggccatgcgaccgctctccgcctggatcaccgagtaccccaggttgatcagcatctgtgcggtcacttcgcgcacgctgtggtcgtcgtcgaccaacaggacggtattggaggcgtcgccgatcggcgtgctggcctggcattccggtatgccaactggctgctccggcgcctgaacccggggcaggtataccttgacggtcgtgcctatgccgagctcggtctcgattcgcgcgccgccgccggactgcttggcgaagccgaacacctgagccagcccaaggccagagcctttgcccacctccttggtagtgaagaagggttcgaacgccttctgcaggacctcatcgctcatacccgagccggtatccctgaccgacagcaccacgtactcgccggggccgggttcttcggcccgtagcgcaggcgtgtcgatcaccgcatttgccgtactgagcgacagacagccgccagaacccatggcgtcgcgcgcgttgatggccaggttgaggatgatcatttcgatctgggtgggatcgaccaacgcgtgccagagcccggcgcaggtgtcggtctcgatggttaccgaaccgcccagcgtgctgtgcaacaggctgagcaggccgaccagggtgtcgttgaggtccaccgccttgggtgccagctgttggcgccgggcgaacgccagcagttggctggtcaaggtggcgccacgctcgccggaatcttgaatgtactgcaggcgagccagcgatttgcccagcggggcgccacgctccaggtcgttcttgaggaagctggcgctggtcagtatgaccgtcagcaggttgttgaaatcatgcgcgactccggcggtgagctgcccgacggcctccaggcgctgcatctgttgcagggtggcctcgatacgctcgcgctccttgatttgctccgtcagctcgcggttcgcggcggcgagtcggtcgaccgcggcaatttcactggtgatatcgcggccggccgcatacatcctttcgccttcgggcacggctgtccaggacagccagcgatagctgccgtcgcgatgctgcatgcggttgacgaagcggtcggtgacgttgccacggcgaagccgctcggtttcggcctgtgtcgaactgatatcgtccggatgcaccagcgcccagagtggttggtcgatgagggtctcgcgcgaccagccgagggtgctttcccagaccggattgagtgccagcacgcgggtttcgaagcacatcaccacgagcaggtcgcgcgacagttcccaggtacggtcgcgctcgcgggtgcgcgcctcgactcgctcaccgagcgcttcgttcatccgcttgagcgcttcggttgccagcttctgctcggtgacgtccatcaccactccgatgaagcgtgtgcgcttgccgttttcgaagaagccctggccgcgagtctccacccagcgtacccggccgtcgtcgagcaggattcgataatcgaccgtgaactccttgtcgtcgccctcggcgagggtgtcccagatttcttcgcgcaagcgctgccgatcatcgggatggcagagggattcgaataagcggatgtcgaccgttgcatcggccgccaggccgaacatggcgcggcagctgcgatcgaggatcaaggtgccgctctgcggctcgaagtcccacatgcccaggccagccgcatcgatcgccagacgggcgcggacttcgacctcacgcagcgcttcttcggcgcgcaggcgtctgcggcgttcccgcacttcgctcagcgcacgttccacggcgttgggcaggaacaccaggttctgctttagcacatagtcgatggcgcctgagcgcatcatgttgacggcgtgctcttcgccgaagacgccagacaggaagatgaacggcgtgtccggagcccgttgtctggcctcctgcaacgcctggctacccgagtaaccaggcaggacgtagtccgacaggatcaagtcgaagcgccgcgtttgcagtgcctcgaccacgccggcttgatcgaagacgatttcggtgtcgacgtcgtagccgtgtcgttcgagcgtcatcaatgccagctcggcatcgtgtgggctgtcttcgacgaacaggatgttgataggggttctcgatggcataaccatactgtcgcgggcttcgcactgcttggaagtgggctgtgggtcagcggcagccgtggcttgctcagctgggcttctcgtcaccatcgttgcgctctcgacgcggacgctgcagccgcaacgagcctgggggaggctcgttgagcaccgcccagaaaatgcccagatccgaaatggccgcgacgaaatcccggaattcgaccggcttgaccacgtaagcgttcaccccgagttcgtaagccctcatcagatccggctcctcgcgtgaggaagtcagcatgacgaccgggatgctgcgcagttcggcggtctcgcgaatggtcttcaggacttccagtccatcgactttcggcagcttgagatcgagcagcagcaccgccgggttgccgtcggcgcggccggtatggtcaccgcgacgcagcaggtaatcgagggcctcggcaccatcgcgcaagacaatcacctcgttggccaactggctgcgctcgagcgcgaccagcgtcagctcgaggtcgtgaggattgtcctccaccaacaaaatcggtttgagcatctagagtcctgtactaaatgggtgaggcatagctcagtcttggaagcgaaaagaagaaggtggcaccctggcccagctcgccggtggcccatacctggccatcgtggcgctcgacgatccggcgcacactggccaatccgatgccggtgccttcgaattcttccatccgatgcaggcgctgaaagaccccgaacagcttgctggcgtattgcatgttgaagcccacgccgttgtcgcggacataaacgatggtcgcttcggcgcgagcttcggcaccgatctcgatgacggcgtgctcgcgcgtgcggctgtacttgatggcgttcgagatcaggttgcgcagcgccatgtggatgaaggcggcgtcagcgaccacgatcggcatgggattgagccgccattctatctggcgaccttcacaatccggcgccatttcctgacgaatggactcgaccagcgcctgcaggttgacgtccgacaggcgcagcgccgcacggcccatctgcgaaaaactcagcaggttgtcgaccagcgtgccggcgaaacgggccgcgtcgctgatgttgtcgaggaaacgtagcccgcgatcgctgagcttgctgctttcgagctccccgagaagctccgcgtagccggcaatgtgccgcagcggtgcgcgcaaatcatgcgagacgctgtaggagaacgactccagctccttgttgctttcgcgcagctcgccggccagttgcgccatttcctcagccttgcgcaggacgatgccgagcacggcggtacgcagctccaacgccccttcgagttctaccggctgccagggctgcgcataacccctgaccgtctcgcgccagctttcgaaactgctgcgtggcgacaggccgccgtaaccgtcgctctgcttgtcctgctgacccgcccagttcaccgtctggattcgctcgcggcgaaaccacagcaggtaatgcgggtgtagccgcgaaattgatatcgccaggacgcctgcgcaatgcgaggccagttccggcaatgcgggaatgtcacgcgtcacgctatcggtactgaacaccagccgctcatgctgctgcgataaccattgcgtcagggccgtcagcagttcggcaggcggggtctcgccgacggtctcctggcactcgtcagagatgatcgcggcgccgtcggcatcggcgaagccgagcaccacagagggtagatgtctgaagccctcgatgacactgtcctggtcagccatcgccgacagcagctcaacggtctggcggcgcagttccagtttgcgctgggccagcaacgcggcttctttcgcttcgatctgcagcgacaggatgcgtcccagcagttcgcaggccgtacgcgtctggtagccgacgcggcgcggggccgcgtcatggcaggaaatcatgccccacagctggtcgcgaatgacgatcgagatcgacatcgaggcgagggtgcccatgttgcgcatgtattgcaggtgcaccggcgacacgctgcgcagcgcggcgaagctcaggtccagcggcttgccggtgtctggattgagcgccggtaccagcggggagggctgatagttggcgtcctgtatcacgcggatcaggttgttgcggtagagctggcgcgcttgcggtgggatgtccgaggcggggaagcacaagccgagatagcgcgggtagccctcgtcggcttcttcggccaacaccaggccgttgccctgagcatcgaagcggtaggccttgacccgaccgaagccggtaatgcgtttgacttcgcgcacggccagctggcagatgagttcgagctcctgcgcttcctgcagctgcaccacgaacgtccgcatcaatggatagagcgtgtcgtaggccttgccggaactgccagctgcctcgaactcgacgatcagctggcccgcgtaacggtgggccatcaaggcgaacgaaggacgatcgccgcgatccggcaacgtgaaactgatatcgctcagatgaaacggattgtggtcgtcttcggccagcgcggccaggcgctcggcgaagccgcattcgccgatcagctcggtgagcggacggccgagcaatgcctgggcgtcgatgccgagccattgcgagacgttgtcgctggcttgaacgatggtcagctgaggctcgcgcagcaccaacaagaagccgtgaggctggatgctgcctgggatatgtatgggttcttcgccacactgagcgatcgcgaggctgtggttttctgcggtggatgccacgatgtctcctaatcgagcccgggcgagcgggcgcggcgggcaggcatccttgcggttgtcaccggatgctgccagtcgtattgcggttgcatgacgccggcacaccggtttttcgagcggcggtcactttagcgcgactggtactggctagccaatgcgagggcttgtataaacggcgcattccggatgactgcagaagggggactgtcatggaagaggtgatcgagcaactgcgtgaactcaacgagccggtaccggtgccactggaactgccggacgatgaccgcctggtcgaggtcgaggaagaattgctgatcaatctgccgttcggcctgcgcgagttcctgctgacggtcagtgacgtcgtatatggccggttggaaccggttaccgctgtcgatccgcaatcgcacacctatctgccggaagtggcggcaaacgcctgggatgcgggcgtggcgcgcgacctgctgccgatctgccaggacgggccggattactacgtggtcgatctcgagggtgaggtcatgctcttcgacggcaacgagcacgagctgaccgacgagagctgggaatcggtgtggcactgggcgcgcgacgtctggctggaaagttgagcggcctggtcagggccggcgggcgcgtagggccgatgtccgttcggcaactgccggttgcggcggtctgccagcgggtgcaacggccatggtgacgctcggcaatctgttcatcttcctcttgctgctgacggccgccgcctggctttggcattcgcatggcatccgtgagcgcgcgctggcagcggtgcgccgccactgcgagaagatggatgtcgagctgttggatggcaatgtggcgtttcgccggctgggtgtgattcgcgacgcgcgggggcagtgccgtttcgcacggatctacggcttcgagttcaccgttaccggtgagcagcgccatcagggcagcatcgtcatgttcggcgcccgtccggggccgatcgagatggaggcgcatcctttccgtgcgccgccggattcgggcagggttatccagctggacgactggcgccgtcgcaacgagtgagcctgcgctagagccgacaggcggccatgtctgctttcaggcgttcttcatcctgcggttcagcgaagatcagttcgagcctcgaatccttgcgccattcgctgggcatgaaccgcatcggctcgccggccagcgcattggccgagtgccagccatcgggaccgtgcacaaccagcttcgcgcggcgccaagccaggctgccgagccactgggtgatgcgttgcggatcgaagcactgactcggatgccagcgccagccgatgctccagccgtcagcgctgccctgactctggcagacgggctgttgcggattcagccagacgccaccggctacgccggcagcagcgggcaagggcgctggaacgtcagcggccagaccggcgcggacgccgatgcctggcagctccgcgatcggcaggtcgccttcatgtgtccagcgcaggggtaacgccggcaacgacgcggcgaggcgctgacgatccggctgatccagctgttcgcacttgttaagcaccagcaagccactgctctgcagcgcctgttgctggctcggcggcaacggctcgccacgcgccagcgccgcggcgtcgagcacggtcacgcacggctgcaacgccagcacctcgtgccagggcggctcgccgagttgcgtcagcagttcggccggatgtcccaaccctgagggctctatcagcaagcgatccggtttggccttgcgtaacaagcggctcaagccgacctgaaacgggacgccgtttacgcaacacagacagccgccagcgacctcggccaggctgacccccgactcatcggtagtgagcagcgcggcgtcgagtccaatctggccgaactcgttgatcagcactgcccagcgttcatcggcaggcttctgcgccagcagtgagcggatcaggctggtcttgccggcgccgagcggcccgcagattacatgggtaggtatgtgggtcagcatatgcgccatggtgcgtattcggtggctgggttggaggtgatttcagggcctgcatgctagagtttcggcgggcagatcaagggtgcggttcgatgcgttcaatgtgttttctgttgctgtcgctgggcattgccggtcaggcgtgggccgagggctgcgttgtacacagccaggatgagcggatcgaggtaaagctctgccaacagaatcgcacgattccgaccgagctgttccgatccggcttttgccagcctcagctcaaggatcagcaggtcgaggtcaccttcgtcgagcagtgcccgaccggtgcgttcggcgtttgtcgcaacgcccaggtttccaatatgccctatcgccaggacatccactattacggggtcgccagtgacgcgcgtttcctccagccggcctgcgaacagaccagcggcggtgaatgggttaaggaataacgccggacaggatatccataggttccacgtgaaaccttgcgctacgtccgcggcttgagtgagccgcaatccttgcccagccatttcccacgggactgcatgcggctgttgccctgctgcgtgccgacccgatagtcgctttcgatcgtgctgaccacctcgcgctcgctgatcagccgggtttcgcccttgcccttggcgtccgggcaatcgaatgtgaatttccacaggctgtcggttcgttcgaccagttcctggctgcaaccaggttcgtcctgaaacggcagctcgcgtgatttcacctgcgcctcgctcaggcacatgcgcaccccgccagcgcctagctcgacgccttgggcagcgagcatgtcctgcatcattttcttctgctcaggcggcagccctttcatctgctcgaccatttccgccatgcccggcatctgcgtgccgtccacttcaatgttgtcgctggaaaactcccacagcccaggcagcatttccagcgcctgaacggggagcgcaccgagcagtaacgcagcggtacagaggggaatgatgggtttcatctcaagcctccaaagtgggtatgcagaaagcctagccgagtcagggaagtctgaaggctcttgagtaagcgcgatgaagtgcggaggggcatagctttgtgttgatgagaagcgttagcattaacgcctttcaaggcgaagggtacgaccatggcgaccgagggtatggtcaggcatccgctggtgcaccggctgtatgtcgaccatcagagttggctgaacggctggttgcggcggcagctgggctgcagtcagaaggctgccgatctggcgcaggacacttttgtccgcgtgctgagcaaagaccatggtctggacgccattcgtgaacctcgcgcctacctgcacaccatcgccaaagggctgctgatcaatcactggcgtcgcaagcagatcgagcaggcctatctggatgcgctcgccttgcagccggaggcggtcatgccgtcgccggaatcccaggcgctgactatcgaaacgctgatgcaggtcgatgcgatgctgacgcggctgccgcacaaggtgcgccgcgcattcctgctgtcgcagttgcatgggttgacctacgcggcgatcgccgtcgagctcgaggtgtccgagcggatggtcaagaaatacatggcgcaggccatgctgcattgcctgacgctggccgaggaggagccatgagcctcgattatcaggtgctgcaggcggcggcgcagtggtttgcggtgctgcagtccgattcggtcagcgaggccgaccgcgaggcctggcgagcctggctggccgcgccggaacacgcccgggcctggcggcgagtggagcagatcggtggacgcctgcaacctttggccggcgatcccttcagccccgcgaccacagctttgttgcgatctggacaacccactcgccggcaagcgctgaaaaccctgtcgatcctttgcggcggcggcgcgctggcgcttgtcgcgggcgcgatgccttggcgaagttggacggcggaccagcgcaccgccattggcgaagtgcgcgactggcggctcgatgatggttcgcggctgtggctgaacaccgacagcgcggtggatgtcgccttcgaagggcgcacccgtcagttctcgttgtaccgcggcgagctgctgatgcaggcggcggccgagccccgcccgctggtgttgcgcacggcggaaggcagcttgcggacgcacaccgccgcccggttttcggtagtgcaacgtgacggcagtacccagctcagcgtgttcgacggctcggtcgagatcatgcccagcgggcaacggcattcgcgcaccgtcatcagcggccgacagatcgccttcgatggccgtcacatcgagcccgaacgcgccgtgcagtcgggccgccaatcctgggccgatggtgttctggtggccgataacctgcgcctggacgcgttcgtcgctgagctggcgcgctatcgccagggttatctcggttgcgatccgcgtgtggcgggcctgcgcgtggtgggcgcttaccccttggcagacaccgatcgggtactggacgtgttggcggacacgctggcgcttcgcatcaaccgccgactgccgtggtgggtgagcctcgaacccgcgtaacgggctttcggtgttcattaacacgaatgcaaaaaattcttatccgcagttccctttttgcgatgccgctgggcataacggcaacgatcacgattttgccctcgcaaaaaaggatgactcatgcgctccatcgctcttccgttccgccgccccagtacgctagcccaggccgttcgcgccgccatgctctgcctgccgctggcaacgctcgccacctcgccggcagcctgggcacagtccgccagccagcaggcggtgcgcggctacgacatccccgccggtccgctgtccagcgcgctaagccgcttcgccggcgaagccggggtgatgctgtcggtcgatgcgcgcctgatcgaagggcggcaatcgggcggcctgcaaggccaatacggcgtcgaggaaggcttcgaagcgctgcttcaagggagcgggctgcaggcggtgcgcgacgagcgcggcacctactcgctggcgccgcgccaggagcaggccgggactgtcgagctgaagcccatggtggtcgaaggctttgccctgggtaacgccctgggcgagatggaaggctacaacgccacccatagtagcgtggcgactaaaacgagtatgccgctggtacgtacttcgcagagtgtttcggtggtgacgcgggagcagatcgacaaacagggctcgatgactgtcgcagaagcggtgcgctacaccccgggtgtgctcagtaatccctacggcaatacgcggcgctacgactatctggcaatgcgtgggatcaatgacgggtcggtggacaacatcatcattgacggcctgaagtccatgggcgacccgggctcgtacagcagcttgcagatcgatccttatttcattgagcgcatcgacgtactcaagggaccatcgtctgtcctttatggccgcagcaaccctggaggtctggcgtcgctgaccaccaagcggccgcaattcaccgaggccgcgcgcatcgatctctcctacggcagcaatgactataagagcctagggtttgatgtgaccgggccgctaaatgagaacatcgcttaccgcgtgctcggcgtatccgaggatgccgacagccaggtcgatcatgtcgaggagactcgctacgcgctgatgccaagcctggcgatctacctcaacgatgacaccagcctcaacctctatgcctatttgcagcacgatcccaacggcggctatcacggcagtctgccggcttccggaacgctggagaagcgcaacggagaacgactttccggcagctttttcgagggcgatccggatatcgaagagttcaagcgtacccagaagatggtcggctacgagttccagcaccgcttcaatgacgtatggagcgcgagacagaacttccgctatctggatgcagaagtcgaaaacagccaggtttggcagagcggctactatggtccggccagcaatcttctgtaccgtggcttcagcggaggcgaggaaagtctccacgcatggatcgtcgacaacatgctgcaagcggatttcagcaccggttcggtgctgcacacggtcgtggtcggactggattaccagtccaccaagaacaagacgctcgacgaatacgattacagcactgtcagcccgctggacatcgccaacccaatctatacaagtaacgacttggccggcctagccaccagcagtaacgcgcttcgccgacagaagcaggcaggcctctatgtgcaggatctgatcgaactggacaactggaacttctccttcggcctgcggcaggactggtacgacgtctcgatcgacgatgccatcaaaggcaaggatgcgaatcagggcgagaagctcagcggtcacgccggcgtgctctatgcgttcgacaacggcgtatcgccttacctgagctattccacctcgttcaatccgacctccaactattccagtggcgcccagatactcaagccgaccaccggcaagcaatgggaagcaggtgtgaagtttcagccagtcggccgtaatgatctgtacaccctgtcgtttttcaccatcgagatggagaatctcttcgccaaggaaaacagcctggtaactgacaacttttataaaggcgtcggcgggatgaaatcgcgaggtgtcgaactcgaagctcgggtgagcgtaacggagcgtctgcgcttgctgggaagtgtcacgctgaacgatgtcgaatacagcaagcactattttaccttcgacacgtccggtgccgtggtgaatgccaagggcaatacgccgtatcagacccccgagcgaatggccagtctctgggccgactataacttcgccgaaggtcttctcgccgggttgaacattggcggcggcgcgcggtatgtcggctatagctggggtaacgatgcgcatgacttcaaagtgccgtcctacactctgttcgatgcctctattggctatgacctgggcagattggggttgcccggcacctcggttcggctcaatgccaacaacctgaccgatgagtactacgttgcctcctgctacagcgcgtcctcgtgctatctgggtgctgagcgcaatgtcgtggcgaccatcactcatcagttctgatcgaagaactagccgctggctcaaaaggccggcggctttttgctatctgaaagacggaaaccgacgatgcgcccgattctcgttcttctgcaccgctatatcggcctggccacggcgctgttcctgtttctcgccggtgtcaccggcagcgttctggcctttcaccatgagctggacgagtggctgaatcccgagttctatcgcaccgaaagccgcggtcctgtgctggccccgggcaccctggtcgatcgtgtcgaggcggccaatccgcggatgcaggtctggtacatggagttcccggacgagccggggcacgccgcgttgatggcaatggtgccacgcaatgacccggcgaccggcaagccgtatgaagagcggccggtggtgcactatctcgacgccgtgaccggcgagccggtcgggacgcgctactggggcgagtgctgtttctcgcggcagaatctggtgccgttcctgctcgagtttcattacaacctgtcgctgccgggaaactgggggctctggttgatgggcatcgtggccatcttctggaccctcgactgcttcgtctcgctgctgctgacctttcctcgcgggcggccgttcttcggcaagtggtggacggcctggaagatcaagcgccagcgcctcaaccatgacgtgcatcgtgccggcggcctttggctgtggttgctgctcacgccggtggcggtcagcagcatcgcgatgaacctgcccgaacaggtgttcaaaccggtggtgtcgctattctcgccggtggagccgagcgtctacgcggcgcgcggcaagttgcccaaggatgagctgggcgtgacccagtacgacttccatcgggcctatgattttgccatgcagcacgcggccgacctggggctgagcgagccgatcggcgagctgtattacagcttcgagtacaacttctacggtgccggcttcggtgatcacgacagtgaccagggcaacgcctggctgttctttcatggcagtgacggcagtcgattgctggggcaggaaataccggggcagggcacgctgggtgagcagttccacatgttgcagccggcgatccatggcggacgaattctcggcttgcccggacgcatcctgatcgccgtcctcggcctggcgatcgctgtgctttcggcaaccggtgtggtgatctggtggcgcaagctgcgcgccaggcgcgtagcggccagcaagcgcaacgaggcgttgcaagcgatctgattggcgactatgacgttgagtcacgtagggtggatcacacttcaccgatccaccaacggccctcgcaaccctgtgtggctcaagccacggcgacagggctgcgaaggtgctgaatcaggaggagctgtccgcttgcacggcgcaactccagagctccagcgcgggccggtccgcttttggcgggccgagccattcgctcatcgcgtggcaacgctggtcgaaacacagttgaaaatcccctgcttcgggggttcgccccaagcgcagcggttgtaacggcgggagctggcgctggtagtgccaggtgccgtcacgcagttcggcgccatcggggatttccatcccggcaccagaacccttgacccgcgcctcaccgagcagcagcccgtccggcgtgacgcggtaatcttcttcccagcggatcttctcgatcgtgtgggtccaggccagggtgaagtcggctgtgggcacctgtgcccacaccaccccggccaaacccaggcagagaccgatcatgccagtgccggcccggcgcggcgggcccggacgatgtgttgggccagcagcaaggcaccgataccgaacccgatctcgtcggtgaccggcagcgccatgatcaatgtcacacccgcggcgaacccaagcacacgttcccaccaagccaacggccgctgtagatagccgatcgaggcgataccccacaggccgatggcgaacgctgccttgaccagcatataggcggtcatccacaggctgtcgccctgcagcatcagcgccgggttgtagaccgccatgaacggcaccacgaacccggcgatggcgatccgcaccgcccacaggctgattttcagtccggtctccttggcaatcggcgcggcggcgaagcaggccagcgcgaccggcggcgtcaggtcggcgaggatgccgaagtagaagacgaacatgtgcgagacgatcagcggcacgccaagatccagcagcgcgggcgcggcgatcgagctggtgatgatgtagttgggaatcgtcggaatgcccatgcccagtaccaggcaggtcagcatcgtcaggatcagcgagaggaacaggttgtcctggccaaccgccaggatgtagccggcaaaggtcgaagccacaccggtcagcgaaaccacgccgatgattacgccaaccagcgcacaggcgatgcccaccgggactgcatggcgggcgccctcgaccagcgcatgcaggcacaccagcagtgtctcgcggccgccctttatgaaccagcagaccgccaccagggccgcgatgacaccgaagatcaccccgatgcccagctggaagaatgcggcgcaaagcagccccagggcgatccagaaggcgattcgcaagccgaacgatgagaccttcaggatgattgccgagcccagaatcacgatggcagtcagcgacaggccgatgattccggcgaacatgggcgtgcgtccggagaacagcagccagaccagcaccaccagcgggatcagcaggtaccagcgttctttcacggccgccatggcgctggggcactgatccttcggcaggcccttgaggtcggcgcgcttggcttccagatgcaccatccagaaggtcgaaccgaagtacagcagggccgggatcagcgctgccttggccacttcgacgaagggcacgttgatagtctcggccatgatgaaagccacggcacccattaccggcggcatcatctggctgcccatgctcgccgtcgcctcgacgccgccggcaaacgcggcgcgatagccgaaacgcttcatcagtgggatggtgaactggccagtcgtcaccacgttggcgacgcctgagccggtgatggtgcccatcagcgccgaggacaccaccgacaccttcgccgggccgccgagcttgtggccgaacaggcccatggcgaaatcggtgaacagcttgatcatgccggcctgttcaaggaaggcaccgaacaggatgaacagaaagatataggtggcggacacgtaggttggggtgccgtacaggccttcggtgccgaacgccagctgattgaccaactggtcgaagccatagccgcggtgcgcgaggtcacccggcaggtactggccgagcaggccataggcgaggaacatcgcgcagatgataggcagtgcgatgcccatcacccggcgcgcggcctcgaacacgaggacgatgagcaccaccccgacgatgaagtcggccgtggtcaggtcaccggagcgctggatcaggtcgccttcgaaataccactggtagaacgccgtgcccatgccggccagcgccagcacccaggccatgggttgccaggggcggcccttgccatggagggggaagctcaggaacacgatcatcagcaagaaaccgacgtgccccgcccgcaggacctgactcgataccggatgaaacgccgccatgatgatctggtagatggaaaacatcagggcgacatagaacagcgccttgggccacccggcagggctgccgcccaggccttgttcttgttgtaattcgctcatgaagtgcctcgagctgataaagcgtggtcgcgtagagttgctaacaaaacctgccgtgaacacacgctggttttactagcatctctgcaaattgttcgggggatccggtggcgcgtacgggatgcactcgccaccggggtcggagcggctgctgccgctccggacgcactcagagtgcgccgacttccttgtagtagcgctcggcgcccggatgcagcgggatcggcagcgccttggtagcgttttccagcttgatgtccttggccgcggagtgagccttgctcagctgatcgaggttttcgaacagcagcttggtcatctgatacgccacgtcgtccgagacgccctcgtgggtcacgaggatgttggtgatcgccacggtcggaacgtctgcctcctgaccgtcataggtgccggccgggatggttgccgcctggtaggcgtcgttgccgatcttggtgacgacatcctgcggaatttccacgtagttcaacgccatggtcgaagacaggtcgcggatcgccgccatgcccaggccggccgactgcagggttgcgtcgagctgacggttcttgatcagttcgacggattcggcgaacggcaggtactcgaccttgcccatgtcctcgtagctcaggccggcggccttgagaatggcgcgggcgttgagttcggtaccggatttcggtgcgccgacggaaagcgatttgcccttgaggtcggccagcgtcttgatgccggactccttgctggcaacgatctggatgtagttcgggtaggcaccaccgatggcgcgcagtttcttcagcggggccttgaagcctgcatcttcgacgccgttccagccgtcagcgaccgagtcgcccagcgccaggcccagttcgccacggccggcttgcagcaggttgaggttttccaccgaggccttggttgcctgtacggaggttttcgagccctcgatgcctttgctgtacagctgcgaaatggccacgccgatcgggtagtacacgccgctggtgccgccggtcaggatattgatgaaggtcggcgcggcaaccgctgcggtgctggcggtgaaggcggcggcagcagcgagcaggccgagttgcttggtcaatttcatggtgtttctccgtttcgttgttattggtttcgcagaactgacgatagacgatcaaccgcagccattgtgcggcgacggacaagacggggcgagacacacacggttggccttggcagaaaaggcagaggtgcgctgtgcggcttttcttgtcgttgatcgcatcgggcccattgatgccagcacgaaccgtgccagtagcgatgatggctctggcgcatgccttgcgtcgccatttggcggcccgatgcgcggaaaactgccgatgcttgcgcagtgataggcggaaacttgcctatcgccacctggcgaagcgaagaaacctgccgggcgcgctggcgtcgcagtaaggacgcggtgcaacgaaaggggggcggcatggccagtgagatcagcggcaaggacctgggaatcgatatcgagaagggcgagggcgagctgttcaagtggttcatcgccagcttcctgttcggcaagcgcatccagcgggacatcgccgccgaagcctatcgggtgatcgtcaacgaacatggacgcgacacgccgggcaaacttggccattgcagcaggcgggagctggtgcgcatgctcggtgagggtcactacacgcgctatgacgagtcgactgccgaacgcctgctcaagctgtgcgccaagctcaacggtgaatacggcggcaagctgggcaacctccgcgaacagagcaaggaccgcagggacctggagaagcggctggccgagttcgaaggggtcgggccgaaaacggtggaaatcttcatgcgggaggccgggaaggtttggtgctgaacaggcgctgcatgccgtacggggctgccgcgatcagttgagcttgcgtcgcccggcgatccggttacagtggcgccagcgccccttcgaatgcctgccatgcgtgtcttgcttgccctgtccgtcctgtttctgtctgcgctggccgcagccggccccgcgccctattaccagtggcagagcaaagccgatggcaccgtcatctgccgacagacccctcccgggcatggctgggagctgctcaatggccaaccgtttcgcgacctcaactgcactcagccggccgctcacgtggaacgccctggcgcagtgcctggttttcgcccgcaaccgggccgttgagtcggatttcgccgccagcgcgaggcccaatgaccggcttcaagccggcctcatgatacgtggcactgggttggtctacagggcagatagcatcggtgtggttttgagaagctcgcggtcgagaccgctcccacaaaacgccggctcgacgtcgtcgttgccggtacaagaccagcccgccatcgatgctgcgtgggagcggttgaccgcgaatgactgatctgaccgcctacttcggcctgttcaccgccgcgttcgccgccgccacgctgataccggcgcaatcggaagccgtgctggtcggtttgctggtcaagggcagtgcctcgccgggcatgctgttggcagtggccacgcttgccaatgtgctgggctcgctgctcaactggctgctcggtcggatggtcgaacggctgggccacaagcgctggtttccggtcagcgaacagcagctggagcgggcacagcagcgctaccaccgctatggtcgctggtcgttgttgctgagttgggtgccgatcatcggcgatccactgacggtggtcgccggcaccctgcgcgaaccgctgtggagcttcctgctactggtgaccctggccaagggcggccgctacctgctgctcgccggcgtcaccctcggttggctgtaaaccgaagcggctgcagggagggcggccctatcgccgcggctggcaggtgcatgccgagcgtcactcaaaaggggatgcgggtttgcagcgcatagccgtcgagggcgggcaccatgctgagctggtatgcgggcggctcatcacgctcgagcagcagattgaaggcgaacgaggagacgaaattgcccagcgcgatgccggccagcacgtcggtcgggtaatgctgatcggcctctacccgggccagcccggttagcccatcgagggcgtgcagaccgatcttggcggcatcgcgcagggtcgggttcatgtcgatgtaatccaggttgcgccgcgtcatcgcggtttcggcagcgctcgtcgcgctgtggcgtgacggcatggcgtcgtcctccaccccatcggggcgttcacgcccggagattttcttgagtcgcccggtcagctcatcgacgctggtcttgccggcaacgaaggtggcgatgttcgccgccttccagtccagcgcgtcggtaaaggccgtatcgtcgggcgcggcaaacacgacgctggtggcatagagcacggtgctggccttgagcagttggttgctggcgtcttcgccgtcgtcgccgaacaggtactggtgcttgcttagcgagcgctgccacgggtggtcccagccaccagccgcgatgacgacggcaccggcgagcggcatccaggtaccgctgtcgcgcgccgcacgaccagccgagtcggcccagtgatcccaagagaggaggctctcgcccaagggcgctgccgagcagataccgctgatggagagcaacacgccggccagcagcagacgtgcgcctggttgcgagcagacgggattccgagcgaaacgtagcggtgaacggaggttggacatggcgcgagcgctattagaggaatcgggcccgcagcctaaagcccgcgcgatcaaggaaccgtcaaggccgtgtgaagaaagcgtcaagcgccgacaaatccgtcctcacctaggcgacggtcagcatcgtgttgaatagcgcggcgtctcggttcgcgcacgccctacaagctgccgggcatttggccgcgctcggtagcgcagacgtgcacatcgcatgaggcgctgcatgagttcgtgcaaagtgcaacggaaccttttattcgtctaaatataacttattgataataaaggataaattcttttttggaggtggcacgctcgatgctgtagttgctaccgccggtacggcggaacacaacaatcaaactcagcggctgggcggatgcgccagccaggacgtggaagagaatggataacaggctgaacggtgaaacgcagatatgggccgatggatattccttcatggaggtcacggaaacgctgctgatggcgttgggaattcgcaccgaagatcagccgccgggtcttcgttcagtacgggctgagtcgatttccacgatggatgacgagctccttcgcacagaggccgatcggtagcgcctgcgttgcagtgcggtgggcttcgcctttgcccacccaagctgccactacttttccagcccgctcagaatgcggtgcgcaagcctgacccgtgcctcgttcgggtagtaccggttggccaggatgacgatgcccagctgcttggccggaatgaaggccacataggcaccgaatccgttggtcgagccggtcttgttgatccaggcatcggcctgcggcggcagcggcggggcgatcgcctccaccggctggctttcgagcaccatctggctgctgttgccggtcagtagatcgtccagcgcgaccggatagtcgtactgctcccacaccaacgcctgagtcatggctccgacccggtaatagccggttcgggtcgccgccatggcctgtctgaccgaactgtccgtttcgacaataccgagctgcgcttcgacgaaatgcagcagatcccggctggtgcttttcacgccgtaggcttcgttggccagcaacgcggggttcagcctgaccgggtcgccgtctttgttgtagccctgggcatagcgcgccctttcgctgggcggaatgtcgatataggtgctgttcatcccaagcttcggaagcagttgggtctgcaaggcctcgacataggaaagccccaggctgcgggccgcaaccatacccaacagacccatgccgggattggcgtagacgcgccgtgtgcctgctgcgtagtgcggctgccaggctctgaagtaatccctcagttgttgttcgttgcgaatctcgtcgggcagctgcagcgggaaatcgccggcggtatgggtggccaggtcgatcagtttgattttatcgagctggctatcttgcagggcgggcaggtagcggctggggctgtcggtcagcgcgagcctgccctgggtttgggcataggccgccagggtggcggtcagggtcttgctgaccgagccgatctcgaacagcgtgtcgcgggtcacgggctgctgcgtcgccttcgaggccacaccgaagttgtagaagcgctgctcgccctgtgtcgtgatcgctatcgccagaccgggaatcgcgtgttgcaccatcacgccctgggcggcgtcggttaccgtcgtgtcgatgtcggcaacatccgcgtcggccacggccaggcggctgagcgccgtcagcaacgcaacgacgaacagccgtgcccgacacattctggatacgcgcattacggggcctcgatcacggctgaagggtccgaaacctaccatccagcagccgtttgcagaagccctgcccaaggtcgtcggtgtcgttgtatcgacgcgccggggcgttcagcccaccgtgatgtccagcgtaccgatgccttcaacgccgccgctcaagcgatcgccgcgctgcaccgggccgacgccggcgggggtgccggtcatgatcaggtcgccgggctcgaggacgaacagccgcgacagataggcgaccacctccggtacgctccagatcagcgaggcgaggtcgccttcctggcgggtttcgccattgatttcgagccagatgcggccctcgctcggatggccgatggttgctgccggcaccagtgccgagcaaggcgcggcatggtcgaagcccttcgccacggcccagggccggcccattttcttggcttcggcctgcaggtcgcggcgggtcatgtccagtcccacggcgtagccatagacatgctcgagcgcttgctcgaccgcaatatcggcaccaccgcgaccgatggccaccaccatctcgatctcgtggtgcacgctctcggtgcccggcgggtaggggaacacgctgccatcggggagcaggctgtccgggtgcttggtgaagaagaagggtggctcacgatcagggtcgtggcccatctcgcgggcatgttcggcgtagttgcggccgacgcagtagacgcgccgcaccgggtagcgctggctgctgccggcaatcgcgagactgggaatggcgggggtaaagaggtagtcgttcggatcagtcaaattcactgcttagactccaggtcattgtggttttcgcgtcgccggtgcgaggcgacgcttgtgaattcatttacgcagcggcacgctgccggcttcgtccaggctgcgcagaaagtcgaagtcgcagccgttgtcggcctgggtcacggtctcgaggaacagcttgcggtagccgcgctcgtcgccttcacgcggttccggccgcggcagcgcatcgcgtcgacgcgccagttccgcgtcgctgaccagcaaatccagggcgcgctcagccacgctcaggcgcaggcgatcgccgctttcgatcagcgccagcggcccgccgaccgccgcttcgggcgtgacgtggaggatgatggtgccgcccgccgtgccgctcatgcgtccatcggagatgcgcaccatgtccttcaccccggcacgcgccagcttgcgcgggatcgggatatagccggcttcgggcatgccgggcgcacctttcgggccgatgttcttcagcaccaggatgtcgtcggcgttgacgtccaggtccgggtcgtcgatgcgctgggccagatcttccaggccatcgaataccaccacgcgaccttcgtgctccatcagctcggcgctggcggccgattgcttgatgatcgccccgtccggcgccaggttgccgcgcagaaaggcgatgccgccttgcgggtagatcgggttgtccagcgggcgcaccacctcctgtgggaaggcggcgatggcgtcgagctcttcgccgagcgtacgccctgtgaccgtcagcgcgtcgaggtgcaggaagggccgcagctcgcgcagcacgggcgccagcccgccggccttgtgcaggtcttccatgtaatgcgtgccggacggcttgaggttgaccagcaccggaatcttgcggcccaacgcgtcgacttggtccatgtcgatgcggatgccgcagcggccggcgatcgccgacaggtgcacgatggcattggtcgaaccgccgatggcgagcaataccatcagcgcgttttcgaaggccttctcggtgagaatccggtcgggggtcatccgcgcctgaatcatcgccacggcctgggtaccggtgcgctcggcgatgcggatgcgatcggccgtgaccgccgggggcgtggcgcccccgggcagcatcatccccaacgcctcggtgacgcaggccatggtgctggcggtgcccatcaccgagcaggtgccgacgctggccaccagctgatcgttgacctcggtgatttcctgctgatcgatctcatcgccacggtacatgccccagaagcgtcggcagtcggtacaggcaccaacgcgcacgccgcggtgcgaaccggtcagcatcgagccgctgaccagttgaatggccggcacgccggcgctggcggcacccatcagctgggccgggacggtcttgtcgcagccgccgatcagcaccaccgcgtcgatcggcagggcgcggatcatttcctcggtgtccatcgacatgaggttgcgcaggaacatgctgttggggtgggcgaagctctcgtgaatcgaaatcgtcgggaagtccaccggcagcccgccggccagcataaccccgcgcttgaccgcctcgatcagctgcggcgcgttgccatggcaagggttgaagccgctgcctgtgttggtgataccgacgatcggccgtgaaagggcgtcgtcggaatagccggcgcccttgatgaaggctttgcgcagaaacagcgagaattccgcgtcgccatagttggtcaggcctttgcgcatgccttgcgctgcgccttcgatggagttgccgttatttttgttcatgggcgttcctctcggtggttggatcgacgccgcagcaatcggctccaggataggggggcgctggactcaaccggcgccggacggtgccggcccggagctgccgcgcaccaccagttcggtggctgtctcgatcaggccggccggccgcttgccggccagggcctcgagcagataggtgccggcgttgtggccgatctgtgtcaggtccacgcgaatcgtggtcagcggtggggacatgtatttggcgtaatcgaagtcgttgaagccgacgaccgagacctcctcgggcacccgtacgcccaggttcttcgccgccagcagggcgccgaacgccagcaggtcgttggcgcagatcaccgcggtgggccttgccggcccgcgcagcaggcgctgcatggcgacgatggcgccttccagggtcaggtcggtttccatgtgccatggctcgggaatcgccagaccgtcctcggcgaggcgcgcgcgggttcctgcgatccggtcgccgacccggtcgttgaaccccggttcgccgacgatcatggcgaattcgcgatgcccgagtgacaacagatgctcgaccatctgccgcgcgacggcgatgttgtcgaagccgacgctggggcggttgtggtcctgcgcccaggcctgcacgcaggggatacgcttgcgctcgatcagctcccacatcttcggatcatgggtgcgaccgaccaccatcaaggcgtccacaccatgctcgagcatggtctggacttccttcagctcgacttgcgagtcgaagccgaaactggcgaccagcagggtgtagccggcctcatgcacgcgctgctgaaaaccggcaagggtgcgggaaaaggtttcggtcgccagcgtcggcaccaccgcgccgatggtcatgctgcgacgcgaagccagggttcgcgcggcggcgttgaggacgtagccgagctcatcgcaggcgcgctgcacggcatggcgcttgtcatcgctgacggtggcgctgccgttgatcacccgggaaaccgtggccgtcgacacgtttgccagacgggcgacgtcctgcaagctggcgcgtgtcagcaacgaggggaaagggggggccgagtcagccatttcagagtccttgtgatcacgctgagcgaattggtgtttgacataaggaaaaaccgaaactagttttttgtaaacgcttacatcacatttttattcaaatgtaagcgattacacagtggctttcatcttccagatctcccaccgcaacagcttgtagcggtgtcgccagagacgaaatgaaagcgcttacatttaaacgcagcgagagattcgggacgaaaaacaatggcaaaaatcagctccatctccgtttgtgcggcccgcgtgccgctggataaggtcacctcattctccaaccgcacggtgcacgctcgcgactacggtctggtcaaggtgaccggcgccaacggcgtcagcggtatcggtttctgctacgtcggcagtgccggcggtgagctcctgccgatcgcggtggagaagctgctggcgccggtgctgctgggccgcgactcgctggatgtcgaggcgctgtggcgggagatgtatcaggaggcgctgctgcagggccgcgccggtgtggtcatgcgtgccctcagcattctcgacaccgcgctctgggacctcaatgcccgcagcgccggcttgccactgcaccgttatctcggtgcggccagtgccgatcgggtgccggcctacgccagcggtggctactacctcgacggcaagactcccgcgctgcttggcgaggagatggcgcactacgtgtcgctcggcttcaaggcggtgaagatgaaaaccggccgtctctcgcccaaggaagaagaggcgcgggtggcggcggcacgcgaagccatcggtcccgacgtcgcactgatgctggacgtcaacaacggctggagcgatgtcaccgaggccctgcagtacgtacgccgcttcgagcgctacaacccggcctttgtcgaggaaccgttcctggtcgacgacatcgacagccatgcgcggctggcgcgggccaccccgattccgatcgccaccggcgaggtggaggtcgggcgctggcgccacaaggagctgctcgacaagggcggcgccgccatcctgcaaaccgatgcggtggtttgcggcggtatcaccgagtggcgccgcatcgcggcgatggctgccggttacggcgtgccgatgtacccgcactggttccacgatgtgcatgcaccgctggtggccgccaccccgaatgcgcgttacgtggagttcttctgggatgaccaggtcctcaacttccgccggctgatcgaccgccagctggagcaggagaacggttacatcaagctgcaccagaccccggggctcggcttcgacttcgacgagcaggccgttgcgcgctactcgatcgctgctggcggccaaccctggatgaccctcgaaaacaaacgatgagatttgcattacccgctgtaggggcggcggcgcgcggttgccgcccctgaccacgtctgggcttgcttggccagacacgataaatccaacaagaaacgtggagtgagcgaaatgaagatcaacaagcaactgtccgcagccgtcttgaccgctgtcacggcgtttttcgttccctttgctgcccaggcggaatacgtcgccggcgacgagatcgccgtgctgcaaggcttcaagccgggcggcggcagcgacgtgctggcgcagctggtacagccctacctgaccaaaaaactcggtgccaatttcgtcaacgagtacatcccgggtgccaccggcgcgatcgcctggacgcgtctggcacggcagtcgaagaaggacggcacggtgatcagcatcaccaacacgccgatgctgatgaccaactacatcatgaacgacgccatcacctacaacatcaaggacctgacgccgatcgccaacgtggtgaccgactcgggcatcgcggtggtcgccaaggacagcccctacaacaccatcgaagatctgttcgcggcggccaaggagaagcccggccgtatcaccgtcggcaactccggggtgggcggcgacgacttcttcaccacgctggtgatcgagaaggccaccggtctctccttcaagaaggtccctttccagggcgatggtccttcggccaccgcggccatgggcaacaagatcgatgtgagcttcaacaacgtcggcaacgtttacagccagatcaagagcggcaacctcaaggcgctggcggtgttcgcgaacgagcgtttcgaaagcctgcccgacgtgccgaccctgaaagagaagggcatcaacgtggtcgccggctcctcgcgcggctacagcgcaccggccggaattccggatgaagcgcgccagcagctgatcgccgcattcgaagcgctgaaaaccgacgaggcattcctggccgacgccaagaagcgtgcgctgcacatcgacatcgtgactggcgacgactacggccagatgttcgagaacatggagcaggagttccaaggcatctggagcgaagtcggtggcaagcaacagtgaagccattggccgaacgcaacgaggggaggcgcccatgaacacgaacaggctggtactcggactctttggcatggccctggccactgcgtttttcgtcaatgcgcagggttatccggaagccgctgcgcagatgccgctgatctattcggtcacggtggggctgttctcgctggccatggtgtgttcggagctgctgcgctggcgcgcggcccggcaccgcgaggtcgagccagcggttgccagcgaagcacccgtcggcccgccacgttacgcggtgacggccttcgttttcgtgctggcgattgcctacgtcgcggccatcaccacgctcggctatgtgctggcgaccgtgctgttcatggcgttggcgctggtgctgatccgcaccgtctccgtgcgcttcgccgtgatcggcacggtagtgctggtggcagtggtatgcctggtgttcgtgcagtttctggggcttcccataccgctgttgccatcggcgatcgcctgatcgctcccttccattttcgacgaggctttttccgtggaaagttcgatcgtcatgacggggttggtcaacgtactgaccctggccaacttcgccgcgatttttggcggcatcctgctggggctgtttgtcggcgccatgccgggactctccgccaccatggcgctggccctgttgttgccgctgaccttcagcatggacaccgcgaccggcctgagcatgctggcctcgctctatgtcggcgcctcctacggcggctcaatcgccgcgatcctgttgcgcacgccgggcaccccctcggccgccgcgacggtgctcgacggctacccgatgtcgcagcagggccaggcgggcaaggcgctggggatctcgctgttcgcctccttcatcggcggcaccatcagcggcatcgcgctactgctggcggcgccgctgctcggcagcatcgtggtcgagttcggccccatcgagctgttcgccatcgccgtgctgggtatcaccatcatcggctcgctggcgcagggatcggtgatcaacgggctgttttccggtgcggtcgggttgctggtgagtaccgtgggaatggatctgatgaccggcacgccgcgcatggcgttcggcaatatcaatctgttctccggtatcagcttcaccgtggccttgatcgggctgttctcgataccccaggcgctgtcgctgatcgagaactcacacggcgccgccaaggtcgccagccgcatcaccgaccggttgatcccgaagttcgccgaactgaaagcgttgatgccgaatatcctgcgctcgagcggcatcggggtgatcgtggggctgattccgggtactggcggcgataccgccagctggttcgcctacaacgaggccaagcgcttcgccaaggacacgagccgcttcggcaatggcgatccggccggggtcgcggcaccggaggcggcgaacaatgcggtggtcggcggtgcgctgattcccaccatcgccttgggcattcccggcagctcggccacggcgatcctgctcggggcgctgatggtgcagggcattctgcccgggccgaacctgctgaccgactatggcgacgtcacctacacgctgatctgggcggtgatcttcgccaacatcggtctgcttggcgtgggcctgatgttcaccaaagccagcgtggcggtcacccgtattccggacggcttcgtcgcctgcgcgatcatcgcgctgtgcatcatcggtgcctatgcgctcaacaacagcctgttcgaggtggggctgacgctcggcttcggcctgttcggctactggttggccaaggccggcgtctcaccggcgccgatggtgatcggcctgatcctcggtccggtgatggaaaacgccttccatcagtcgatgctgatcggcaacgacgattaccgcatcttcctgaccagccctatcgccgtggtgctgctgtccatcgcgttgctctcgatattgcaggcgacgccggtcttccgctggctgctcgcacccttgcgtcgtcgtacacgcctcgcctgaggtcatggctggcagctcgtcgtgggctgcctgatcaacacaataagaggagagcatcatgggtcaggacaaggggcgcgtctgggcgccggtcatcacgccgttcggcgcggatcattcgccggacaccaagcgtttcattgcgcattgccgctggctgctggagcaggacgtgagcctggccgtattcggcaccaactccgaagccaattcactggtcgccggagaaaagattcgcctgctcgatgcgctcatcgatgcaggtgtgccggccgctcggctgatgccgggtaccggcagttgcgcactgccggacaccgtggcgcaaacccgtcacgcgactgccctgggtgttgaaggggtgctgatgctgccgccgttctattacaagggtgtgtccgacgagggcctgttccgctatttcagcgaggtgatcgagcaggtcggcgatgacagtctgcgcgtctacctctaccacatcccgccggtttcccaggtgccgctgtcgctagccttgatcgagcgtctgcgcaaggcctacccgaacaacgtggtcggcctgaaggacagctccggcgattgggccaacacccgggccgtgatcgagcgattcggcgcggacggctttcaggtctatgccggcagcgagtcctttctgctgcagaccctgcgcgcgggtggcgccggctgcatcagcgccacggccaacgtcaatccgggccctatcgcgcggctcgccaggagctggcaggccgccgatgccgatgagcagcaggcggcgctggtacgcacccgcaagatcttcgagcgcttcccgctgatcgcggcgctcaaggcggcgaccgctcggttcagcgacgacgagcaatgggcgcggctgcgggcgccgttggtcgagctcgatgggcaccagtgcgccgaactgctcgtgctgcttggcgacgccggcttcgacatgcccggactcaaacacagctgactggagtgaccgatgcacaagaaacgaatcgtcgccctgcggcggcttaaagactcgcacctgcagcgcttgcacgaagccttccaggtcgactatttcgaagagccggagctgcaacccgaggccgtcgccaccgcgctgcgccaggcgcacgggctgatcggcggcaaattgcaggtcagctcggcattgctcgacgaggcgccgcagctggaagtcatcgccaccatctcggtgggctacgacaacctgccggtggccgagctgagccggcgcggcattctgctgaccaacaccccggacgtgctcaccgaaaccactgccgacaccggcttcatgctgatcatggccagcgcccggcgtctggtcgaactggcgaacatggtgcgcgaggggcgctggacgcagcacgtcggcgagccgcacttcggcagcaacgtgcacgacaagaccctcggcctggtcgggctcgggcgcatcggccgagccatcgcccgccgcgcgctgggtttcgacatgcgggtgctgtacagcaacgcttcgcccaagcctgaactggaagccgagtggggtctgcagcggcgcagcttcgagcaactgctggccgaatcggatttcgtctgcctgaccgtgccgctcaccgaacagaccgagcacctgctcggctacgaacaatgccgagcaatgaagcgctcggcgttcctgatcaacatcgcccgcggccgggtggtcgacgaggccgggttgatccgggcgctcgacgagggcctgattgccggggcggggctcgacgtgttcgaacaggagccgctgcaggagtctccgctgctgcgcatggacaatgtggtgaccttgccgcacatcggctcggccacccatgaaacccgcgaagcgatggccaatcgcgcggtggaaaacatttgccaggccttgcgcggcgaacgcccgcgggacctggtcaatcccgaggcccgcccgaacgggttttcagcagcacagcaggaacagtcgttagatgcccagtaacccctcgcgacgcctggcgtcgatcctcaacctgcatgatctcgatcgcgcggcgaagcgccatctgccgcggccgatctatggctacatcgccaatgtcgccgaggacgggcacaccgcccgggccaatcgcagcgccttcgacgcttattcgttcctgccgcgggcgctggtggacgtgtccaatatttcgctcgaaaccgaattgctgggtcagcgctacgccttgccgatcggcatcgcgccgatgggcatcagcgcgctctcggcctaccgcggcgatctggtgcaggcgcaggcggcggccaaggccggtattccgatgattctcagcggcagctcgctgatccgcatgaaggaggtgctcgataacggcgagacggattggtttcaggcgtacctgcctggtgatgaatccggtatcgaggcgctgatcgagcgcgtgcgcaacgccggcttcgacaaactggtgatcacagtcgactacccggtaccgcccaacagcgacaacaacacccgctcgggcttcagttcaccgctgcggcccagcctgcgtctggcctacgacgggctggtgcggccgcgctggctgttcggcaccttcctgcgcacgctggtcaatcacggcatgccgcatttcgagaacaactacgccacgcgcggcgtcgcgatcctgtccggcaacgtgaagcgcgatttttcgggtcgcagccacctcaactggcgctatctcgaactggtccggcggctgtggccgggcaagctggtggtcaagggcattctccatccggacgacgcgcgccgatcccgagacgcaggcgcggatggactcattgtttccaaccacggcgggcggcagctcgacggtacgctctcggcgctggaagcactgcccggcgtggtcgaggcggtcagcgagctgccggtgatggtcgacagcggcttccggcgtggcaccgatgtactcaaggccttggcgctgggcgcgcgcatggtgttcatcggcaggccgttcaactacgcggcggcctatgcgggcgaggcgggcgtagcgcatgcgatcgacttgatggcgagcgaactgcaacgtgacatggcgctgctggggctgacccggatcgaggatgtcaccagggactgtctggttcataacaaaaaatagagcgcaagccggtagcggagggtttatgggacgcggactgttatcaggactgtgggacgtagaagccgccatctatgcagggcctccgccgctggaggaccgttttcagctcggcatgcagcgcacggaaacggcgttgcgcgctgcgcgtgccgaggccgaacgcaatggctgggcggtatccatcgcggtcgtcgataccgcgggcgagccgcttggcctggtcaagctcgacggcagcccgcccgacagcgcccgctgtgcgattagaaaggctcaacaggccatcgccgccgagcaatgtggcgtggtcgacgaggcgtcgctgatgtcgcgcgcgcggtacgctcgctacagcgcggtcgccatcgcgctctacgtggaggaccgctgcatcggcgcggttgccgttcacggcgttcaccgcagcgaagccgcgcacgttgcccatgcgggtgccgaggcgtttgaccgagccgactgagtcgagcgggctccggttggctgtaggacgcgcggcgggattcgctgataaacgcgcatgtccgtgggcgtccgcagcctgcgtagaacgagcgatccatccgccggtactgttctactctggctccgattcaacccgtaacggagcctgacatgcggtcacgcatcactgtcattacccttgagttgagtcgttgcggctctaccgcgaggggctgggcttctccagcgactgcatcatcgcgcaggaattcgagcacggcaccatagcgttcatcaactgcaacccggcctgggttcggcgctctggccgcgcagcagcgtcgcgcatgacagcgggttggcgctcgacctggccggctccaccgaaatgatccgggccataacgtctcgtcgaaagccgactcgatgccgccatggcttcatccataacaccagatcctcctgagggttcaagagcgctttgcaagcgctcacgcccttgacagagattaagcgcttcgttcaaatgttatggtataacatcttaacggaagccttatgagcaggtgcagagttccaacgaggtatatcgggattgcggcggttacgggtttggcatcactgcccacgtttgcacaggagaacgatacgactgtgctcgatgatgtgttcgtcatggctgatcaggacggggaaggtgtccgacgctatcaggcgcggcgctccggtagcgcgaccaagacggacacgccgctggatgaagttccacaggcagtcagcgtcattcccgccacggtgctcgacgatctgcgcagcccccgtatcgagaaagcgctggactacgctggcggcgtggcccgccagaacgacttcggcggcttgaccatgtacgaatacagcattcgcgggctgaccacctcggagttctacgaggacggtttcagcgtgaaccgcggctacatgaacccgcaggatccgtccaacgtcgagcgcatcgacgtactcaaaggtccggcttccagtctctatggccgcggcgacccaggcggcaccatcaatatcgtcagcaagcgtccacaaaacgaccggttcgcccggttggacctgagcgccgttcgttgggatcgctaccgcagcagcctggacgtgaacacactgctggatgacgagggcacgatgctctatcgcatgaatctggcggtggaggacaacaagagtttccgtgattaccgctccagcgagcggcaattctttgcgccggcgttcagctgggaattgtcaccgcagactcgcctgttggtgcaagcggaggtgatccgcagcagccaggtgttcgaccgcggcgtggtcgcgcccaacgatcaccttggcagcgtttcgcgttccgactttttcggtgagcccgatgacggcgagatcgacaacaacaacgaaagcctgcaggccgaaatcgagcaagatctgaatgccagctggaccgtccgcttggccagccactacaagcaaggacgcctgaacggtggcgctaccgaggcaagctttctggccgacgatgcccgcaccctcaaccgcgagtaccgctaccgcgacttcgactggcaggacagcatcacccagctggaactgcgtggtctggtctataccggcgacatcgagcacaacctgctgatcggcacggaatacgagcgctatgccaaggacgagcgcctgatgcgcacccgtcccatctcgacgatcgatatccgtgagccggtttacgggcagccacgaccgccgttcagcgtgggccctggcgggcgcagtaccgatcgccacgaactggtccattcccgttcgctgaacctgcaggatcagatgcgcttgagcgaaaaacttttcggcgtcatcggcgcgcgttacgaccactacgagcatcggctggacaacgaagtaaccggcaaacgcaccgagcagactcacgaaaagatcacgccgcgcatcggcgcgctctaccagctcacccctgaggtcggtgtgtttgccaacgcctcgcagtcgttcaagcccaacaccggcgcgccacggccaggtaccgggacttcattcgatccggaggagggcgtcggttacgaagcgggcttcaagttcgatctgctcgacagccgcttgggcatgaccgtcgctgccttccacctgaccaaggaaaacgtgctcaccgctgacccggctgactcgacctaccagattgccgctggcgaagtgcgcagccggggtctcgatctgcaactgaccggccagcttaccgacgaggttcgggtgatcggcgcctatgcctatgtcgacgccgaggtgacgaaggacaacacgctggcatcgggcagccgcctgctcaacgtgccagaacacagcggcagcctgctcggtgtttacgagtttctcgatggcggtttgaaaggcctggagcttggcggtggcgtcaattatgtcggcgaccgctccggcaatgtcgcggacagcggcttcgaattgccgggctacaccacggtggatctgcttgcgcgctacaaggccactcaggacctgaccttgggcgtgaacctcaacaatgccttcgaccgcacctattacgagcgctcctatagcaacgtctgggtgatgccgggcgagccgcgcaacctcagcctgagcctctcactgaatctgtaacgctgaatccataaggaaagaagatgaacaagcaatacgcaaaatacgccatggcactgattgccgcgttaatggccgggcaggcatccgcccacggcatgtggaccgaagagcgacgcggcaacatcgaggtgatctacggccacggcgctgaagacaacgccttcgacccgaagaaaatctccggcgcctgggctgccaaccaccatggcagtcgaatccctgtcacggtcgagcggctcgaggaccatgcgcgcctcaagccgctggagcccgccgcggtgctcagcgtggcgctggacaatggctactggacgcaagcaccggacaagaaatggctcaacgtcggcgaaacgaaagttcccggcgcgctggattccgggcattactacaagtacagcctggcggttctggaggaaggcgcaacacttcccacgctggacaagctcaagctggccatcgtgccgcagcgtgatccgctatcggttgaggtaggtgacgaactcgacgtgcagatcctggtcgacgggaaaccggccgccgatatcgagctgatcgccgactacgtgaacaacccggacgaggtggcagcgaccaccgacaagcagggcaaggcgaagatcaccgtgcgcaaccacggcctcaacgtcattgccgcctccaccaccgtgccgagcacagacccggacgcacgagtgcgcggtatgttctcctcgttgagcttcgtcagcgccaagcacgagcattgatagcgtcgtcccagcaaaccgaattgaacaaactcagcactgaaactttcttggtggttcgctgcagcgcccacgcagcttaaacgccagatcgaacgggctcgacctgtgtaaaagccctacatggggcttttgctgttgacgaagctcgcatgtcctaaccgacgtggcgggcgccgtcatcgtcaagccggcacatgaccccttttggggcgctattccggttacttcaaggacccggacggctgcctcagggaagtggtgtggaacccgcattttctggactgaccgacgcgcggccaatgcccgcccgttggttcagaacacgtgcttcgatatgtgcttggatatttccacgatcgacgtcttgccggtgaattcgaacttcacctggcccagcgaggagaaatagatttcgagttccgagtcgagatcgaaggtgccggacgtttccaccgaataagcgacgatgttcttgtacggcagcgaggtgaaatccttcttgctgccggtaaggccttgcacattgactgcgatgattcgctgggtggtgaacaccacgccgtcgcgcatcgacttgtaggcgtcgatgacttgctcaccgtccagcagcaaggacctgaccctctcggcgtattcgtcgttctgcttgagcttgaagaagcccttgttgttgaagtcgatcattcagttttccccttggcccttgccgtggtgtcgcatgtgttgctcttcgagcgtccccgattcgccgtacaggcctgggtaacgtaaaacgcctggcgccgcgacgaacgtctcgggcaccggtcaggccgtcgacttaaggtcgacaaccgaacgctgtacgtgttttcctgcgctctctttcttcctgcccaggtaccgtcgacgagctatccagctgatcgtagcggagcagatgccatcgcgtagtaacgtggataactgtattccgccacacggtaatgaaaggtgaccagctcgctcagtgcgggatcgtccccataatcctgctttcaacaggcgttagtcaggcggaccaaggattacagcatgttgacgcaagaggaacctcccagggagccaagtgaatacgatcacttggtctcgttgaataccagcgcgattgatgtctttcccggtgcggtctatctctgcaaccgtgagggttggctggtcagatacaacaccgaagcggctgagttatggggcagaacgcccttggttggcgtagagggtgaccgcttctgtggctcgcatcggcttttcggactggacggtgcgccgctcgcgtttgacgactgcccgatggcgttggctctcaaaaccggcgtggctattcgcgatgcggaagtgatcgttcaacgtccagacgggtcgcggttcgtggcccttgtgaatgtcaggccacttgaagatcggctgggggccatccaaggggccattggttgttttcaggatgtctccgcatatcacgcgattgccgaggagcttcatcgcaaaagcgccgatctggaagacttcttcgagaacagcgcagtcagccttcacattgtcagcgcccagggcatcatcgtgcgggccaacaaggctgaattatcgcttttaggctatacggccgatgagtacatcggccgacccataacggcgtttcatgtggatgcgcccgttatcggtgacatcctcagcaagcttgccagcggcgattgtctgaaaagttatccggcgcgcctgcgcgcaaaggacggaacgatcaagcatgtgcagatcacttcgaatggccggttcgaagacggcaagctcttcaatacccgttgtttcaccatcgatgtgaccgatgtccacgtggctgagacagcacgccgcgagagcgacgatcgactctcggcaacctatcaggcggccacgataggcatagccgaggccgatgcggatgggcgcctactgcgggtgaacgacgccttttgcaccatgctcgatcgaagccgagagcagcttctggcaatgaccttcccgaactacacccacccggacgacgttgagcgggatgctgcgctttatgcccgtcaggtggccggcgagtttgatcgctatgtgcttcgaaagcgtgctttcaaacctgatggcgagctcgtttatctggacattcatagctcgtcggtaagggatccatccggtggctttcgctatggcgtacgggtgatccaggatgtcacgcagacgcagcgaatggaggaccgtattcgagaaagcgaacggcacatgcgtgacctgctcgaggcattgccggcggcggtttatacaaccgatgcagaaggtcgcattacgttcttcaatcaggcggctgtcgaattgtctggccgaacgcctcagctgggtgacatgtggtgcgtcacgtggcggctacacaacgctgacgaaagcccgcttgcgcaccatgaatgcccgatggcgatagcactcaaggaaaaccgcgcaatacgaggtgtcgaggccattgccgagcgtccggatggtacccgggtgccgttcattccttatccgacgcccttgcatgatgcggatggaaacttgattggtgcgatcaacatgcttgtcgacatcaccgagcgaaagcaggctgaaaaccgacagaagacgctgattgacgagctcaaccaccgggtcaagaacacgcttgccactgtgcaatccctggccgcccagacggcgcggaacgcacgaagcgcgggtgatgctcacaagcggttcgaagcaagactgctcgcgttgtcgcgggcacacgatctgttaacgaagcggcattggggcgacaccccgctggattcgctggtccatgaagtgttgatgccgatagtcggccatgagcctagccgcgttcggattgacggtgcatccattgaggtcaatacccgagtagcgctcagcctcacgatgacgctcaacgagctggcgatcaacgcgctcaaatacggatcgatgtcgaccgagacgggcaccctgtcagtgacctgggatgtccaggtacgcccgagcgaaacccgggtcagcttcctctggcgagagcacggagggcctacggtggtcgagactgggcggcatgggctgggattccgtctgatggaacgctgcatcgaacgggatctgggaggggaactcgaagccgatttcgccactgaagggtttgtgtgccgcttttcgattcccatcggggcagaagatcggtgacctcgctggttgggatcaaggtgctcgtcgtagaggacgaaggcgccatcgcgatgatgatcgaggaaatgctggaagagctcggttgtgaagttgtcgcgtcagtggcacggcttgctacggcgctcgatgtggcgcgatctgtggaagcggacctggcaatgttggacgtcaacctggccggccagttcgtctttcccgtcgctgaagtccttcgcgatcgcgccatcccgtttattttcagcaccggatatggcgccagtcgaataccggcggagttcagcgagtgccccatactgcacaagcctttttcggaatccgagctacaccagaaaatcaccctggccgcatccgaagccaagcgccagaaacgctcgatgccttaggcgggattccgcatgctcaggcttggggggccgctttgcccagggtttcgcgctgggttattgacctcagaggctacttcaaggacccggacggccacctctgggaagtagtgtggactgaccgccgcgcgtcgatcatccgagcgcctttccctgccctggccgcgtgaccctgcgattcgctcaggcccgggcttccagctgttcgcgcagaaatgccatgaacgcggtcagcgatggcgagcgtgacaccgggcgggtttccagcaggccaatcgaacgccgtgccggttgttcgatcggcaccgtggtgcatcgctcgatattgaacaccgatgcgcagctggccggcagcagcgaaaaccccagcccctcacgcaccagcgccaccaccgaactcatgtgtgccacttcccagacgggggtcggttgcatgcccaggtgcctgagcgcggcgtcggccagcgggcggatgctggtgtccggtgtgagtgcgatatagggcaggcgctgccattgcgagcgccgcttggcatcctcttgcaccagcaacaccagattatcgtccagcagcggctcgaaattcaggctcaggccctcggcgggcgacgacgtgattcccgcctcgacttcgccactctgcaaccagccgagaatctcgccagcgcggccgtcccgcaggtgaacctcgatacccggatgcagctgagcgaacgcggcaatggcttgcggcaggaatgacgccgcggcggtaggcagcgcgcccagacgaatgctgccgcgggtcagcgccagcgtctcgcgggcatcgcgcaccgcatcttccatgtcgcgcagcatccgccgtgcctgcgccagaaaatgccggccagccggggtcagctcgaccattcgggtgttgcgcgccagcagctgcagaccgagcgattcttcgagcttgcggatcgtgtaactcagcgccggctgagacagatgcagcagctcggcggtgcgagtgaaactgctgctctcggcaatcaggacgaatgcacgcaactgacggaacgagacgttcatggcttacctataaaaatagtggatcaattgatcgcacctttcgaattcacagaagaatgacgcagcgccaccatgcaggcaaaccgcagtggagcgccctatgacaagaaccatccacatcggctgtggtgccggctttgccaatgaccgtcccgatgccgcgctgcggctcgccaaggatctagccggtcgcaacggccaacgctacctgatgctcgaactgctggccgagcgcaccctggccgaagcgcagctgcgcaagcgcgccgatcccgcgctgggttacgccgcgcgactgttcgatttcatcgagccgatcctcgaaatctgccttgagcaccgcataccgatcatcaccaacggcggtgcggccaacccccaggctgccgcgcggcgattgcgcgggttgctcggcgcacgtcacgtcgagacgcgcatcgcctgcgtgctgggcgacgacctgttgcaggctgacgcctcagcgctgaagccctggctgcctgccgatctgccgagcgcaggacgggtttcgatcaatatctataccggcgccgatggcatcacgcaggcgctcgaacagggcgcgcagatcgttctctgcgggcgcgttgccgatccgtccctggccgtcgggcccgcccgccacgggctcggctgggcgcgtgatgactggcagaagatggccatcgccacggtcgccgggcatctgctggaatgctgcactcaggtcaccggtggctatttcgcccatccgggcatcaaggatgttcctgatctggccaacctcggctgccccatcgtcgaactcggcgaggacggcagcctggtgatcaccaagacccgcggcagcggcgggttcgtcagcgagcgcaccgtcaaggaacagctgctctatgaggtccacgacccgcgccgctacctgactcccgatgtggtgctcgacctgggcacggcctgcgttcgccagcagggcgagaaccgtgtggaagtcagcggtattcaggggcatccgcagccggacacgctcaaggggctggtcggcctgcgcggcctctggtttggcgaaggggagatttcctatgccggccccgcggcgctggcccgcgcccggctggcgcgggacgtgttgttgcagcgcttcgcgcaactggcaccgcagatcgagccctggatcgacctgtccggcgtcgccagcctgttcaacgacagtcgtggcgaatatctggcgcagcgcctggagcacgcgctggagctggaggacgtccgtgttcgcgtcgggctcatgcacccggaccgagacctgatcgacgcgctgctgggcgaagtggagtcgctgtacaccaacggtcccgcgggcggcggcggggtgcgtcggcatgtcagcgaaagccttaccacacaaagctttctgatcccccgcgatgaaatcgaaacgtccctggagtggtattgatgagcgcattcgtcaccctggccgactatgcccacgcccgtgccggcgacaagggcaacatcctcagcatcgcggtgtttccgctgaacgacgcgcactacgcctggctgcagcgcgagttgacctgcgagcgcgtcgccgagcacttcgcgacgcggcggccgagcaacgttcgccgctatgagctcgccaacctgcgggtactgaacttcgtcctggaggatgcgctggaagggggcgtcaaccgaagtcccgggctcgaccggcacggcaagagcctgagctacctgctgctgtcgatgcgcttgcccgcgccgccgactggctgaccgctgccacccgccgtaccccagtgccggcgatgcacgccggtcccgactataaaaacaagacgaggcaaaccacatgatcacgaccctgggctttctgatgatgctcagcatcatcgtgctgattctgctgcgccggatcagcccggtggtggcattcaccaccatccccgtcgccatctgcctgctggccggcttcagcccgcagcagatcggcgagttcatcaagagcggactgattaccgtcgcaccgaccgcggcgttgttcctcttcgccattctgttcttcggcatcatgcgcgaccgcggcttgttcgatccgctcgtcaatctgctgatccgcagcaccggcggcaagccgctggcggtagccatggtcacggtgctcgtcaccgccgtggtgcatctggatggcgtgggggcggcgacctttctgttgaccattccggcgctgctaccgctgtatcggcggctgaacatgagcccggcgatgctgttgtgcctggtcggtaccaccgccggggtcggcaacatggtgccatggggcggcaccaccgcccgcgctgcggcggtgtccgggctggatgccaccgaactgtggctggggttgctgccggtacagctggtcggcctgggctgcatgttgatcgttgcagtgctgctcgcccgtcgcgctcagcgtaaccggccggtgtcactgggggctgcggcgacgatcgacttcgcgccgacccagccggagccgcgtgagcatgcgctgtcgcccaggacgctgcgctactggctcaacgtggtcctgacaggcgcgatcctggcctgcctgttcaccggtatcttcccgctgtatgcctgcttcatggtcggtctgggcatcgcgctgccgctcaacttcgtctcgctggatgcccaggccgaacgcctcaaggcccacgcttcggatgccctgcagatggtgctggtgatgatggccgcggcggtgctgctgggcgtgttgtcgggggcgaagatgtccgacggcatggcgctggcgctgatcgacatcctgcccgccggctcggcgcagtttctgcacgtgatcatcggtgccttcggcgtcccgctgggcatgatcttctcgccggacgcctattacttcgccctgctaccggtgatccgcgacgtcgcggtggccgccggtgtgccgctggaggccgtcgcacgggccatgctgatcggcgagaacaccggcttcgccatcagcccggtggtcccgagcgtctacctggcgctcgccctggccggcgtcgaactgcgcaaacacatcgccttcaccttcttctgggcctggggcgtgagcctggtcatgctggtcttcgccctggcgatcggcgcggtgcagatctgattgtcgtgatggcgtgacgcgaaacgaaaaaggccccgggttttcacctggggcctttcgtttgtatatggcgcatccggcgggcttataacgtgttttctaagagcttgatatttaatgaatttccatggaaggtaaatagcgggcatacacccaggcatacaccgtgtcgcttgctgggcctacgtcacacctcggcagacgcctgttctgacgccaacgccagctgatagcatcgaccgtctcattacccgtagcaaggaagcaaccatgggctacctagtcctctcgcgcaaggaaggcgaaaagatcaccctgcgcgttcagcctggcaccaacgccgaagagctactggagcagctgctgctcgatggcatcaccatcaagctcaaggagattgacggcagtcgcaccaaaattgcgatcgaggctccgacggatttgcagatagtgcggagcgagctggaagagaactgacgagatcgcgccgctcagtaaggttcaggcttgaactggtgcacaagcggcgcccattgttgctttggctgtacaggtggccagtatcccgatttctgcgcttgctatacactctgtgtgtacgtccagatatactcgcgcgcccctcatcaggggaacgcgtctctaagacgtgagtctcatagacataagcggtccctgatggacgatggattcaacggctcattttgagccacaggcggcgcaggaagcccgccaccctggagaaacccatgtctgcactaatgcatgttcgacccaaatttgacgttccacgtcggaaaaaggacgtagttaagccgcgtccggagtttggcaagcacgaggagcaagtggaccaggccttcgcaatcacgttcgagcgctacgagcgcgccatagaagagctagcgaagcgataaaccatgccgccaaggtgtaagggattactctacctaagctgcgaagacctagttctgatcaatgaacgcctgatcaaaatgaaaactccggatgaaatgtgtggagttttcaatcaggcttctcttgagacagctcaacaaagcataaacatgcaccgttatttcgcgcagaccgaggacgtcgtgaccctcgccgctgttctatttgaaagcatcgcgcgcaaccatgcctttcacaatgcgaataaaaggactgctgttgttgctacgtctatcttcatgctcatgaatgggtatgagctcaccgccccgggagacgacttagtcgaaatcgctgttgcggtcgtgacggaagaaatcacccgggaaaggcttgaagattttctatatcactggcatcgaccaatcgaagagcttgaatcgctaggcaacgagagcctgaggcgcctgattgatcgcaccatgatcggctaatgtttttatggaactaatgagtctgctcagccaaagccccgcacctagcggggcttttccgtgcgcaaggaggcgccatgcgacaacgaagaagacctcgctcactactcctatacctagcctatccagcgatatctttggccaccgtctgggcagggtacgaactgcgactgcactacctcgaccagcgcatggagcgggtacaagagcaactcgcaaacctagcaccgaagtcggcgacctcgcatcgcatcccggtgtaccagcctaacgaggcggatatccagcgcgcgcgcgctgagcagaatgcgcgccacgagaaagcgcgcatagcccaagccaagcaagacgcttgggcaagcttttaccagccaccgccacgctgcatctatcccgaagacagcaagcgcgctgccgtatgccaagcgaataagcgcaagcagcaagaggcgttcgagtcagcgtgggcgcagcgataatcccgccagccctgctctcgatgtcctcattacttccgcagggctgacctagctaaaacaaggtgtcgccgaagaaccaagttcctttcaattcagtggccgaagctgcagctgctgggtactggaaggctggcaactgtcggtagcccaaaacgattcctcggggtcgatagcaccgtgaaaggactagcttagctacttgttacttctgctcccctgtgtagacctaagcacatgagacggcaccgcgtagccatcggctctcgtattggcggtatgggactctgtgaataaaaatctacctcgctcaaggccggcatagtagcgtcgcaccttttggacatgacgggtcaagggggctgcgtggatagcaacaaaccagatagctatagataccagatcgggccagggcctgagcttctgcagcaaatcggacaaattctcgtcaaccactcggagtgcgagagggcgatattcggcatcttcaagggcgtactaaatcttagcgagaacgatgcatatctgctggcaaagcagaacattttgaatgcggaaaaaatggcaaacatcattctcgaggaaagagatcggattcaaccttctcttcttcaagccccccttgaagaagccatcagactttttagaagctcgattcaactgagaaacgaagttgcgcattggcagtgggcagtcactgatgggcagtcgggcttcgcctctaactcaatcaagggcaaaccaagctctacgattcagggaaaagaatatgacctccctcaattgcgagacggtgcatggcttctggctaaagcggcaactctgctaaaccaggtggcaatcagtatgtttgcaagggacgtttcgatgctctccggcccaacttggcaaccgtccggataccgcttcgacacatcgctaaatgagctaatggttaacttcgcgttggatcggactaggaaaatgctggagcgcatcgaggccgagcttcatgattcctcgctgcgtccatcttgagcatgttctggggcgatgcggattgcattagtccagatgcttacaggctcagcatctggacgccgccgccagcaacgatcgctagcccccattgagctggcgaagcgccctgccataacgatcttcgatttccttccggccctttcggactttttccgcctgctcgaaagcttccttggcctggtgtgctttccacgcgatctgctttcctagctccttacgctcagagtctgtcgaagccatcaactcggcggcctgcctctctagggcggggacgtccacatatcgaaatcgtttttgttcctcccagtcagcatcggacgaaccggttagcctcggcgaaactgatgttggtgggggattcacagagacctgttgatcgcggctagacgcagcccctccgcatgggcggtccgagaacgcaacgcctccgccaggtgaagagcatttgtacacttcagcattaacggtgaacggtaacagcagtaacccaaccagcagcattctcatcagcgattccttttcctactcggcgatgctcgaagcatcaaatcctttcacctgctattgaatgctggaattcgtttagcttcgccttaacagcggctcggcggtcgtccggctcaatgtcttcgagctgcctggaagcccacgctcgccattcagagcgctgcgagcagcggccggaaagaatgcggttgtattcacgatcaacaatttccgcctcgacagctttcaagcgatagcgatcaagcgcctctcgttgctgctgggcgattgaatctctctgctcggcagttaggtctgcaaggttatggctcatcctcaaccctcagcgtcgcgttcgaatttcataccagccacatccgcactagcgctgattccagtgcaaggtcgacgccgcccggagcccactctttttcccttagaagttggcctaccggggtcgaatctccgacactacccgcagggatcactagtacgaaaattcggaccgggcagtcaatttcttgaagtcgttcaatgtcactgcgcacggaccaatcaccatcaaggcatttagtctgtgcccagtcgcctaagcatttcacctcggcgaccatcactggcgaaccgtcggccgcctccgagtacagatctgcttttcgtcgctgtccaaagccatggtctgtccagatctcgacccgcttgtgataccaggcgtacaggctgatctccgcttgaatccagtgctcgcggcagctattgagctggaccacctgaccgaggcgatcatctattgaccttaaagctcgctggagcagtccaatccattcggtacccgtcatgacccgctccatatcgtaatcatccaatgatgccattttgctgctgcaggggcgtctagctatatggcggcgagtcaggcttgatacgaaacctgggaacattaatcctgtaatgtcgcctgtccatctcagccctgaaatagtcaacacgccgcccgattctattggaggcggctttgactgcgctgatcagtcgagtcctgccctcatcatccgttttgcagcctgcgataacgcaggtcagcattgaggcttcgtatgttgggaagggggaagagcctgttcgccggatgacgcggtgctctttctcataagcccattcgctagctttggataaaagcacgctttccaaaagctttgagtgatcgaactcaggttcgcaaacatctagcatcggtctgtcgtttgtgtagtgcacgggcagcggtaccatttttttctcagccaaaaaagatgccgcccctgtaatgggcactttcagctcaactacaaaccccctgtgaaaatctgcatagtgtgaccacatcaagatgtttgtagggtcactggataagcagcagatgctgacgcccttcaacatttcgcgaagtagttcaccctcgcccgtgtacaccctcagacggttgttcacttgctggttggctaaaaacttcttggctgggctgaggcgggcatgtccgatttctgcctcgatttgaggccgtcgcgccgcatatctggaaattgtcgcgggcaggacgaaaggctggcaatcaaacgggtcattgaaactgaatggatctgaaaacttgatcgtgccttcagtcagcacgcaaagggagccagcgtctagtggcagatatttgtagagaaaaatatgggacacggcgatcttgccaaggcaaagcatgacagtttagccaacgcgtttgatgaggagccatgcgtttcgtagctatagtcatgctgtattgccgtcaagctgcttgaagtacccttccaggagtccaggcaggtggtcgtctattcctgcggctatgttccgagcgcgacgcgaacgatctctctttgaatcgtaagcatgtggccgccagcttagggtagcgccgcttaatcactaagtgagtggcggtgggttgctcagctaagccaaagcagcggagggtcctcccagagggcccgcccggtcgcggggtaattggggcccgcctcttagcttcatacgaactttttccagagagaccgtttccggttccggttggtgtgttaagccacgtcctgcctgcgtatacggcccgtatggcgcggaaacgcatcgggcacggccccggactactaaacaacaaccagcccctcagaaacgctcataaatagcgaaaggtcgggccccaattaccccgcgtggggtggggtacccgaggaggacccatggctaccccctacctcggccgagcgaagcgcttgatcatctcgttcaatgctttctcgaactcacctggcaggcgctgttcaacgtatcgctcggcaatctgatggaacggcaggcgcctcgagtaggtaggcttatcaacgaacgcgagcagcaccgacattccggccttgcctcgcgaggtgcgctgaccaatgccgataggcttcttgttccggtacatcacgaagtaccgactggatttcttcttgatgcctgccagcgcttttgtcacgtcaccgcgcttgatgttgccaaaccggtcgagctgagcgcccttgcctggcacaacgtacttaccaactggcagcagcccatcctttcgaagctgacgctcactgcccttatctgcgcgtggcccgccgaatatctgcggttgcagccaaaccgagggaggttgagtgctgccacgcctgttaccgcctaccgtttccctgagccagaccctggcttctagcttctccctggtcgcggcgtggtattcgaacgctctcagggtaaagggcgtgggcctgtcgaagattgcgcccatctctgcggtaagcgcctgtctcaagccaaccgctgtcttggtcagcgccgcggcggcagcgtatggcatcgccttctgctcgatatccttcagctcttgaagctgcttggagaggcctttggcgctgaccttgatcatcgttatcagctctcgcccagacagccggtagcttcgtcgcggctcgagcagtccagcctgcccagtgtgaagccggtgatatctgccacgcgtccgcgccaaagcattccggtgtcagttggcaggacggtaccggcgttgaaaacgcgcgcgtctttcaagtgaatgaagcgcggaagatcagttacttcgttcagggttggctcggccaggctttcagctgttggctcggcgcgcacaaagtccagcttccagtcctcgattgtttcgagcatcagttccttctctgcttgaggccaccccttggttaaacgagcggcgtagaggtcaaaatactcggctccaccaatcatctcgccgctaatgattcccgccggtgtggtcagaactacggttacctggcccactgcgcccgtgtttactagctccaccaagtgctgaagaagccagtcagggttattagctgatgcctgtagttgtgtttccattggtgactcctgctgtaattgggttacttgctggttttatctgtgggtcttgccgaacttcctggcagccaaccgcagttcatctacctgcttgtgctcgacatacatcgtgaagctctgctcactgtttatgccgagatccacacggcctagataaggcatgtctcggcctgccgtagcggcttgctcaagctggtcgcccatccgcgggaattgaggagtaaggccagagggtgttacgagcccgccaacggcatagccgcccatccgcgattccagctcccgcatcgtggcgcggtatcccctcctgcggattcgctcgaggaactcaagggcgcccggctcgttgactacttcctggggctgaacgtgttcgcctgcgtgaacaacgccggccggcttgtacttaccgcctgggccagtccagccgcctgttgcgaattcatcactcgggaattgagaaaagctgttgccgttctggtagatcttcggcgagccgcctgcaactggcgtgaccgggataatcaactgctgctgtagggtttgggcaagggcggcgacttgctgctgtgctgccgatacggctgccggatccacctgtggcgtgatggcgggggccagtggggcggcaccggtactgccaccttcactcggctttgccgcggtcgtgatgatcgaaataggcttcccagccaggttgctcagttcgatgatctgctgacgtgctgtctcgagcgccgcgtcgtccagcttcacggtgatggtggttttagaaaggctgtcgagaaggaacttgaggtcgatgccctttttctgcaactcgtccagggccgtctttgctttgtcgacattgatctgatcggctgcctcttcgatcccttgcagcgagcgaatgaacccctggaagccgaacgtgttttccccagcgtctgccagatcctgaagcatcttgagcgcagcctgcgcatactgcttcgccccctcaacgtcaccactggtcagcgcctggctagcctttactttcagatcttgggcgcccgcatacgaagcggtaccgccgccgcccaagccagcaagcgcctcggtataacgctgctgggtttcgagctgggcctgcttggctttctctagatcctgagtcgctttgcgctcgagcgcgacctgtttgttcaggtacgcctcggcattcttcaacgcctcgctctgtttggtcttcagatcgccgacatacttggtgaagtggcggaacctattttcgtcggccgcaatttgttcctcggcagcggccttttgctgttcggctgcttttttgccgccttcctgcatctgccgataagcctcgagggtcatgccggcgatcttggcgttcatcgcctcgatcttcccttcaagctctttcacccaatcgtcgagttgcttggtatccataaagaacgtggcggttgggcggcctatgaagtcgccgccatctcgagccgctttgacgccagcgagcgtcttcttcagcttctccagttcatcaatattcccggaagcgtttgctgcggcgaaggccagttccttggcaaatgcagtgaattcgcgagcggcggtgatggtgtacccggcgagggtcgccatacctgcggcgagatcgtttagcgcctggacggtggcggggtcagtcagtagctcacgcagctttgtaatagcagtgacgaggcctgaactgtcgccttcgccgaaggctttaaccaggtcattccgaagtcgggtcagtgcgttgcccaccgtgtccggaagcttctcggcggccttggttaggcctggcagggcttggacggtcaggtcggtgatcacttcagcagtaagctgaccctctgccgccattgcacgaagcgcacctgttggaacgccgaggccttgggccattgctcgcagcagcggcggggcggcctcagcaatagcgttgaactcttcgccgcgcagaacaccagagcccattgcctgcgagaactgttgaagcactgatgccgtttcgccggttgttgctccgttgatcttcagcgccttgctgagcgcgtcgacaaccttcgtcgcgtcacctttgcggcctacttcatcaagggcgggggccagcctggcataaagcttcacaatctcatcgactggggcagcggtgttctgcgcgatggtgaatagctcagcctggacgcggttgaattcctcctggctgctggtggccaacttgagctgagcatccatttgtttcgctgtgtcggtgatttcggcataaccgcgcagcgcctgggcggagctataagccgcgccgacaccggctgcaatggagccagccccgatcctgttgccaccaactttctgctgttcgccggccattccacgcagagccacgcgagactcattgatccgctgcgtgaggttgcgctgggcaatctccagctctttggcagtcaaagatccggacttgcgcagaagctcatattgcccgcggagccggtcaatctgcgtgccggccgcccgatactgagtgataccgagggagcttttagcttgctcgatgttggctagtcgctgctgccgagtcacctcggaaagtgcatttgctcgctcacgaataccccgcaccgctaggtcgttacgaccggccgtcatgcctttggccagctcggcttcaaggcgctgctgctcggtggcgagcttccgagtatctactccagcggcacgcagctcggcgcgttgctcccgaactttggccttctgtcggtcgaactcagcagaggctcgagcaagcgcgcgctccgccttgctcatctcagcggccaggcctttgaccggagcgccagaggtggctgccattgccttggccaactgctcaacgctgcgcttggcgacggagagctctgccgctgcggcctttgcgctctcctgggtcgtcttgagcgcgtcgatctgccgaagcggcttttcaaccgctttgaccatctcggcatattccttccggaacccggctacttctttcttagccgcgttcagatcggtggaaaacttaagctcaacgtttgccattcaaggctccagtactggccattgccgataggaagaatgaccaggggtagtagggggtctgtgtgtgccccagttgcaccatcgcggcgatacagcgatccagttcttttagccttgtgcttccagaggaacccagcccaggcgcctccggaacccgaaaaaatctgtgttcagctccttgcagagagcgattacttcgcgaacctgggacggccgtagggcgttgatctggtcggtggtcatcgaagtcatgcgacaaatgtcagccaccgagcactcttcaaaaaagccgtcatcaaccaggtcgcgcggtgccgggtcaggcttctgcatatccgcgagccaggtacgtacctggagcacggtcagctcacgaacgatgacagagaggtcgcctatcatcagttccttggaattggtggtttgggtcattgtttcgctcctggtctttggatgcgcgccgttcgttggcgccagatgctttctgttgttaccgatggggctggcgtcactggcacaagaaccgggaccgactgggcgaccgtcgcaacgggcgccgcctggcctgttaaatacccggttttaggggcatttgatttgggtgtgctggatgtgacggctggttttaccgtagcgctcggtgcgaacggcttgccggcgttcaggcttgcaaccaggctctcgaaggatccaaggcagtgtgcgaggccagctttcacagctgccgcccctactttcatgcccccgtaatcgcccataaccgccagtcggtcgggcttaactccgaggttgcgcgccacctttgcggcgaacacatcccccagtgcgtcgattgtttcggagaccttcgcgcgcccctgctcggtcgcaaggtcgggccgtttgttcggcgcgttgcggctgacaataggttgcgccgcggggttgggttggaacgtggccgctacaccgatgctccccaccagcgcggttgcatcaatcacgatctggctggctgcgctggcaatccagtacgcagcgctagccccggtgccaccgacgtacgcgacgatcttcttttttgctctggcggcgaagaccatctcggcaagttcgttgatgccgctggcctcgccaccagggctatcgatgttgagcacgatcgccttgatggcggcattgtccagcgctgcccggaaatcgagtgcaatcacctccgtgctgacatagcgagggttggcataacgaagaatcgggccaatcacgtttaggacggccaccccgttccgcactgtgaccgtgtgtgttcctatcatccgtgggccggtgtgtccgttcattgcttcaatggtttttagagggtgctcgtatccactcgaagcactcggcaacatgagccatgggcggccgtctgcgaatccgtattcatagcaattcatggcagtgtcttttccgagatacggctgttgattgaaggcatgacaggtatggccagatctgcttggtgccggccgccgctcccgagggtccccgatgcaggaggtggagcgcgccggctgtcggggttactacgccactggccgactgggcgccttgcaggttgattcaggggcgcaacgcatcgacatcgatagcaccgctggaatctcgtacttgcctggcagtaatcggcgcaccaccatccctcgcagtaagcggaatgtgcaggtcatccatcgcgcgagaattgcggctgattgcccaatccacggcaatgatctgagcggccagcgccgacatctcgcttgccattgcgtcccaccgtgcgccgagcttgtggcgtacggcgagcaggcgccgctcacgagcgttatcaaagcgctgcctttccgcggctcgcttctcctcaatcgagtcaacctgactttgcagtgcttggaggatgacggcctgtcgagcggtcttgcgctggatttgctcgagcgcttcggaacgactatttagcgcctccagagccgcggcttcttcaggctcgctgccgtgggccattgcggctgcgtatgcctcagcggcttggttctcaccttgctgtgcagtggcgagttctgtttcggtagctgcttgcaacttagccagcttggcgctggccttgtcatagtcggtatcaagcactgccaacgccttgcctgcagcgtccatctctttcttggctgctttcatttcagcttcggcgttctcgcgcgcagccttccacttcagcagttcgtcgcgtttcgcgatttcccggccaagccggtctatctcgccttcggtggcgcggagctcgtcgtgcatcccgctaatgggccgcttcgcggcggcgctgtcgttcgttgcaacttcgatatcgctgcgcagggaatcagcgagcgcgtgcgcttctgcaagctgatcttctagggcgggctcttggggctcgctgagtagtttcagtccgaacacggtgtgtctccttgagtcaggcgtcttcgatcgagacgctgctgcgattgagtaagagggcttcagtcaggcgctcggcgcggctgaacgcgtcctcctgggtttcgccttggagcactgccagggttcggccctcgtgcttgaggcgagcgtgatacttcggtgagagcccgctatggaaggggcttggctgctggtcgaagacagagatggcgagcgctttcatcgggtcgccgggagcaggtcgtagctgttcacgtaagccaagtcgaccacacgaatatcgacgccaacgccgaagatgcgaatgcggccagaaggaagcgtttcgatcagcaggcctctctgttcgacgagccgttggatctcatcgcgcttgtgtgcgagctgtgcggctctggtagtcatacgaaaagctcccggcagctgacgaagggcttgttctcgctaagtgcgatgagcagggcgctggccggaatgctgcccttatctgccgcgtcacgaatgcgagaccaagctgcggccagttccgctcggttgggacgcacctggcggcctctcggtttttcgatggtactcataactgcctcatgtaaagaaacaggacatgtcgtctatagggccatgttacgctcgatttgccctgatgcaagcttttactggttgtgcatccagtgctggttggtgcgtgcagcacttgcttagttggatcggttgaaggccatcgacaggatctgtccgaaaaaagctggaccatcggtctcggcgagggggtaggggaaaggcggagataccgcagaagggcgcgcgtggaatcgacgatcgctatggcggatgtttcacccaataaaaaccccgcacggggcggggtctggtgttactacggaggtttcgtagtttcaggatggcaacacgacttctcgcaacgccttctcgtcgaaattttcccactcgttgaggctgtcgcggccgaacagggcttgatttactgccgttcgatcggcccttaaagcgtccacatgcgcatggcttcctgcgcccctctcccgataccactcgaccaactggccgcgggcgcgcatctcattaagcaccgtccaatagtgaatggcgtggcgtcgctctgcttccagtaggtcatggatagctttctgttgttcgtcggtcaggtgggctaatacgctgttcattgttgagcctccaatccaagatcaaccgcatcaatgatcgcctttgccgactcaagcgcatgaagcatcagatatgcctggtttcctttgattgctacgccttccccggcggctgagagcgcgtcgaaaagcatggatagcagactcgacgcctcttggagcgcagccgttgcgggcacgccaggacggacggacattacttcacgcgcggtcatatcctctgcggtacaaggataaaattgttcagctactgcgttcatggtgttactccttgagctgcggaccggtccggctgtctccctccctagggcgaccggatgtccgcaatatgtgtatgggttgtcgtattgatgtcggttggcttgaggcgcttcgtcggctagcgcacctccacgccaggccagcatcctcggccgctggcattagccaacgcttcagtgcgggtaactgggcgatcaaaaatcatctgacgggggccgtgcccggggatgattgcagtccaacaggtgcggcgtgcctcgccgtcattcgctgcgatctccgccatgagctcaatgcggtgcagcttgatgtagtgacgctgctccttggtcagcttgctggacggcgagacaaccagtcggttgcctcgtacctttgcgtcgaaaccgtgcgctttgagatagtcgatggcagccatcagaaaagctcctcgtcatcaccggcactaccttccagcggaaccggctctctatccgcgacagcgcgacagcccgcgtcatccgtggctttcagcgcttttttatccgcgacagagctgccctgtgtcgcggatgaaatatcgctacaacccgcgtcattgctggattgtcgcgttgtcgcggatgcaagggagggcacagcggagaggtagcggtcccaggcttctaagaagtcgcttcgctcatagcctttcttgttgattgccccgatacggatgtccttcgacttgatcccaaactcgccaagcttggtcgaaagctgacgtgggctcatcggcttgccacggttccaggtaacccacggcgcttcttcgtcttcaacaagagcctccagcaaagcagcgctgaaaaccttcgctgcatgcttcgcgtcgaataccgttttgatatcggttagcagttcaacaccgatgctgggcgagtcgtcctcgacgtcgtgtaggtttctcgccgcctgccgtgcaatcgtcggccactcacctccagctgcctcggcaatggcgagcagtggctcccagcagtcgttcgctcggtcgttgagccccttgatcgtctccggccgcgccttgccgatctgctcggcgttgtcctcagcgaagcgcagcattcgcgaccgcaggttggtccaaaggtcggggtctgaatggcgtagaacttcgacctgctcacctggcaggcgacgacggagccgcaacgggatgctgcggtcggccagggtgtcagcgatcttgccaatgccgcagagggctttcgctccccaaacgcgaaacggtgtgggcatgtggtcgtcaccaacgcagcgaataacgactgcgctgtcacgggtgaagccggcgttgaggatgccgcgcgcctcttcattgtcgcgaaggaacgcatccacctcatcgatcatcaacgtgggtgaccagagctcaatggatcgaaacagggcagctgaagcgatgtttgaaacctgaagcttgcggttcaccagattgcccagtgtggtgagcatgatcgacttaccgcaccgcttttccggagcggtgatgttggcgattggcgcgacctgtaccgagtcgatcaaccaggtaaacgtagcccagagcgctgcagcctgaatcgtcgcagcgtcggcgatcacgtgtcgcttgatggcttgactgatctcatcaagcagttcggcaccatcaacgggatgtggccacggactgacctcggcaaatatgcctccgcccactgtcgccttttcctcgtcgtcctgcgcggtgagccgatcgaagtccaccatggagagggctttggtttccttcacctgctggcgcagtcgtgcccacgctgcaggatccttcgagcggatgcgcttcagctcagctagaacagtcggttcatagagcgcaccggcatccttcgccagccgcctcacggcgtcatcgattggcttcttagtatttaaggcaacgacatttccgtcattcatggccggcgctccatctctgcagatcattgaaatctgttagctcaatcggcgcgccctccggccactctggaaaagcaacgtcggcgcctatggcgatggccgcagcggttgctgccgtccggccggggttgccttcggtttgccggtcgtcgtcacccgcaatcacgatctggagggcggatccgtgcctgctgcgaagtgcttgagcgactggctttaggttgcccgcgttcatcgcacaggcgaccgcagcgcctgtttgcgcatggatggtggcgccagtagcccagccctcacacacatacagaggcagccccggctcaagcgcaccgataggcgagtaggccccccttacgcgaccgccagaaaggaaccgcttggtcccgtccgcggtgatccgctgcagattgcacagcgcgccatcgacatagagaggaacaagcaggacatcacccaattggcgcaggcggtaagcacctacatgcttggctgcaaggtagggatagtcttcacatgctggccgcgcatcactccaaagccgtgacgcatagtcagctgcggccgcttggcggcgcgcctgatctgcttcccgctggctcttggcgtgctcgatacgctggcgaatcaaatccgcctcgagatgatccgaaggcttgcggctgctccagttgtgccacgtgccagagtccttccaactaccgaacgcaccggatgcgatgccatcaaggaacaacacgtaccagccgtttagcgcccctggcttatcgcctggcactttgaatcggtggattgatccatctggttcaggtagccagtcgagcggaccgaacgtggcctgcagggcatcccgaaattgaatctcaggggctgcgttcatgcgcgctccttcggcggagtgtgccgctcggcgaggcgttgaagttgctgagtaaggcgatccaactctgagaagtgtgagcagtcttcgccttcttttatgcacagttcgaggaagccgattagcgtttccaccagcagggtgtagctcgccctatcgatatgtggtggctcgccagaggctcgattgagcggaacgacggtcatggcagtgcctccacgagaccactgaaatacatgtcttctttggctttcttcaggcaagccgatcccgtcggcgcgagtgcgccgttttgatttctcatggcttattcctcgtcgcttaggctggcgagccaggctttttcgttgaatgcgagcccggcgttgatccgcttctggatcgcttttttgtcggcctgttcgaggctcatgccgagctcattaaccgatgcggccagccatttgctcaccgtctccatgaacccgcctgcctggcctcgtagcgttacgagctcttcttggttggcgtttgcagcacgatcaatccaagacatgcatatctggcccagcacaaaactgttgaacggggcgctgcgttcttcccgcaagaaaacgagggccgaggtgccagcggccgcacctgctctccaaccgccctcatagccgccagtcagtggaacatcccaagcggagatggcaccgttctcgagcttgtggtggcttcgccctacaaaggggaggcggtgaaaaggatgcttacggcgcggcttgtacttcacggcggaggtcattgcacaccgccttccagggcgcgagccttggtcatgtgggcgttgtagcgggagaggcgtacggagaggctggagcagctgcgaagggcagccaacgccatggccttatgcgctgctgcgcgggctctggacggattgaggctgagggtgttgcgcatgggtggagctcctttgtcagttggagctgccgccttcgtcgccaaacgatagggtggcagctgtacgcaggttggcgaaccggggacaaagggacccggcatacccgaaggtatcccacgcacagccgccataactctggattgcaggcataaaaaaagcgcctgcaattcggaacggggcgctgttgcgcctttgtctctactcgagtcgccaaacccggtcgctgaatttgcagcgacggtttcactgtagacagatttagacaggagaacaagaggtttcatgctactgcccctcgtgccgcgattcgctctttgacccaggcttgcacttcagccagcacccagcccacaggtgcgcctcgtgctttgctatcgctcaacggtaccggccgaggaaaggagggatcgtccttgaggcgcttatagatggttggccttgcgaggccggtaatggccgccagctccggcatgcgaatgatggtggcggagggatcgaactgtagaaggctggatgcgctgctggcggccttgatcggctgaatgttgtccatatctgtttcccgtcattggtttagacggggtcagactgctgtagccgttccggcttaagccccaattggggtttgtttcaaccccattaaggtgcttcgttcagccttgcggcctctgcggcgcccttgaagaacttcacaatggtctcatcgcttgcgggcagctcaagcccatgccttgctgcgaccgctctcaatggctcgaccgccttatatggtgtcttgagatctaggccggacatagccgcaagggctgcaatgatttgctcggcgctcttccgctcgcgggaatgcatgggtttggcttctggctcgggtaccggcgcctgctcgcttacaccaagaacagtttgctcgaagcggtgaatctcggtggcagtgatcaccaagtcatctagcttcgagaaaccgttacttatcgcctggggcggcaggtctgcgccattggctttcagctcgctgctgaaccagcgaagaaagtttcgaacagccgggtatagatcatcaaaggtatacgaggcatgtttttctaatgtctgggaaccgcggaaagcgagacctacattcccctcgcctatataaatcagggtgcccttcgggatccctgttctatcgtctgcgtacgagcattggatgtttgcttgtagatccaccagcggatagaagcagtcagcaacaggccgaacacactccggaaaagtgaaggaaagctttggtgtttcttcatcgagccaacttatcgtcttccaagtgtgcttctcgacagaggcaagctcttcagaagagaagttgatcgtcgaaagcggaacgataaagaatattctgtcaccaggcaggtacgtgttgaccctacgatccaacaacagctgcaggaagtcatctttagacaggttgacccccagtgttttatttatccggactgcagcttcttcaagcgtgtagctgctcttcagggatagctcgaggtccatcatgcgtctcctgtcttggttgggcgcggtgtaacactggcgtttatggagttggccagctcgtccagatggtctgcataccactgcatcatcgtgcggcgctgctcgatataaatggctttgttgtaaacgccagcaacgccgtcttcaatatgtgagagctgggcctctacgtgttccttagggaagccgttttcacgcagtgttgtagatgcgatgtgacggaagccgtggccggtctgctgacctgcgtaacccatacgccgaagggccatgttgaatgccatattgcttctcggcttggtgcggtcattgcgccctggaaacaacagcggataagcaccggtgagctggtgcaactgctccagcgcctcaagcgcctggcgggagagaggcaccgtatgcgggcgacgtttcttcatgcggtcagctggaatcttccacagcccagccttgcggtcgaattcatcccaacgggcttcccgcagctcactcgggcgcacgccggtcagcatcagcaggcgcaggccgaggcgcagatcatgggcgtgagggtaggcgctgattgcccttaatagagtgggcagatccttcgccgtaacgtgggcgtagttctcagccggcttggattggagaaagcggctcagcccttccaaggggttatgcacggcgcgaccagtgacgcgagcaaggtcgtagatttccttgcaggatctgcgcacccggctcatctgctcgatgatgcccagccgttccatgccttgcagaaactccatccactcgatcggcaggatgctggcatacaagcgctggccgaataccgggaagacatggagctccagcgcgccgatgttgcgggtcgccgtgctgtctgcccagcccggccggcgaatctctatccactcgcgcgccagagcctcaaaagtgctgttagctgcttcgagggcagaagccttgcgtgcatgtttggcggttagtggattgacgccatcggccgcatcggcgcgaagctccgcagctttctgcctggcgccggcaccgcttacttctgggtagctgcccaggccaagccatgaccacttaccgtcgggctttttgtagcgcagctcccaggacttgccaccgttgggcttgaccctgaaatacagcccttgggcatcgtgttccctgtaagcggcggcttcgggctccaggccggctagggtcgtatccgccatcggacgacgcttgatctcgctgcgcttcatgcttgtatgccgctggttcgaattttccgtcagcatacaagctggcatacacggtgggaaggtataggggtaaacgaggatatacagccagatacaagaaagcccgcacgggcgggcttcttggggtgtttcgtagactgctagagacaggtcgaaacagctatttggcgcatccggcgggattcgaacccacgacccctgccttcggagggcagtactctatccagctgagctacggatgcgttgcggggcgcaatcatacgcatgtcctcggcggccgtccatggcggttcggcggctatgcggtggatggtctgtagactgcgctaagttgcctgccggccatcaggttgggctatggtgcgttaatttttccgaacatggtgttgcctgttaacaagcgataggcctagcattcgttcgggatttcaaacgccttcgagcaataggaacccatcgcttgcctcttgctctgacgtagctcaggcggttccatcaccaatcgcctcttattggccagacggccccggcccactcaccggcatcgcgccggcgctcaggagactgccatgcaactcaaagacacttcgctgttccgccagctggcctatatcgacggagcctggcaggacgcggacagcggccagaccatcaaggtcaacaacccggccagtaacgagattctcggtacggtgccgaagatgggtgccgccgaaacccgtcgcgccatcgaggcggccgagcgtgcgctgccggcctggcgtgacctgaccgccaaggagcgttcgcagaagctgcgccgctggttcgaactgatgatggagaaccaggacgatctgggccggctgatgacgctggagcagggcaagccgctggccgagtccaagggcgagatcgcctatgccgcgtcctttatcgagtggttcgccgaagaggccaagcgcatctatggcgacaccattccgggacatcagaaagacaagcgcatcatcgtcatcaagcagccgatcggtgtcaccgccgccatcacgccgtggaatttcccggcggcgatgatcactcgcaaggccggcccggcgttggcggccggttgcaccatggtgctcaagccggcgagccagacgccgttctccgcgctggccctggccgagctggccgagcgagccgggattcccaagggcgtgttcagcgtgatcaccggttcggccggcgacatcggcgacgagctgaccgccaacccgaccgtacgcaagatcaccttcaccggctccaccgaagtcggcgccaagctaatggctcagtgcgcaccggggatcaagaaggtttcgctggagctgggcggcaacgcgccgttcctggtgttcgacgatgccgatctcgacgaggcggtgaaaggcgccatgcagtccaagtaccgcaacgctggccagacctgcgtctgcgtcaaccgcatctatgtgcagaacggcgtctacgacgagttcgccaagaaattccaggcggcggtggagaagctgaaagtcggcaatggcctggaagagggcaccgacatcggcccgctgatcgacgaccgcgcggcggccaaggtcagagagcacatcgaagatgccgtcgccaacggcgcgcaagtggtcaccggcggcaaggcgcaccagatgggcggcagctatttcgagccgacgctgatggtcaatgtgccgcacaacgccaaggtggccaaggaggagaccttcggtccgctggcgccgctgttccgcttcgaagacgaagccgagggcatcgccctggccaacgacaccgagttcggcctggccgcgtacttctatgcgcgggacctgggtcgcgtgttccgcgtggccgaggccatcgagtcggggatgatcggcatcaacaccgggatgatctccaccgaggtggcaccgttcggtggcgtgaaatcttccggcctggggcgtgaagggtccaagtacggcatcgaggattacctggagatcaagtacctctgcctggggttgtaaaacgccgcgcggtgccaaaaggagccagttcccgttcgggactggctcctttttcgtttatggcagcttatcccgctggtcaataaaccgatccgccgccgcctaatcgcgccgcggtctgctgtcattacagaccgaattggcgcgtgattcccgctggtcgcgtcgattggttggggaacatgggcgaagaggtgatgcccggtgcgctacgtagcgttgtggcagctgccgatcgaagcgattgtcgcaacgctctcgacatgcagaaatgactcgactattctgctgtgcgaaacatagttccgtgaaattacaaatccaatcatcatttcacacgcggaggcctgccatgacggatgtcgtacggctcgaacttcagggcgagatcgctctgatcacggtcaacaacccaccggtcaatgcacttggccatgccgtgcgcgagggcctgctgcaggcctttcagaacgccgaggcgaattcgcaggtgcgcgccgtggtgttggtctgcgagggcaatacctttattgccggcgccgacatcaaggagtttggcaagccgccgcaggcaccgagcctgccggaggtgatcgaggttatcgagggcggcagcaagccgagcgtcgccgtcattcatggcactgcgctgggtggcgggttggaagtcgcgctgggctgccattaccgtatcgcccgaaaagacgccaaggtcgggctgccggaagtgaagctgggcctgctgcccggcgccggcggtacccagcggctgccgcggttggccggcgtcgccaaggcgctggacatgatcgtcagcggcacgccgatcggcgcggctgaggccgtcgagcaaaacatcgtcgatgagctgttcgacggcgagctggccgaggcgggtatcggctttgcgcgccgtctgctcaatgccgaccgcggcccgcgtcgcagcggcgagcaaacgttcggcctggaaggcgccgacaacgaggcgttgatccgcgccaaacacgccgaagtcgccaagcgcatgcccgggctgttctcaccgctgcgctgcatcgctgcagtcgaagcggcgacccagctgccgctggccgagggcctcaagcgcgagcgtgagttgttcgccgagtgcctgaactcgccgcaacgcggcgcgctgatccattccttcttcgccgaacgccaggcgagcaagatcaacgacctgccggccgatgtgaagccgcgggcgatcaacaccgctgcggtgattggcggcggcaccatgggcgtcgggatcgccctgtgcttcgccaatgccggggtgccggtgaagctgctggaaatcaacgaagaagcgctgcagcgcggcttgcaacgggcccgtgatacctacgcggccagcgtcaagcgaggcagcctgaccgagggggtgatggaacagcgcctcgaactggtcgaaggcgccaccgaatacgctgcgctggccgatgtcgacgtggtggtcgaggcagtattcgaggaaatcggcgtcaagcagcaggtgttcgagcagctggacgcggtgtgcaagcccggtgcgatcctcgcgtccaacacgtcatcgctggatctgaacgccatcgccgccttcaccaagcgccccgaagatgtggtcggcctgcatttcttcagcccggccaacgtgatgcgcctgctggaagtggtgcgcggcgagaagaccagccatgaggtgctggccaccgccatggccatcggcaagaaactgaagaaggtctcggtggtggtgggcgtctgcgatggcttcgttggcaaccgcatggtcttccagtacgggcgtgaggcggaattcctattggaggaaggcgccacgccgcaacaggtagacggcgcactgcgcaacttcggcatggccatgggccccttcgccatgcgcgatctgtccggccttgatatcggccaggcgatccgcaagcgccagcgcgcgacgctgccggcgcatctggatttcccgaccgtgtccgacaagctctgcgccgccggcatgctcgggcagaagaccggcgccggctactaccgctacgagccgggcaaccgcacgccgctggagaaccctgagctggcgcctatgctggaagctgcgtcgcgggaaaagggcatcgagcgaaaggcgctggacgagcaatacatcatcgagcggaccatttatgcgctggtcaacgagggcgcgaagatccttgaagaaggcatcgcccagcgctccagcgacatcgacatcatttacctgaacggctacggcttccctgccttccgtggcggcccgatgttctatgccgacagcgtcggcctggacaaggtgctggcgcgggtcaaggagctgcacgcacgttgcggcgactggtggaagccagcgccactgctggaaaaactggccgccgaaggccgcaccttcaccgaatggcaggccgggcaatgagcgccgcccgcctgcaatctgccgatcggacatcgaggatccatccatgaacgtcaactacacggccgaagagctcgccttccgcgatgaagtgcgcgccttcctcaccaacgagctgcccgcggacatcgccgccaaggtcaagctcggcaagcacatgtccaaggaagaccaccagcgctggcagcagatcctggtcaagcgcggctggtacgcgccgggttggccggtcgaactgggcggcaccacctggggcccggtcgagaagcacatcttcgacgaggaatgcgccgccttcggcgcgccgcgcagcgtgcccttcggcgtcaacatggtcgccccggtgatcatcaagttcggcacccagcagcagaagggctattacctgccgcgcatcctctccggtgaagactggtggtgccagggctattccgagccgggcgccggttccgacctggccagcctgaagacccgcgccgtgcgtgacggcgaccactatgtggtcaacggccagaagacctggaccacgttggggcagcacgccaacatgatcttctgcctggtgcgtaccgaccctgaagcccagcagcagcgcggcatcagcttcctgttgatcgacatgagcacgccgggcatcagcgtgcggccgatcatcaccctggacggcgaccacgaggtcaacgaagtcttcttcgacaacgtccgcgtaccggtggaaaacctcgtcggcgaggaaaaccagggctggacctgcgccaagtacctgctgacccacgagcgcaccggcctggccggcattggcgcgtcgaaggcggcgctggcgcacctcaagcgcatcgccatgaaggaagtctgcgacggcaagccgatgctcgaagacccgctgttccgcgcccaggtcgcggaggtggaaatgcagctgatggccatcgagatgagcaccctgcgtatcctcgccgcagcgaaggagggtggtgtgcccggtgccgagtcctcgatcctgaaggtcaaaggcaccgaaatccgccaggccatcaccagcctgctgcgcaaggtgattggcccctacgcgctgccgttcctcgaagaagaactgcaactggactacgacggcgagctcttgcacgccgactacagcgcgtcgctggccggcgactatttcaacatgcgcaagctgtcgatcttcggcggctccaacgaaatccagaagaacatcgtctcgaagatgattctcgagctgtaagggggcaccgcaatggacttcaaactgactgaagagcagcaaatgctgcaagacaccgcggcgcgtctggtgcgcgacgcctacccgttcgagcagcgcgagaaattcagcgagtcggagctgggcttctccgccgagttctgggcgcagctgggcgagctgggcctgaccgccgtgccgttctccgaagaaattggcggctttggcggcggcggtgtggaaaccatgctggtgatgaccgagctggggcgcggcctgacgctggagccctacctgcaatcggttatctatggcggcggcctgcttaaccagctgggcagcgacgcgcagaaagaagatctgctgccccaggtggcggccggttcgctgcaactggcggtcgcgctcgacgagccacagagccattacaacctcaacgacgtgcagaccaaagccgaggcggcggacggcggctatcgtctttctggtcgcaaggctgtggtgattggcgggcacagcgccgggaagatcatcatctccgcgcgtactgccggtaacagccgcgacgaggccggcatcagcctgttccttatcgatccgagtgctcagggcgtgagccgtcgcgtgtacccgaccatcgatgggcgcaagggctgcgagctgttcctcgacaacgtgcaggtcggcgccgatgcgctgctcggcgaagtcggcaacgcgctcccggcgctgcgttatcagcagggccgcgccatcgccgcgcagtgtgccgatgcgctgggcagcatggatgaagcctgcaagctgaccctggactacctgaagacgcgcaagcagttcggcgtgccgatcggcaagttccaggtcctgcagcaccgcatggtggacatgcagaccgagctggaacaggccaccagcatggcgatcctcgccgcgacctttgccgatggtgaagacaacgacgaccgccgccgcatcatcgccgccgccaagtacatctgcgcccgcgctgcgcgcaaggtggccgaggaggcgatccagctgcacggcggcatcggcatgacgtgggaatacaacctcgcccaccacgccaagcgcctggtgatgatcgcccaccagttcggtgacgatgaccaccacctgaaggcgtacgcaaagttgatgcaggtggcgtgatcgcctgaccgcagcacagcaaccgggcccatggcccggttttgctttcctgacatctccgcagcgccagcgctgccgccgcatgccgccgcgtataggcctcgctcctgtaggagcgagctctgctcgcgaagaggccccagtatgctcggatgtataggtcagcctcgcgttctgcgttcggctacctcaccggctcgagaacagtcggctggttacggcttgtctgctccagctccgcagctcggtagggtggatgtcgccttttacatccactcggctggatcgagggcgcgttgctgcggtggatcggtggagcgtgatccaccctacgatgtcggcgtgacgcagggcggatatcgcggttcacttgaatgttgcggatggccaaagcggttatgtcgccgttgccagcgcagccgcctgatccttgtggtcctgctccagctcctgctccagctccggcagcaggtgttccgaccagagcgttggcttgaacgcatcgcggaagaagccgaaatggccgatgcgatcggcgccgacttcgctaggcgtaatccggcgcatggtctttggcgcgctggtatagaagccgtgcagcgattcggtgttgcgtgccgacatcatttcgtcatcgctgaacgagagcgacgtcagcggcgtgcggaccgcggcgaaggcctggcgtatcggctcgccttcaacaccgaccagatagtcgggatgcaggcaccagcgccgccattggcgaatgacgccggctggcagatcgccaacggcgccgatgcgatcccccgggaagtacccggcgatggctgtgagcgtcggcgccaggccgtgccagagcagccatgccttgcgccggatctgcgggctgttctcgcgccagtagccgctgcccgcggcgatggtgacgattctcgtaagccgctgatgaccttccaccagcggcaggatctgcgcaccgacactgtggccgacccagtagatcggcagctcaccagcagcgttacctaccgccgcgagcaccgcactgcagtcgtggcgggcccagtcgaggatgtccacctgaagctggcgcagcggaatgcggcgggaacggcccatgccgaggtagtcgaaggtgacgaccagatagccacgagtagccagccaggtggcgaacgcggcgtagaagcgttgcttgacgcccatagccggtgcgatcagcacagcaccacgcggcgcgccgttcggttggtaccagtaactggaaatcaagtggccgttgccgttgtcgatcgagcgctcttctgcctgtatcgtcgccatcttgttgttctccgctcttttgggtttgtcgcgagcaatgcagtatacgaacagcagaagataattctagaaaattattctagttcgccttggaggttggatggcccgcagtagccgtaaacaggaaatcctgcaggccgcgctcgcctgtttcaccgagcttggggtcgaggcgaccaccatcgagatgattcgcgaccgctccggcgccagcatcggcagcctctaccaccacttcggcaaccgcgagcggatcatcgcggcgctgtatctggaaggtatcggcgaatacgccgcgctattggaggccgggctgatcgagacgctggatgccgaggcgtgcgtgaagctgttcgtgaccagctacatcgactgggtggtggcgaaccccgattgggcgcgcttcgtgctgcacaaccgcggccgggtcgaggccggggagatgggcgagcggctgcgtgaggtcaatcaggcgcatggcgagcgggtcagcacgatcctgcggcgacaccgcgacagtggcgcctttcgacgaatgcccggcgattgtttcctggccgtggtgatcgggccctgccatgacatggcccgcaactggctggccgggcgctcacgcaccgcgctggccgattgtcgcgaattgctcgcggatatcgcgtgggccagcgtcagagcgcagtgactgcgagggctggccgtcagccttgcgctgaacggtcggcttgagccaagcgcatctcgctccggcctgatctcgccgagcgagcgatcagacgcccaggctttcgatatcccgggcaagcatttccagctggtgggccagggagccgcgtagcgtttcctcgctgagctggaacgagggcgcgccacaggtcagcgccatgatgctgccatcagccaggtgcagcggtaccccggctgccttgacgttgcggtcccaatcgccgagcgacaggcagaagccgtgccggcggaattcgtcgaaggagccttccagcgattgcttcatggcgggccattcatcgccgtacttggcttccagcgctgccatgaggtgctcacgctccttttccggagtggcggcgagaaaggcacggcctgcggaagtcgtcgccaatggcaggcgcacgccgacatccatgcgcaacgtcgaaacctcggcaggccgacaattttcgacgtagatcatcgacaggcggtcgcggcaggtcaggccgaccgaggtgttggtgcgccgggcgaactcgtccatatagggcttggccagctggcgaacgcgcagattggagacgtaggcgtaacccagcgccagcacgccggagtcgagctgatatttttccaactgctgggaatagctgaggtagccaagcttggtcagggtataggtcatgcgcgacacggtgggtttgggcagcccggtgatccgtgcgatgtcctgattgcccatcaccaccgaaccgtgggtaaaagcgcgcagcacgtccagcccgcgagacagcgcctcgacgaacttgcggtctttggggttctcgatgtcttcagcgtcgctcatgatggtgtcggtctttccggtagtgggcagcgggcgcgaacgatagcagatcgcctcggggccggcagtacggccccggcaggcgctggcaaccgtggcgagggaaggaaaatcctgcccggtggtggaaaacattgtttcatagtagtcgaaaaatcccacctttaatttcgcacagtaaaatcgtgattcgctggtttgcgtcgatacgcgtttgcagtgtttggctattcattaccgggaagcgcctgggcggtcggcgcctggtcgctggacgacggcgctcctggtggcgtcgtcggaaggttcgtttcatctattccgcaaactttttagccgacgaacggtaaagtcgcgcaaaggtgccccggcgcggtctaccggcgatcgaccgcaagcggtgcgctcagggaaaagtcactccgcgcttgttgctcggggggctttctgatataaagcagcgctcttttctaggggcccggtttcttcgcttgccgcgtagccggtaagaccccaatgaaacgtggcgctgagcgccgaaagacaagtgaattcaagcggccaacccatgccgggttgggcatgtggttttagagggctgaggcatgtcgagagtctgtcaagttaccggtaagggtccggtaaccgggaacaacatttcccacgcgaacaacaaaacccgtcgtcgttttctgccgaacctgcagcatcatcgcttctgggtcgagtccgaaaaccgcttcgtccgtctgcgcctgaccgccaagggcatgcgcgtcatcgacaagcgcggcatcgacgccgttctggctgaactccgcgctcgcggcgaaaaggtttaaggagaactatcatgcgtgacctgatccgtttggtgtccagcgccggtaccggccacttctacaccaccgacaagaacaagcgcactactcccgacaagatcgaaatcaagaagtacgatcctgtcgtgcgtaagcacgtgatctacaaggaagccaagatcaagtaattggtcggcccttgaaggaaaaacccgcctgttggcgggttttttcgtttctgggctccggttaagcggccttgcggatggcgtcggcgaggcgctcgatcatggcgtcgatatgctcgcgttcgacgatcagtgccggcgacagggcaatggtatcgccgctggcgcgcgccagcaggccgtcggcgaagcactggcggaacacgtcgtagccacgtttgccgacgccgtcggcatgcgccgcgaactgaataccggcaaccaggccgaccgtgcgaatgtccgtcacgctcggcagcccttgcaggctgaacagggcgtcctgccagtaggcttcgatctcgatgcctttctggaacaggttttcgcgctggtagatttcctgggtcgccaaggcggcagcgcaggccaccggatgaccggaataggtgtagccgtggaagaactcgatggtgctttccggcccctgcatgaaggcctcatgaatacgctcgtcgacgaacaccgcgcccatcggaatcgcgccgttggtcagccccttggcgcaggtgaggatatccggcgtgacgccccagcgctgcgcggcgaaggcctcgccgacacggccgaagccggtgatgacctcgtcgaagatcagcaggatgccgtgcttgcgggtgatctcccgcaggcgttgcagataaccctgcggcggcaggataacaccggccgagccggacatcggctcgacgatgaccgccgcgatgttctccgcgccgtgcagggtgacgaggcgctccagttcgtcggctttttcggcgccatgctccggcaagccgcggctgaaggcgttgcgttgcagatcgagcgtatgcggcaggtggtcgaccccgggcaacagcgcgccaaacgccttgcggttgttggccatgccccccaccgaaataccgccgaagccgacgccatggtaggccagctcgcgaccgatgagccgggtgcgactgccttggccgatcgcccgctgataggcgagggcaatcttcagcgcggtatcggccgactcggatcccgagttggtgaagaacacccggttcagcccggccgggctgatctgcgcgagccgctcggccagctcgaacggcagcgggtggcccatctgaaaggtcggcgcgaagtccagctgggcgatctgccggctcaccgcttcggtgatctcgcgccgaccgtgaccggcgttgcagcaccacaaccccgcggtaccgtcgatcacctggcgcccatcggtgtctgtgtaatacatgccctcggcccgctcgagcaggcgcgggttgcctttgaactggcggttggcggtgaaaggcatccagaagtgttcgacggactcgtgggtcatggcgcgctccggcagggctgttttggcggctatgctggtacacgatggtcttcacgcgtggccagcggtttcggcgagtctatgtttaataaaacgaacaaaacaaggtggaaacctgtcgccgcgtaaaaaatattgataggcctggcgcccctggtttagggtgcctttctgattagtcgactgtttaccgaggattctccatgaccaccctgacactcgccgattggcaacagcgcgcccgtgacctgcgcatcgaaggcagggccttcatccagggcgaatacaccgcaccgagcgccggcgccagcttcgattgcatcagtccggtcgatggccgcgtgctggcgcaggtggcgagctgtgacgaggccgacgccgatcgcgccgtgatcagtgcgcgcatggctttcgaatccggtgcctggtcgcgcatggcgccggccaagcgcaaggcgaccatgatccgcttcgccaacctgatccaggccaatgccgaggaactggcgctgctggaaaccctggacatgggcaagccgatcagcgattcgctgaatatcgatatcccgggatcggccaatgccctgcgctggtcgggcgaggcgatcgacaagatctacgacgaggtggccgcgacgccgcacgatcagctgggtctggtgacccgcgagccggtgggtgtcgtggcggccatcgtgccctggaatttcccgctgatgatggcctgctggaaactcggtccggcgttggccacgggtaactcggtgatactcaagccgtcggagaagtcgccgctcaccgccattcgcgtggcgcagctggccatcgaggcgggcattccggcaggcgtgctcaatgtgctgccgggctacgggcataccgtgggcaaggcgctggcgttgcacatggacgtcgacacgctggtcttcaccggctctacccgcgtcgccaagcaattgatgatctatgccggcgaatcgaacatgaagcgcgtctggctggaggcgggcggcaagagcccgaacatcgtcttcgccgatgcgccggatctgcaggccgcagcgcagtccgcggccagcgccatcgccttcaaccagggcgaggtctgtaccgcgggctcgcggctgctggtcgagagctcggtcaaggagcgtttcctgccaatggtggtggaggcgctcaagggctggaagccgggcaacccgctggacccggcgaccaacgtcggtgcgctggtcgacacccagcagctcgacaccgtgctcggctacatcgaagccggtcgcaatgacggcgcccaggtcctgatcggcggccaacgcaccatgcaggacaccggcgggctctatgtcgagccgaccatcttcgatggtgtcagcaacgcgatgaagatcgcgcgggaagagatcttcggcccggtgctgtcggtgatcaccttcgacacggcggccgaagcggtggccatcgccaacgacaccccgtacggcctcgccgctgcggtgtggacggcggatatttccaaggcgcacctgacggcgaaggcgctgcgggcgggtagcgtgtgggtcaaccaatacgacggtggcgacatgaccgcgccgtttggcggcttcaagcagtcgggtaacggtcgcgacaagtcactgcatgcctttgacaagtacaccgagctgaaggcgacctggatcaagttgtaagaaacagcttgaagcttgacgccgaaaggaaaagcttcggtagggtggatgtcgctttttacatccaccgtgacacctgcgtgcggcttcgattcgaccgtagtgtggatcggtgaagcgtgatccaccctacgttcgagccgcctttttggtttctctactgcccccaccgcccactgcggcgcatggcgccccattggtgcttgcgtcgggagaaccactgccagagtccgcggcaacgccagagggtattcagctggcggtagccgaaattttccagcacggccatgagaaacagccgcagcatgtcgcggcggcgttcgtaaacgcggaacgacatggtttccagcagcaggccattgaccgacagcaggatgcccatgccgatggcgaccagcagaaaggccgccagcgcggcgtaggacaccacgccaagggcgaagccgccgatcatgaagccgtaaccgatcaattcgatcagcggccccaaccattcgaacagcgccatgaatggccacgccagccagccgggggcgccgccgagaaagctgaaagccagccgcgcatgacggcccaggctttccgccaacccgcgttgccagcggctgcgctggcggccgagggtgccgatgtcttccgggcattcggtccagcagatcggatcgggtaggtagcggatgcggtagggaatgcgacgctcacggtgatggcgatgcagccgaaccaccagttccatgtcctcgccgacggtgtcggtgcgatagccgcctacggccattacccgctccttgtcgaacaggccgaaggcgccggagatgatcagcaccgcgttcatcggcgaccagccgagacgaccgaagagaaacgcgcgcaggtattcgacgatctggaaacgcgccaaccagttgctcggcagcccggcgcggatcaggaagccgccgcgcacctccgacccattggcgatgcgcaccgtgccgccggcggcgatggtgcgctcatcttcgagaaagggctggaccacgcgcaacaggctgtcgcgctggaggatggagtcggcatcgacgccacagaacagaccgtgccgtgcagcgttgatgcccgcattgagggcatcggccttgccgccgttggccttgtcgatcacccgcaggttggcgtagcgccgcgagcggtagatcgcctgcaccggctgatgcgcgaccgcctggcgcagcggctcggggtgcggcaccagctcgaattcctcgatcagcaccgccagcgtgttgtccttcgagccatcgttgatcaccaccacttcgaattcggggtactgcaactgcagcatcgagcgcaccgaggtccggatcgtcgcctcctcgttgaaggccggcatcagcaccgacacgggcggctccacgccgaggtagggcgcgatctcgccggtttcggcgcgtcgacggatatagcccatcaggctgaccatcgacagcacgttgagcagcaggtacatgccgttgaggagtaggaaatacaggatgaagcccagttggagccaccagagccaatcgatgttcaacgtctgacctccgcgatcgcacggcgcagtgcatcctggccgtagcggtcctcgacgcgctcgagcagcccttgcagccgttcgggcgtagcgttggggagcgttgccaggctgtccgcggccgcctggcggacccaccagctggggtcgcgcagcagcggcaggaacaacgcggtgtcgtcgctgcgcgcctgcttgtgcagcgcccagagcgcggccagccgcacgtcggcgtggtcatgctgcagcgtgtcgaccagccgatcacggtcgcgcgggtcggccagttcctgcaagcagcgcagcgcgacctgcagctgctcgggcgccacgttttcctccagacgcgcacgcgcccagggcgccgcatggcggggatcgccgtagaccagcaaactcactagccgctcgcggcctggatcttcggagccggtcagggcgatcagcaggggcagggtcactgcctgttcaccggcctgctggcacaggctggccaggcgcggcaaggcccagtcggggcgcgtcacggcggcgggcaggatcagttgcatcgcacgcggcgcatccatggcgatcagcgtctgggcggcggccagcgagacgatggcgttgcggctcagcagcagggcctgcaccgcttcccagtgcgcgggatcggccagatgccgcaggcaggtcagcccgatcagcttgccacgcacccggccatgtagcagggttcgcgcctgtcggtccatgccaagcgcgacgagtgccttgttcatccgctctcgtgcggtcccgcgcaattgcagttgggtacggttccattgcagcaagaaccacagctggcgattggcaggtagcgtcggcaccggctcggggagttgctcgccgaggctgcacaaggcgaagaatgggcgccactgctcgttgaattgctggcggcgaatggcccggcgccgggcgaactcaccgagcaacagcacctgcagcatcaccagcacggtgaggccgcccaggccaagggcgcaatacagcgccagctgcagcatgccgtcgtccggccagatcgccagccaggcgctgcggggcgctgtgcaaagccaggccggacagttgagttcagaaggcatgccgcagcccgagttgcagccagcggcgcgtgtagtaatcgccctggcgatgctggcccacttcccagctcagcgcccagcgactgtcgagccaatggcggccttgcaagctgatggcgcggacatcactggtgatcagttgctgctcctcgaccgcctcttcttcaccaacggtcaggcgtaggccggcatagctgagaccggcgtagtagtaatccagtgccaggtcgtgtccgatcggcgtgccggcattggccacgtccgtcacgttcagggtgtaacccgcgcgccacgaattccagtagcgctcgccactgagcgccagccggtcgacccgcgtggtttcgtattcggtgcgcctgacgctgacggcgccgagaaaacccgccggcaggcgccgttgcaggcgcacatcggcatgccactcgggcaggaaataaggcgatggctgatacccgacctccggctgcaaggtccagttgtcatcgagggcgacgaccgcgcccgcttcgacgccctggtcccgctcgccgaagcgttgctcattcaccagggcgccataccagccgaggccttccggttgcgtcgacgcgtaatccagacgctggctgcgccagttgtcgaagccgttgtccagccagtcctgtcgggccgacagctccagctcgtgacggcgttgcgtcggtgcgatggcggccggggcggttgccgtcaccggtgatgtcaacgccgcgcgagcctgctgcatcacctgctggacctgcgtgtagtccggtgccagcgtcgcggcccgctcgagcgggaccagcgctgcctgtgggcggccagcccagagcagcgcctggccttgacccagcaggtagtcagcattgtccggttcgcgttgcagcaactgctcgtacaggggcagcgcctgctcgggcacgcccagccaggcgcgaacacgtgccagcaggaacgtcgcttcgttgtcgtcaggcttttgagcgaggtgggcttcgagcgtcgcctcggcggcgtcgagctgttgtgcatcgaccagacgctgcgcggtggccagatcggcgagcaccagcgtcggcgcgagaagggtgggcagcgccagggccagcgcgcgcagccagctcatcgagccttcctcaacaggcggcggatacgtgccagcaattcctccggctggaagggcttggtcacgtaatcgtcggcgcccaattccagcgcccggacgatgtccacctcgcgcgccttggcggtgagcatcagcaccggcacgctttcccaacccggttgcgcgcgcagacgttcgatcagctccaggccatcgtggtagggcagcatgatgtccatcagcgtcaggtccggcgggttgccagtgctgagtctttccagcgcctggcggccatcggcggcgtgctcgacgctgaatccgtggcgttcgagcatgaaacggataaggaaggcgatgtcctcttcgtcctctaccatcaggattcgctggctcgcggaaacactcatgcgttgacctcttcggaatctcgggtgtggccaggcggccagtgttgcagcagctgctggatcagggcagccagttcgcggccgttgtgccgggacttgaccagttggcgcaaggccagacggctgtcgtgcaccggcgcgtccagcgcggaaaagatgatcaccggcggcgggggctcgcgtcgggccagttcgtcgaacagttcgctgccgtctccgtcgggcagcatcaggtcgatgattgccaggtcgaagtgctgttgctcgatcagtgcgcgcgcttcggccaggttgccggcgccgtccaggtcgatctgcagcggtgcgaccagtcgcgccagcagcgcctgcaggtcctcgtcgtcctcaacgtggaggatgcgcggacgcgcgccacggctgccgatgcaggcgctcaccacgtccatgacccgtgatgggtcgaccggcttgtgcagccagtcgatcaccccgaccgcacccccgcgcagcgtgccgtcgtcgttgtcgcggcgctgcggctgcaggctgacgatgagcaccggcagatggcgaaaggcgctctggctgcgcagattctgcaggaaggcgatgctgtcctcgtcgcttagtactgggctgagggtcagcgcctggacgctgaattcggccagcagctcgcgcgccgccgcggcggtttcggcgaccagggtctggtagccctgttgctgcagcgcgctggccagctgctcggccgccgcagtgtcgggttccagtaccaggatgcgcgcccgcgaagactgttgtgccacgccggattgcgccacggctgccgaggcgtcgtcggcctgctcgggcgccagcggtaaccgcagccagaaccgcgcgcctcgaccttcttcagactcgaagccgatcagcccgtgcatctgctccaccagcgaacgggtgatcgccagcccgagcccggtgccgccgcgcttgcgcgcgtcggaggagtcggcctgggcgaagcgctcgaagatccgagcgcgaaagctctccgggatgcccggcccctggtcctggacgctgatctccaggttgtcttccagattgcgcagggccacgctgacgttgccgccggcgggcgaatgcttgatcgcattggacagcaggttggccagcacctgggcgaagcggtccggatcgagattgacctcggtgcgcgtcgggccgtccggcgcgcaccattcgaggcgcacgccgtggttatcggcgtagggcttgatgtctgccagggcctgctcggtcagcagctgcgcatcgctgcgcacgaagtggaacggcaggcgcccggcttcgagcttctcgatgtcgagaatgtcgttaatcagccgcaccaggcgctcgctgttcttgtgcgcgatgtccagcagcgggcgcgcaccgtcgccgatcggcccggcgacgccgcccgccaacatgcccagcgcgccacggatggcggtcagcggcgtgcgcagctcatggctgaccgtggagatgaattcggtcttcatctgctccatgcgtcggcgcagagacatgtccaccgcgacggtgaccacgtggcaggcgccgttgagcatgaccattggccgcttgaccacttgcagccagcgctcctcgccatgcgcgtcgaccaggccgatttcattgatgcgcagctcgccgccaccgcagcgcagctcgccctcgccctgtagcagcggaaacagccgctcggcgccggggatttcctcgctgcggcggccctcgatggcccgcggcgggcggccaagcagggcggcgaacgcactattgcagagcaggaagcggccctgctcgtcacgcacgaagatggcattttcatcggtgtcgacgacccgtcgcaggaacatcttctggtcctggaggttgtcgcggctgcgctgcagctcggtgacatcgcgggctatggccaagtggtcgcccagtccggtcggcgccaggcgtacttcgaaggtacggcgatggtccagctcgcaccaggtggtctggctgcgtcgttgcgcctggtcggcctgctgcaccagctcggccagcagcggttcgatggctgccggcgccggcccacgctgatcgctggcccgagtcagcgccgagacctgccgctggctgtcgatggcatagaggtcgtccggaatcgcctgcagcagggcgcccagccgcgcttggccggcctgcgcctgttgcgccagggcctggcggatctgcaggttgcggcgaatagcccagagtgcggcgaggaacagtagtgagaccagcaggctgccgatcaccaccagccggcggctgtgcgcaagcgtatcggccaccgcgcgattggccgcggccagttgctggcgctcataaccctctgccgcacccagcagcgcccgcaggcggtccatgatctccttgccgccggactgctgcagttgctcggcggcctccagcaggccgaggtcacgccgcgcctggatattgccggcggcgatcaccaggcggtcggcaatgttgcggtcaagctgtgcaaaccagtgttgatcgggaaaggcacggccgccgagcagcgcctgcagctcgcgacgccgctgctcaatggcgcgaaggccgaattcgtacggctccaggtaggccggttggccggttagcacgaaaccccgcgcaccggtctcgatgtcctgtagcgaggacagcattgactgggtcgcggtgatgatctgcaggctgcggctgaccgacaggttgctgtccagcaccgcttgctgggtctgcttgccctgccagcccaaggcggcgagcaggatgaaggcaatcagcaaggcgaaccagtgccagttgacctgtgttcttgagggcaaaccggtactcctttcgccggttgtcggaataggcaacggcgcttgcacggcgaaataagtcggggcgggcaagcggccgtcgatgtgccgcagtgtagttggagtcgtctggcgtgcggcggttcgcttgtttattccggggtgccgttcgtcaggactgcgcggcaaccatcacccggttacggccttggcccttggcgaggtacaagcattggtcggcgcgttcgagcagctcgccgccgctggcttggccatcggtttggctgaccccagcgctgagcgacacgctgaaggtgcgtccgccggcatgaaagctgagcgcggcgaagtgctcgcggatttcgtcgaagatccgcttcgcctgctcggccgggcagtcgggcagcacggcgacgaactcctcgccaccgtagcggccgatgctgtcgatgcggcgcaggcgctggcgcatcagattggccagtgcgcggatgacgttgtcgccagcggcatggccgtagcggtcgttgacctgcttgaagtggtccaggtcgagcatcacaacgctcgccggattgccgctgcgcagcgagcgttccacctcgagcgtcacctgttccttgatgtcggcatgtttgagcaagccggtcaggctgtcgcgcgacagcgccatgctcagcgcccgggcgcgttgcacctgggagaacaccgcggcggtcagcgcactgtcgctgatcggcttggtgatgaagtcgtcgccggccttgagcagtgcgtccatctgccggttgatgtcggtttcgccggacagatagatgatagtcacacgcaaccattcatcattcaggcgaatcatctgggcaagctcgagcccggtgaagtcgggcatgttcatgtccagcagcaccacctccgggttgaacgcgcgcatgacctcgaacagctggctggggtcggtcagggtctgcacgagcatccgggaattgcgcaacaccaggctgtaacggctggcaagatcggcatcgtcgtcgacgatcagcacccgatacggctcgcttagctgcaggttgaggcagtgctcgagggtattctccagctgcgtgacatccagcggtcgggtgaaatagcccttcgcgcccgcgcggaccgcggccagctgactgtcgaagtcggcctgatggccgatcaccagcagtggcaacggtacctccaggctttgctgcagcgcgctcaccgcttcgagctcggcggcatgctggctgaccaccaaggcatcgggcaattgcccctgaacggccgcctgcagcagcgcgatatccggaaagagcaacatctcatagccgaaattgcccagcgtccggcacatctcctgtcccgcttcggcgtcgcgttcgagcagatagatgcggcagctggccggtcggttgtcggcaatgaccgagggctccgccagagtgtgtcggggctcgccggcctgggtggccgtggtcagttgctggacggcctggatgaattcagcgagtgcctggccgctgggcctggctgctttcagccagcgctcggctcgctgctccagcatccgcgcctgcttaccgagcgcggtgaagccgaatgtgccggcgctgccggccaggcggtgcaggcgctcatgcagatcaagcatccgctgtcggcgctgttcctgctcgcgagcgttggacaagcgctcggcgcgttgcccgagctcggccagttccgtgtccaggcgcttggcgaattgctcgttcaacgcgcgcagttggtcgtgcagcgcctgccgggtgccgtcagtcatgttcggcgttccatacatcttccaattgtgcagccagttgtaaggggttgaagggcttgtgcagcagtttacggacaccgagccggcgcagctcctcgggatcggccgcctcgtccgactggccggtcaacagcaccacgggagtcttgcccaggtcgatcagggcgctcaactggaccagcagctccaggccggtcatctgcggcagcatcatgtccagcaggataaggtccggtgcgaacgcctggacctcggccagcgccgcctgcccggacgcgcagctgagcacctcgtagccgccgagcttttccagcgcgatccgggtcaccacctggatggaggggacgtcctcgacatgcagaacgcgctgcaaccgcttcatggctgcgactcggacagcgggcggcagggcagttcgaaccagaagcaggcgccttggccgggaatcgaatcgaagccgatccgcccgttcatgtgctcgatcagctctttgctgatcgccaggccgagcccggtgccgccctgctggcgcgtatcggaggcgtccgcctgggcgaacttgctgaatatccgctggtgaaaggcctcggcgatgcccgggccctggtcccgcacactgacacgcaccttgtcatcggccaccggctcggcccatagcgtcaccacttggcctgagggcgaatatttggcggcattggacagcagattgctcagcacctgctccaggcgcatggtgtccacctcgatcgaaacggccggacaatcgcccagcacgatgctcacagcgtagctttcggcgtagccctgattgctgcgcagggcctgttccaacaacggcagcagcggttgccactgcaactcgaagcgcatcttgccagcgtacagcttgtcgatgtccagcaggtcgtcgatcagcgcgctcaggcgttggctgttctggtgggcgatctccagcagctcctgcagatgttcgggcacgtcgccgatcacccgaccgcaaatcagccccagcgacgcggtgatagaggtcagcggcgtccgcagttcatggctgacggtcgagacgaaatcgcgctgcagattctcgacctgtttgcgatcggtgatgtcgtgcagcaccgccaccgctccgctctgctggccgttggaggcgtacatcgggtcggcgttggccagtacgtggcgcgcgttgccctgtagcacgatggccatctccacgttgcgaatgtgttcgccgcgcaaggcgcgcatcagcgggacctcgtcgggcgccatctgcgtcacgccgtcggcctgatagaggtgatagacgtccggccattgttccgggtcgagtttctgcgcgtcgagcccgtgccagcggcgcgcggtgtgattgaacagggtcagattgccgttggcatcgcaggcgacgacggcttcggacagggcttcgagcaggcgtcgattcatttcctgctgcttgtcgagctccagctgatcggccttgcgttcggtgatgtcggtcaccaggccgtgccagagcaccgagccgtcggcctggcacatcggtgtggcgcgcgcctcgacccagatcgtgcccttgcgcgggtggttgatccggtgctcgaagtgccagggcatcaaggtcgaggcggcctgacggatgctcgccagtacgtgctcgcggtcatccggatgcacctgcccgtagatcggtccgatgctgtgggccatctcggccgcgctcaagccaaaaatctcctcggcaccctcgctgaggtagggaaacgagctgttgccgtcgggccgccagcagaactggaacagcatgcccggaacctgcgcggcgatttgttgcaggcgcagttgcaggcgctcctgatgcgccaggtcgtaggcgctgacgatgtagccgcgcagcagctcgcgctcgtcatggatggccgagacgttgagcagcaccggtacgctgccgccgttgcggtgcaacagtcgccactcgcgcatttcgcggcgcccctcgagcagcggcgcggtcagcacggcgaagcccggctcgaccggttcgcccagttcgtcggcgaggatgcgcgcccggcgcgccagcgcgtccgcaggaaacagcgtggtggtcagcggttggccgatcagcatctgctcggggtagccgaacaggcgctcggcagtcgggttgacgcctgaaatgcgaccttcggcggtggtgaccagcatcgcgctcgccgcgctgttgagcagcgcctgttgcatcgccgcctgttcggcgtagcggtgggcctgaaggcgctcctcgaacagccgcatgatctgccggctcaggcgtgccagcgcagcgagctgggcctcgctgagccggcgcggctggcgatcgatcacgcagagggtgcccaggttgaagccatccggcgtggtcagcggcgcgcctgcgtagaagcggatgtgcggatcgccggtcaccagcgggttgtttcgaaagcgctggtcccgctgagcgtcttcgacctcgaagacgccagagccttcgatggtgtgcgtgcaaaacgagatgtcacgcggggtttcgctgacgtcgaggccgactcggctcttgaaccactgacggtggtcatcgaccagcgagatcagcgcaatcggggtatcgcagatataggcggccagctgggcgaaatcatcgaaggccgattcatcgggcgtatcgaggatctcgtagcgtagcagcgcagccagacgggacagttcgcggggaggcgtgggcgccgcggtcgacttcggtggttccatttgcggacctgtctcgctgggttgaggggctggtcgcggcggctacaggccgtcggcgtcccagatggactggatctggccggccaggcgcatcgggtcgaatggcttgacgatcacgtcgcgcgcaccgagcttgcgcaggtgctcgacctcacccggttggaccttggccgtcatgaacaccacgggtatctgcgccagatcgacacgttccgcgagcctggccagggtttccgtaccgcccatgccgggcatcatcacatcgagcaggatgaactgcggcgcgaaaccttcgacctcctgcagcgcctgcgtgccggatgagcaggacagcacctggtagccgccgatcgcctccagggccaccttcacgacggcctggatggaggggtcgtcctccacgtgaagtatccgtttgagcacggtcatgcgggtctccggtaacgatgcttcgaccattcaaaaggcggcagtttgccatcttgctcgttcgttggcgcagcgtgcgagaaaaattagccggtccgccggcaacgcacgcaggcgctggatgtcgcgagcgcgtccgcgataggggccggtccggccatgcccgggtgtgcgacgtgatcgaggcggtccgttcagctttcgacttcgcccgtggcccagaatttcccttgcgcgccgtctgcgcttcacgagttgctggcaggcgcgtgctagacggggcaagccgaccggcgaaacctccgttgacgatcggacggttgccgtgggcggtcaaaagtcgcactgtgcgacgggcggatgcggcaatgcgccggcatgggccgataatgtcccggcgtcggcaatggctgacgcgtgttttcttcgctgcgaggctgcaacactatgtggtacaccggttttctcgaccttacggcctgggaggtggttgcggccactttacttctgacccacgtgacgatcgtcgccgtcaccgtttatctacatcgctattccgcccaccgctcgctggagctcaatggcggactcaagcatttcttccgtttctggctgtggctgaccacggcgatgaacacccgcgagtggaccgccatccatcgcaagcaccacgccaagtgcgaaacgccggacgacccgcacagccctgtacagaaggggctgggcaccgtgctgcggcgcggcgccgagctgtatatggaagaggcgaagaacgaagagaccctgcgcatctatggcaagaactgcccggacgactggatcgagcgcaacctgtactcgcgctttcccaacctcggcatcgtcctgatgctcggcctcgacctggccctgttcggtgtgatcgggctgaccgtctgggcggtgcagatgatctggattccgctctgggccgccggtgtggtcaatggcctgggccatgcggtgggctatcgcaacttcgagtgccgcgatgccgcgaccaacctgctgccgtggggcatcctcatcggcggcgaagagctgcacaacaaccatcacacctatccgaattcggccaagttgtccgtacgcaagtgggaattcgacatgggctgggcctggatcaagctgttcagcctgttcgggctggccaaggtcaaccgcaccgcaccgatcgctcaccgtgtgtcggccaagccgcagctggacatggacagcgccatggccatcctcaacaaccgctttcagatcatggcgcagtatcgccggctggtgatcaaaccgttggtacgcctggaactcgagcgtgccgatgcatcggtgcgccatcagttccgccgtgccaagcgcctgctttcgcgtgagccgagcctgctgcagcaagagcaacacgctcgtatcgccgtgatcctcgagcagagtcagtcactgcgggtgatctacgagcgacgcctggccttgcagcagatctggtcgcggaccagcgccaacgggcacgacatgctcgctgcgatcaagcagtgggtgcaggacgccgaagccagcggtattcagtcgttgcgcgagttcgccgagcacctgcgaacctattctctgagaccggctgtcgcccacgcatgacctccgatcggcgcgaccgctggccggcgcgccgcctggaactttgctcgaaagccgctctctgattggcattccggtgctttcgcaacagttgctcctgcgggtttccgttggtgcctggcgcgatgtgagaacgcagttatgaagttcgtgaaccagcgaggcgagacgggggcaggcattcttccaccgtccgaggcgcagaccctgttggccctgatgcacgcgcgcgccgaagtcgagcgtttgagcgagcgggagcagctgttcagcacgctgatgggcgccgtcaacgctgtgttgtgggccttcgactggcaggcacagcggatcatttacgtcagcccagcatacgagcaggtattcggccgctcggcggccttgctgctggccgatttcggcgagtggcgtaacagcatctatccagatgatctggactacgcgcagcggagcatgctcgaggtgctcgacaagggcgccgtcgaagcgcgcgagtaccgcatcatccgtgccgacggccagctgcgctggctcagtgacaagtgcttcatcgcgcgcaatgccgacagcgcccacgggccgatcatcgtcggcattgccgaagacatcaccgagaagaagcagctcgaaggtgagctgcagcgcctggccacgaccgatgtgttgacgcagagcagcaatcgccgctacttcttcgaatgcgcccagcgcgaattcgacagggcgcggcaatacgcgactccgctggctttccagttgctggatatcgacgatttcaagcggatcaatgacacccacggccaccagatgggcgatcaggtgttgcagcgcgtggcccagtgcggctcgtccgtgctacgccgcggcgacctgtttggccgcatcggcggggaggaattcgccctgctgctgcccggttgccagcccgatctggccgagcagatcgccgaacggctgcagcgcgagattcagcggctggtattcaccagcccggatgggcagcgcttcggcgtgaccatcagcctgggggtcacctacctcagggccagcgacccggacctcggcgcgctgttcgcgagggccgatgcggcgatgtacaccgccaagcgcctgggcaagaaccaggtcatagtgtcctgagccgcggtctgaaccgatacgctcgaatgacctgaacgcagaccagcacggctgcccctcacacacgccagagcgcagcgagtgttcagggcgccttatggcgcgtcgtcgaagcctacgttcgtccgcagcggctgttgtcgctgaccaccgggttggcggccacgctccgttggtcttgctacgccggcgcgcggctcgacgcggcaggttgctgctgggtaatgcagtgaatgttgccgccgcccagcaggatctcgcggcccggtaccatgacgacctgatgctgcggaaagagccggctgaggatggcctcggcttcgccatccagtgggtcgccgaacgacggcgcaatgataccgccgttgacgatcaggaagttcacgtagctgccagccaggcggatcgaaggatcacgcggttgactgcccgccagcgatacgacgccggcgcattccgcttcggtcgcgtgcagcggcccgggaatcggcatcttgtgtacgaccagtgggcggtcccaggcgtccgtcgcctgctccaggacacgcatggcggcctggcagcgcgggtagttgggattctcggggtcgtcggtccaggccagcagcacctcgcccgggcgcacgaagcagcagaagttatccacgtgcccgtccgtttcatcgttgaacaggccatgcggcagccagatcaccttgtcgatcgccaggtagtcggacagcatgcgttcgatttcttcgcggcccaggtgggggttgcggttgcgattgagcaggcattcctcggtggtgatcaacgtgccttcgccgtcgacatgaatcgagccgccttcgagcacgaagccttcggtgcggtagcgatcgcaacgctcgatctcgagaatcttgagcgcgacctcgtcgtcgcgctgccagtcttcgtagagcccgccgttcaagccgccccaggcgttgaacgtccagtcgaccccgcgcaggccgccttttccgttgatcacgaaggtcgggccggtatcgcgtacccaggcatcgtcgctgctgatctccaccacgcggatgcgcggatcgtcgagctgctcgcgtgccgtgacaaattggtcagccgtggcacagacagtgaccggctcgaagcgcgcgatcgccttggctacagcggtgaacgccgcttgcgccggcgtagcttggtcgcgccagttgtccgggcgttgcggccagaccatccacgtctggctgtgcagggcccattcggcaggcatgtgaaaatcgtcggagcgtggggtagtggtcagcgtggtcatcgtcttacctgcgaatgaacggcgtttttccgggccagcacacgcggctgccctctcttcggtgtgcggacatctgaccgcgacgaacgggattcagccgagatcccagcgaacggctggtccgattggtaatgaaaagcccataagtacagtgcccgccctgcgtctcgccgggccgtatggcatcccaggagcaaggtcgcagcgacaccgatcgtggcggtaatggaagccttgtcactgctgatctgaccgaatctggccttgggtttcgccaatctagtcgataattatctgtctggaaagccagatttacagactgaaaggttggatatgcaatttaagccgataattatcggtacattagccaagcggttggtcccgcttcggcaggcatggcggcagataaaggcccaggtaggcttcgagcacgcgcatgccttcttcggccatccgttcagtgattcgaccgtgttgatgcaccgagcgcgcatagacccgatcgcccagctccagcgcgagggcgaatacctcgacgtcatccggcagtaccggcaactggaaatgtcgggtaaagagcgcacgcatcagctcgccgagctcgatgtcgtgctgccggtccgcctggaggacttcggccaagccgtgctgggcgaggatcaactgccgggccgcggcgtcgcgatcgtagatcgccaacatgcgccgttcgacctgccgcgccaggtgctgccagccttgcaacgcctgatgatcgatcggttgcccgaggctgacccgaaaggccgcatgcacgtcggctgtcagcgcttcgagcagtgccggcacgctggggaagaagtggtagaccgaagacggcggaatcgccgcccgctccgccacgctgtagatcgacatcccggccacgccggcttcggcgagcagcacacgggcggccgcgagaatctgcgcgatccgcgcctggctgctggcgcgaggcttgcggcttgtgggaatgcttggggaggggacggcgctcatggacgctattggatgccagggcggcgacggatgcaacgggtacggccagctcgccacctgtcgcacccggaacaggcctgcgccagcgcgccggcaagcaagccgggacatgcacggccgcgccctcgtctataactacagaggccgacgcagggaggccggacggagtcgggacgccagttcgccggggcaccggaacgccccggccgagaggctagatacctcctgtgatgcgtaaccgctggagagacgaaaccctgatgagcctgaaagcacacttcgaattgctggcgtcctacaaccagtggatgaacgcgaagatctacgcggcggcgggtgaattaggcgcggatgaactggcccaggaccgtggcgccttttttggctcgatcctgggcacgctgaaccacatcctgattgccgatatcatttggctgaaacgattcgcggcacatccgggctgcctggtcccgttgcgtgagatcgtcgagctgccggacccgcgcagcctggaccagatactgttcgacgacttcgccgtcttgtccgggcaaaggtcctggctggatcgtcggatcagcgattgggtcagccagctgtcggacgatggtctggatcgcgtcctcgcctaccgcaacaccaaaggggttcccgccaatagacggttttcgagcctggttctgcacttcttcaaccatcaaactcaccatcgcggtcaggtcaccacgctgttgtcccaggcgggtaataccgtcgaggttaccgacctgctggtgctgataccggacgaagaagccgtatgaccgtcgtgccgccagagacctggtcttttgcgacgcagacggcgctctgcccgcaactagcgacttgaagcttgcgccagctgttccatagtttatgggtgataggacgggcttcgggttgatgcccaccgtcgtcgtttcgttgcaatggatacgctgagaggcgccgtgctcaagcgcgcggcgccgcaggaggttcgtatggcaactgcaagaccggatctttcagcgcggccctggcgatgcgtcgtggagcgcaccatgcgggcctcgccgcatgcgatctacactgcctggatagaagggttcgaccgttggttcgcggcgtccggaaccctgctcatgcgtccggagatagatgcgccgttcttcttcgaaacgcgctaccagggtgggcgccacccgcactatggacggttcctgacgcttgaaccggatcggctcgtcgagcttgcctgggtcacgggtagcggcggcaccgaaggcgcggaaaccgtcgtttccgttgagatcgcgcctcacgagtcggaatcgcaccttcgtctcacccacgccggctttccaagccaggaatcgatgaagcgccatgaccgggcatgggtcgaagtgcttgcccagcaggacagggtgctgtcgggtgacgggccggtttgatccggcgccaggtgttcgccacgtccatgaatccctgggagtggaaacgatgaaatcactacgattccttaccatcatgctgaccgcgctcagcctgagcgcagccttcgcccatctgctggagctgccggccaagctcagctacgacggtgcgcagtggctcgatctgctgcagacgctctatccgacctatggcaaggcttcaggtgtatgcgaaatcggtgcggtggtcgcggcgagtgtgctagtcgtggtcgttcgccagcaccggaccgcctttctctggaccttgctcgccgcctcatgcctgatcgcgacgcatgcgattttctggatctgggtcgctccggtgaacgcggcgctggtgcccctgtcgcccgagacgctgccggctgactggacgcgtttgcgcaatcaatgggagtttgcgcatgccacgcgcgcgattctgcagatcgtcgcgctggcggcgctggtgatctccatcctggtcgagctgccaccggacgctcgcgatgccgaggatgagtccgcttgaacaactgacgcacagcgctgactggctattcaaatcggttgctggcaatcgtctacgcatcgaaaaaaatggagttcgcatgaaggtcaaacgcattgtggccaacgttaccgtcgccgatccggctgtggcgcacgcattctataagacgtgctggggcttgagttggttatggatcatggctggattcgtacctatgcgagtccggcgaacatggccgcgcaggtcagcttcgcgagccaaggcggctccgatacggcggtcccggacctctccatcgaggtggatgatttatctgacgccctgcgccgtatccaggatgccggcatggccttggagtacggcccggtgaccgaaccctggggcgttcggcgtttctatgtcagggaccctctgggcaggttgatcaatatcctgcagcacctgtaatggcgctcctgcgcaacccatccgctcgattcgccgcgcttcgcctacgctgttagccaggcgcttcgagcctggcgccgctctgcaaagtgtttctacaggttcttatccacaaggagatcgccatgcagtttcaccgaggcaggctcattgaccatgtgcaaagtcccgaactgctgcgtcgcctgctgcgcgcgaaggatcggatggatgccgccccggccgaggagtggcctgtctggcggttggcgcgcgtcagctgtatttccgcggcccatttcgcgcgctcgttcaagcaggccttcggcgttccgccacatcgctacctgctgacgcggcgcatcgagcgcgccacggccctgctgcgagaaaccgatctgcccatcaccgagatcgcctttcgcacgggctggcgaagcctgggcacgttcgggcgcacctttcgcgacataaccggtaagaatccgggcgagatccggacgtacgagcgatccaggatgcaagaccccggtcgcgtgcccgcctgtgtcctcggcgcggcgctgcgacccgctctgacaatggcagtttcggagaagcgacgtcggatcgcgggcgatataacgggggcccaagaaaaggaggctctatgactcaaggtatcgaagtggctggtctgtacgttcgggaccaggatgaagcgctggcgttctatgtcgagaagctcgggttccgcgtccatacagacgtgcgcaacggtaattaccgctggctcacggtgcagcaccctgatcagccgtcgttccagctcgggctgttcgcgccgggaccgcccactcacgatacggcgaccgcacagaccctgctcgcgatggtggccaaaggcgcaatgccgccgctcgtgctggtcgttgacgattgccgtgacgcctacaggcggatgcgtgaccagggtgtggaatttacgcaggagcccgaggatcgctacggcaccgtggatgccggtttccgtgacccctctggaaacggatggaaaatgctgcagacgcgccgctgaaagggaaaagccccgcacactctggtgcggggcttcgcgtcagacggtatgcagataccagttgtattcgaggtcggagatcgagtgctcgaactcttccagctcgctctccttgcaggcgacgaagatgtcggtgtactgcgggctgatgtagcgcgccatgatctcgctgtcgtccagctcgcgcagggcatcgcgcaggttggtcggcaggctcggctccacctgttcgtaggagttgccttcgatcggctcgtccggcgcgatcttgttggtcaggccgtgatggatgccggccaggacgctcgccagtagcagatacgggttggcgtcggcaccggcgacgcggtgctcgatgcgcacggcgtccgggctgtcggtcggcacccgcaacgcaacggtgcgattgtccaggccccagcacggcgcattcggcacgtagaactgggcgccgaagcggcgataggagttgacgttggggcagaggaaggccatcgacgcggccatggtctgctgaatcccaccgatggcgtggcgcaaggtttcgctttccagcggattgctggtggcgaagatgttgttgccgttcttgtcgagcagcgagatatgcacgtgcagcccgttgccggcctggcccggatagggcttggccatgaaggtggtgtccatctcgtggtcgtaggcgatgttcttgatcaggcgcttgagcagcaccgcgtaatcgcatgccttgatcgggtcggcgacgtgatggaggttgacctcgaactgtgccggtgcactttccttgacgatggcatcggcgggaatgccctgttccttggccccttcgagaatgtcttgcagacagtcgacgtattcgtcgaggtcatcgatcaggtagacctgcgtggagtgcgggcgcttgccggagatcggcgagcgcggcggttgtgggcgaccgttcacgttctcctggtcgatcaggtagaactccagttcgaaggcggcgcaaatggtcaggccgagcgcatcgaacttgctcactacctggcgcagcacctcgcgcggatcggcgaagaacggcgagccgtcacgctcgtgcatggtcatcagcagctgcgcggtggggcgcttctgccagggttcgttgctcaatgtgttgggaatcgggaagcaggtccggtccgaatcaccgatgtccatgcccagaccagagctctccacggtgatgccattgatgtcgagggcaaagagcgaggccggcaggttgatccctttttcataaaccctgtgcaggctggcgcgctcgatgcgcttgcctcgaacgacaccgttcatgtctgcgatcagcaggtcgacgtactggacctccgggtgttccttgagaaatgcgttcgcttcgttgagctgaacggcacgcggcggcgggagcatgatgaagcaccttaattgttaaaaatttcaatcatcaaacggcttggtttggagtcaatcgaaaagccttgtcgctgtcaatagccccgcgaaatgccccattaaggcccgctgtgggcgtttctggggcgattcagcgaaaaagcacaaatcgctgaaggcactttccgaagcgagattgctcggctattgtctataaaaacgaacaagactactctccgatgagccccatccggaaagacgagtatcccatgcctcgcgtgccattgatcggcgtttcggcctgtaccaggcagataggcctccacagtttccacatcgctggcgacaagtacctgcgcgcggcggctgtagccggtataccgctggtcatcccggcactcggcgacctgatcgatcctgttgcactagtggatagcgtagacggcctgctgtttaccggctcgccatcgaacgtcgaaccccatcattacggtggccaagccagtgcgcaaggcacgccccatgatgccgcgcgcgatcagctgacactgccgctgattcgcgcggcggtcgcggcgggcgtcccggtgttcggtgtctgccgtggctttcaggagatgaacgttgcgttcggcggcagtctgcatcagcgggttcacgaggtcggaccctatgccgatcaccgtgagcgcaccgaggatccggtggaggtgcagtacggcatcagccatgcgctgcacgttcagccgggtggtgtgctcgagcagctcggacttccgccgcagatcgaggtcaattccgtacacggccagggggtcgagcggctcggcaagggcctgcgaatcgaagcgctggcacccgatggcctgatcgaggcgttttccgtcgagggcgcgcagagctttgcccttggcgtgcagtggcatccggaatggaaggtgcatgaacacccttattacctggcgttgttcgagggctttgcccgcgcatgccgggaacgcgcaggacggcgctgagcgcgggccggcacggcgctcgtttcactaatctctgaggtcgttatgtccagcaagctcgaccagctcaccggctggctgaaagaacgcaagatcaccgaggtggaatgcctgatcagcgacctgaccggcatcgcccgcggcaagatatcccccaccaacaagtttctcgacgaaaagggcatgcgcctgccggagagcgtgctgttgcagacggtcaccggcgattacgtcgaagatgacatctattacgaattgctcgacccggccgacatcgacatgttctgtcggcccgacccggacgccgtcttcctcgtgccctgggccatcgagcccaccgcccaggtcatccacgatacctacgacaagatgggcaaccccatcgagatctcgccgcgcaacatcctcaaacgtgtcctgaagatgtatgccgacaagggctggcagcccatcgtcgcgccagagatggagttctacctgaccaagcgttgcgaggacccggacctgccgttccagccgccgatcggccgctcgggccgccaggagaccggccgccaatccttttccatcgacgcggccaacgagttcgacccgctgttcgaagacatgtacgactggtgcgaggcccagggcctggatctggataccctgatccacgaggaaggcaccgcgcagatggaaatcaacttccgtcatggcgaggcgctgcacctggccgaccagatcctggtgttcaagcgcaccatgcgcgaggcggcgctcaagcacaacgtcgccgccaccttcatggctaagcccatgaccggcgagccgggcagcgcaatgcacctgcaccagagcgttgtggacctggagaccgggcgcaacattttctccaacagcgacggcaccatgagccagctgtttctgaaccatgtgggcggcctgcagaaatacattcccgagctgctgccgctgttcgcaccgaacgtgaactccttccgccgcttcctgcccgacacctcggcgccggtgaacgtcgaatggggcgaagagaaccgcaccgtcggcctacgcgtgccggattccgatccgcagaaccgccgcgtcgagaaccgcctgcccggcgccgacgccaatccctacctggccatcgccgccagcctgctgtgtggctacatcggcatggtggaagagctgaccccgagccagccggtcaagggccgcggctacgagcggcgcaacctgcgcctgccgttgacgctggaggccgcgctcgagcgcatggagacctgtcggcaactggagaaatacctgagcccgaaattcatcaccggctacgtcgcggtcaagcgcgccgagcaggagaactaccaccgtgtcatcagttcctgggagcgggaattcctgatgctctcggtgtaacgaacaaccgtagggtggatgacccttttctcatccaccaacaacgcaacgcatatggccaagaggtgactgatgagcgattcgcaaaccctgcaatggcaagccctgagccgcgaccatcacctgccgccgttcaccgacttcaaggcgctgaacgccaagggcacacggatcattacccgcggtgagggtgtgtatctctgggacagcgaaggccacaagatcctcgacgccatggccgggctctggtgcgtcaacctcggatatggccgtgaagaactggtcgaggccgccacgaagcagatgcgtgagctgccctactacaacctgttcttccagacggctcatccgccagcgcttgcactggccaaggccatcgccgagatcgcccccgagggcatgaaccacgtgttcttcactggttccggctccgaagccaacgacaccgtgctgcgcatggtgcgccattactgggcgatcaagggccagccgcagaagaaggtggtgatcgggcgctggaacggctaccacggctcgaccatcgccggcgccagcctcggcggcatgaaggccatgcacgagcagggcgacgggccgatcccgggcatcgagcacatcgaccagccctactggttcggcgagggcggtgatctcgatccggatgagttcggcgttcgcgtggcccagcaactcgagcagaagattctggaagtcggcgaagacaaggtcgccgccttcatcgccgagccgatccagggcgctggcggggtgatcatcccgccggacagctactggccgaagatccgcgagatcctcgcccgttacgacattctgttcatcgccgacgaggtgatctgcggcttcggccgcaccggcgaatggttcggcagcgactactacggcaacgcaccggacctgatgccgatcgccaagggcctgacctccggctacctgcccatgggtggcgtggtggtgcgcgacgaagtggtgcacacgctcaacgagggcggcgagttctatcacggcttcacctattccggccacccggtggcggccgcggtggcgctggaaaacatccgcatcatgcgcgaagagcagatcgtcgaacgggtgaaaagcaagacggcaccttatttgcagtctcgctggcgcgagctggtcgaacacccgttggtgggcgaggcccgtggtgtcggcatgctcggcgcgctggagctggtgaagaacaagaaaacccgcgagcgtttcgccgatccgggcgtgggcatgctctgccgcgagcactgcttccgtaacggtctggtgatgcgtgcggtcggtgacaccatgatcatttcaccgccgctggtgatcaacgaagcgcagatcgacgagctgatcgacaaggttcgtctgtgcctcgatgcgaccctcaaggacgcgcgcgggtgatgatcgtggcgctggcgccgcggatcgcgggcctggtggtttcagtgctggccgatcgcctgcaaaacatgtccgggcggttgaaaaaacgccaccgaccttgccagactgcgcgcgtgttctggcctgacctgccgaggggtgtgtcgatgccggtaccgccgcactagttgtccaggcgtgatgggatccggcgctcgacgccggcccttcgtgacctgtccctagccccaatacaaacgatcacaacaggagctacacggatgaaaccctttgccaagacactccttgcaatgacgctggccggtaccgtcgctggcgccgctcaggccgaagacaaggtactgcacgtctataactggtccgactatatcgccgaggacaccctggagaacttcaccaaggaaaccggcatcaaggtcgtctacgacgtcttcgacagcaacgaagtgctcgaagccaagctgctcgccggcagctcgggctacgacgtcgtcgtcccgtccaatcccttcctggccaagcagatcaaggctggcgtattccagaagctcgacaagagcaagctgccgaactgggaaaatctcgacaaggacctgctcgaggcgctgcagcccagcgatccgggtaaccagtacgccgtaccctacatgtggggcaccatcggcatcggctacaacccggagaaggtcaaggcggtactgggcgagaacgcgcccgtcgattcctgggacctggtgttcaagccggagaacatggaaaagctgaaatcctgcggcgtttccttcctcgactcgccgaccgagatccttccggccgcattgcactacctcggctataagccggacaccaccaagcgcgacgagctgaagaaggccgaggatctgttcatgcagattcgccccgacgtcgcctacttccattcctccaagtacatctcggacctggccaacggcaacgtctgcgtcgccatcggttattccggcgacgtctatcaggccaaggcgcgcgccgaggaagccggcggcaaggtcaaggtcagctacaacattcccaaggaaggcgcgggcaccttcttcgacatgctggccatcccggcggatgcgaaaaacatcgataacgctcacgtcttcctcaactacctgatgaagccggacgtgatggcgtccatcaccaactatgtgcagttccccaacggcaacgcggccgccacgccactggtcgacgaggcgatccgcaccgatccgggcgtctacccgagccaggccgtgctgaagaagctgtacaccttccccgatctggaccccaagacccagcgcaccatgactcggagctggaccaagatcaaatcgggacgttaagcgtcacaccgttgcgaacaggtcttcggacctgctcgcaactgcgcggcaggcgacgagccgtcgccggatatggatgaggatgccaggcatggcgctcgtggtttccacagtaggtcacctcgcactgctgttctcggagcatggccgcattgccagttgcgtgtttcctgttgatttttagaggcttttcaaataaacagcccgcctttcgccccgctgagccctggcggctgtcacaagaggactattccatgcgctcgacactgaagtcgcttatcgtcgccgttgccgtcagcggtgccgcctcggcccaggctgcctccgtacatatctacaactggtcggactacatcggtgaaacgacgctggaagaattcgagaaggcgaccggcatcacgcctgtctacgacgtcttcgattccaacgaaaccctggaaggcaaactgctcgcgggccgaaccggttacgacgtcgtggtgccttccaaccatttcctcggcaagcaaattcgtgccggtgcgttccagaagctcgacaagagcaagctgccaaactgggagaacctcgacccggcgttgctcaagcagctcgaaaaaaacgatccgggcaatgcctatgcggcgccctatctatggggtaccaacggcatcggctacaacgtcgaaaaggtgaccgctgccctgggtatcgagaaggtcgactcctgggccgtgctgttcgagccggaaaatgccaagaagctcgccgcgtgtggcattgcctttctcgactcggccgacgagatgattccagccgtactcaactatctcgggctggatcccaacagcgagaatccggaggactacgccaaggcggaagccaagctgctggagatccgcccctacgtgcgttacttccactcgtccaagtacgtgtccgacctggccaacggcaatatctgcatcgctgccgggttctccggcgacgtgttccaggccgctgcgcgtgccgacgaagcgggcaaaggcatcgagatcgcctattcgattcccaaggaaggcggcaacctctggttcgacatgctggccatcccgggcgatgcgcagaacgtcgacgaggcgcacgccttcatcaactatctgctcaagccggaggtcatcgcctcggtgagcgattacgtcgggtatgccaatcccaatctcaaggccggcgagctgatggatcaggaagtgcgtaacgatccctcggtctacccgccgcaggaggtgctcgaccggctctatgtatcggctgagttgccgcccaagatcatgcgtctgatgacgcgcagctggaccaaggtcaagtctggccaatagcgacgccgagcgtggcgatcccgcttcggccaatcgccgcgcctccaacacacaggtttttccggcaccgtccggtgcatattttcattcgggagttcgcgtatggccgtagcctccagcgcttataagaaggccctctccggcgagagccagaacaagcaggtgctgctgaaaatcgaccgcgtcaccaagaagttcgatgaaacggtggccgtcgacgatgtctcgctgaacatccaccagggcgagatctttgcgctgctgggcggatcgggttcgggtaaatcgacgctgctgcgcatgcttgcagggttcgaacgccctaccgacgggcgcattttcctcgacgggcaggacatcaccgacatgccgccctacgagcggccgatcaacatgatgttccagtcctacgcgctgttcccgcacatgagcgtggagcagaacatagccttcggcctcaagcaggatgggctggcgaaggatgaggtaaaggcgcgggtcgatgagatgctcagcctggtgcagatgacccagtacgcccggcgcaagccgcaccagctgtccggtggccagcgccagcgggtggcgctggcccgctcgctggccaagcggccgaagctgctgctgctcgacgagcccatgggcgcgctggacaagaagctgcgctcgcagatgcagctcgagctggtgcagatcatcgagcgggtcggggtaacctgcgtgatggtcacccatgaccaggaggaggccatgaccatggccgagcgcatcgccatcatgcacctcggctggatcgcccaggtcggcagcccgatggacatctacgagacgccggcgagccgcctggtctgcgagttcatcggcaacgtcaatctgttcgacggtgagctgatcgaggacgtcgaggaccatgcggtcatcgccagcccaggcctcgataacccgatctacgtcggccacggcatcagtacccgcgcccaggacaagcagatcacctatgccatccgccccgaaaagctgctgatcggcaccgaactgcccgaactggagcgtcccggctacaactggaccaagggcgtcgtacacgatatcgcctacctgggcgggcattcggtctactacatccagctgccgggcggtggcgtcctccaggccttcatggccaacgccgagcgccatgtgaagctaccgacctgggaggaagaggtgttcgtctactggtgggacgacagcggcgtggtgttgcaagcatgagccgcccatcattgaatgccgggcgccgtctggtcatcggcgtacccttcgtctggctgatgctgttcttcctgctgccgttcgccatcgtgctgaagatcagtttttccgaagccgacgtggccataccgccgtatacggacatcttcgcctacgccgaccagcaactgcaggtgctgatcaacctcggcaactacgtgttcctcagcgaggacgacctctattgggccgcctacgccgggtcgttgcggatcgcctttttcagcaccctgatgtgcctgctgatcggttatcccatggcctacgccatcgcgcgggcgcgcaaggatctgcaaacggtcctgctgctgctgatcatgatgccgacctggaccgccattctgattcgcgtctacgcctggatggggattctcagcagcaacggcatcctcaatggcctgctgcagaacctggggctgatcgacacgccgctgcagatcctcaacaccgacctggcggtctatatcggcgtggtctactcctatctgccgttcatgatcctgccgttgtacgcaaacctggtgaagcacgatctcagcctgctcgaggccgcttccgacctgggcgccagcaacctcagcgcgttctggaagatcaccgtgccgctgtcgaagaacggcatcattgccggctgcatgctggtgttcattccagtggtcggtgagttcgtcattccggaactgctcggcgggccggagacgctaatgatcggcaaggtgctctggcaggaattcttcaacaaccgtgattggccggtggcctctgcgctggcggtggtgatgctggtgatcctgctggtgccgatcatcctgttcaaccgcaaccagaccaaggaattggagggcaagctatgactcgtccgagctgcgggctgccccgttcgaccggctccccgagcccacgtacaccctgggaactgggaggccggccatgaagcgctacagtttttccaacctgatcctggtgctggggctgctgttcatctacctgccgatggtgctgctggtcatctattcgttcaacgcgtcgcgcctggtgacggtctggggcggctggtctatcaagtggtacgtgggcctgctggacaacagccagctgatgggcgcggtgatgcgctcgctggagatcgccctgtataccgccggctcggccgtggcgcttggcaccatggctgccttcgtgctgacccgcatcccgcgttttcgcggacgtgcgctgttcggcggcctggtaaccgcgccgctggtcatgccggaggtgatcaccggtctgtcgctgctgctgctgttcgtggccatggcgcaactggtcggctggcctgcgcagcgcggtatcgtgaccatctggatcgcccacaccaccttctgctcggcgtatgtcgcggtgatcgtgatggcccgtctgcgtgagctggaccagtctatcgaagaggcggcgatggacctcggcgcacggccatggaaggtgttcttcctgatcaccatgccgatgatcgcgccgtccctggcggcgggcgggatgctgtccttcgccttgtcgctcgatgatctggtgctggcgagcttcgtctccgggcccggttcgaccaccttgccgatggagatcttctccgcggtcaggctgggcgtgaagccggagatcaacgcggtggccagcctgatcctgctggtggtatcggtggcgaccttcatcgcctggtacatcagccgccgtgccgacaagcgcagggctcgcgccatgcgtcaggccatggacgagggcgcgcagcagaactggcggtcgacggtcgatagcagcgtcatcacgccgccgtccgcgcatagctgagtcacggccacagggccgatgcgggttcgccagtggtcagtccgaccctggcgggccccagtcacagaagcagcccaccgccagcgaatgcgtggccttgaccgggcggccggccagtaccgcctccaggatgggttcgatgaagctgttgctggagttgcacacggcgccttcgctgtaggggcccagatagaccagctgtcccttcgcatcccagacgccgacagcggggctggccggcaggctttgcgagccgggcagggcatcgagcccctgcaagccggccagctgatcgggtagacggccctggctgccgggacgctgcaatgcgtagaagtgcacgccccgatcactgaagcgttcaagcagctcggccagatgctgctgattgccggcgttgcaggggcaggcggggtcccagaagtgcaccacacggaccgctgcgtcgtcttgcagggtgtcgggcagcgccaggctatcgccagaaaacaattgcgtgctttcgctatcgaaggggcgcagataccgggcctcgaaccagcggaaagcggccagcatggcgccagcccagagcagggcgatcagcgctgcgatcagatatttgttgcgtactgacatctcggcacccttcagcggaggcgccagcttgccacgtcgcgttacagagctgaagattcgcttcaattcgagccagaacgcccgtcatgtcttcgccaatcgatcccgatatgctccgcgcgcagctgcaaccgctcgccgccggcacgccgctcagcgccgcggcacgctcttaccaggcctactacggcctcgatctgccacagcaccgcgacctccagcaccgcctgggctgcttttcggtccatggctaccaggtggccgcgcaggcctggtgcccggatcagccggtcgccacgctgctcatcctgcacggctactacgaccacatgggcctctaccagcacgttgtcgactggggcctgcgcatgggcttcgcggtactggcctgcgacctgcccgggcacgggctgtccagtgggccgcgcgcgagcatcaacgagttcgatgaataccaggcggtgctggccggccttatgcgcgaagccgagacgctgcggctgccccacccctggcacctgctggggcagagcacgggggctgcgatcgcgctggactacctgctggcccacccggatgacccgcggctggggcgcggcattctgctggcgccgctggtgcggccgcgtgcctggcgctggtctaggttcagttatgaggtgatgcggcacttcgtcaagcagatccccaggcagttcagcgagaactcgagtgatccggcattcctcgagtttgtccgctccagcgacccgttgcagccggacaccctgccaaccgcctgggtcggcgcgctgtcgcgatggattccccgcatcgaaggcgcactgcgcagtccacacagcccgctcatcgttcaaggcgaagcggacatgaccgtggactggcgctacaacctgccggtgctggagcgcaagttcaccgcgccggaggtcttgtacctgcccggcgcgcgccaccatctggtcaatgaacgggaggcgatacgccgcgactacttcgagttcctcggcgatcgcctgagctaggagcggatcacgccggcggctcgcgcctgggtttcactaccgctcgtgccgaccgccaggccggcacgcagcgcttgcagtgccgcctggtaatagcgtttccccgcgtcggactgagcgaactggacgaactcttccagctcggcgtcggaaaggtcgcgatagatgaacagcagcgtgttgtccaggtcactctcgacctgctgctgcaggcgctcgcgctggctttccagcaatccctgggcctgaccaccgccgagcaggccggggatcatctggctgaggctgtcggcggcgacgccggcgagcgccaggctgacctcggcacccgcctcggcggccggtaacgcctgcgccaggtggcggatcaacagctgccgattgctgccggcctgcatcctaggcaagccgttttcgtagcgagcgagttgctcgcggcggccggccagaacctctgccgcgaccaccttgtggcccagtggcgactggaagaactcaagtgctggctgtggatcggtcaggtgctggcgcagggctcgtttggcgcgctgatcgacggcgtccaccgcaaaacggcggttgctgttggtcaccagcgcttgatagaccgccggcggcaggctgctcttgtagcgctgctgggcggccgtcagggcatcggagaaattggcgcgttgttcggtccagcccgccgcctcgtagagttcgtcgtagctatcggccaaggcgttcaggctgaaggcgagtaatacacaagcgataagggcgcgcatgaaagctcctctgtggcgggcggtttattttcggcgtcgcgacccggggttgtcgaggagcgaaagccctgctgctagactcagcgctgtttccgcgggcccgcctgggccgcagggaaacgtcattcgacccattggagtcaccttccttgccgttctctacgatcatcgatgacctggccgaacgcggctggtcgttgcagagtgccttccttgcacatgatgtgacccaaaagctggccgacgagtgccgcagacgctatgccgaagggacgctggcaccggccggtgtcgggcggggcgaggagcaggcggtgcgcgaaggcatccgcggcgaccatatccactggctggaagaagggcaggcagaggtgtgcgatgcctatctggcgctgatggatgaactgcgccagacgctcaatcgcgagctgttcctcggcctggaggagttcgaatgccacttcgcgctttacccgccgggggctttctatcaaacccatctggatcgtttccgcgacgatgacagccgctgtgtcaccgcggtcatctacctcaatccggactggcagccggccgatggtggcgagttgcgcatgcatttcgccgacggctcgagcctcgatattccgccgctggctggcgacctgctgatgttcctgtcgggggattttcctcacgaggtgctggtgacccaggccgatcgcctgtccttgaccggctggtttcgccggcggccggtggacgtgctggcgctctgaccgggaatgaaaaagcccggcgctaggccgggcaagaacagcaatcggagcgatgcggctacatccccaacaggcttggcaacccgagggaaatcatcggcacgtaagtgatgagcaccaggaacgccagcatcagcgccagccacggcagcacggcgcggatcacctgggtgaccggcatgccggtcaccgccgaagcgacgaacaggttcagccccaccggcggggtgatcaggccgatttccatgttcaccaccatgatgatgcccaggtgaatcgggtcgatgcccagctgtatggcgatcgggaacaggatcggggccaggatcaggatgattgccgagggctccatgaaggcgccggcaaccagcagcacgatgttcaccaccagcaggaacatccacggctgcagtccggcttcgagcaccatggcggtgatctgctgcggtaactgctcggtggtcagtacatgcgcgaagagcatggcgttagcgatgatgaacatcagcatgatcgtcagcttgcccgactccagcagcacccgtgggcagtcgcgaagggtgatgtccttgtagacgaacagcgcgatgaacgccgaatacaccgccgccacggccgcagcttcggttggggtgaacatgcccgagtagatgccgccgaggatgatcaccatcaacagcagtccccacagcgcctggcgagccgaagacagccactggcggaaggtcgctcgcggcatcgccggcagcttcttcttcaccgcgacgatatagatcgcgaccatcagcccgaggcccagcagaatgccgggcaccacaccggccatgaacagcgcgcccacggaggtttcggtggcggcggcgtaaaccaccatcacgatcgacggcgggatcaggatgcccagcgtcccggcgttacagacgatgccggcgccgaaggcctgcggatagccggagcgcaccatgccggcgatggcgatggaaccgaccgcagccacggtggccggggacgagccggacagcgcggcgaacagcatgcacgccatgaccgcactgatggccaggccgccgcggatgtggccgacggtggcgttggcgaaatcgatcaggcgcttggccacgccaccggtagtcatgaaggcaccggccagcaggaagaacgggatcgccagcagggtgtagtgttcggaggtttcgaacagcttgatcgccagcgaacgcaccgagtcggggctgaagaacatgatcgtcagcgaaccggccaggccgagggagatggccaccggcacgccgatgaacatcagcgcgaacagcgccaggaagaggaacaggatagtcattacttcggctcctcttcaccgagccgggccgcttcggcggcttcgtcggccaggcccagtccggtctgctcgttgcgcaggatgcgcaccagaatctctgcgaatcgaatgaagaccatggcaaagccgatcggcacgatcataccgatctgccattgcttgacgcctatatggccgaggtcttcagcgccgataccggccgtgaacagggtctggatccactcgaagctcgccacggtcagcaggccggcgtagccaaggcagaacaggcaggcgatcacgccgatgtagcgctggatattgcgcggggcgagcttgaccagcgcatcgacgccgatgtggccagcggtgcgcacgccataggccaggccggagaagatcagccaggcgaacagtgcccgggtgagcgccgagctccaggtcatggactgcgccaggccgatgatgtaatcgccgagggcaaagaagaagtcttccgcggcgggaaaggtgtcccccagcgaatagaaaacggtgtagaggttgttcaagaccacataaacgaaggtcaccagagtcatggcggccagcaagaaggcgataaagccttcctcgaagtggtcccagacgcgccagagggcgttcatggatgacatctcccgatgaaatgcattggattcgatgggcgtacgcactgtgcgccataagccggtctggtaaccgggcgacaggatcaggacacgcttgttgtagtggcgtagcggcggagatcgatccgtcgttgcgccggtttgtcgcgtgtctccggtgcgctgtcagtaccgcaacgggggtggagggcggctggccgccctccggtgacgcttactcggccttgttggaagcgtcggcggccttgatcaggtcagctccgatctcgccttcgaacttcttccagaccggctgcatggcttcacgccacttggcacgctcttccggggtcaggaccagaatttcagtcgtaccggcatcgaggatctgctgcttggcctgcttgttcaggtcatcagcctgcttgttcacctcgacggtcacctcgccgatgatctcgttcagttccgagcgcacgtcgtccggcaggccgttccagaacttggtgttggtgatcagcatgtagtccagcaagccgtggttggactcggtgatgtgcttctgaacctcgtgcatcttctgcgagtagatgttcgagtaggggttctcggcaccgttgacgacgccggtctgcaggccttggtagacctcggcgaagctcatcttacgcgggttggcgcgcacggccttgaactgctcctcgagcacctgggacgcctgtacgcggaacttcaggccacgcgcatccttcggctcgcgcagttccttgttggccgacagctgcttgaggccgttgtgccagtacgccagaccggtgatgttcttgtcgaccatggaggtcagcagagcctggcccttgtcgctcttctggaagcggtcgaccgcggccatgtcgtcgaacaggaacggcaggtcgaagacttgaagctgcttggtgtactgctcgaacttggccagcgaaggcgcgatcagctggacgtcgcccagcagcagcgcttccatttccttgccgtcaccgaacagcgaggagttcgggtagacctgcacctcgaccttgccgggcagacgctcctcgaccagcttcttgaacatcagtgcgccctggcccttcggcgtgctgtcggcgacgacgtgggagaacttgatgatgatcgggtctgcggcctgagccagcgtggccatgcctagggacagggcgcaggcgagcgcggtggcggtcagtttgaacattgttgttttcctcttgttgtgaagtgagcctgtgcatcgcagcgaggctcggctgtaaccagcaagacaagtctaggcgccatgagcaacatgcgcccggctcgtgccaccggttcatcgtgttagggagagcaaggcttgtgccaaatgcagaaggcgctaccacccgtaaagcggaagtttacccgcatgatggcaaaatactgacgaatatttctcagccagcccgtctggcccgcaggtttgccatgttcgccggtcactgccgaagaccgcagcggtgaatcgcaccggctgccggtcggctcccttcatcgttccgatcgacgcatcgcgggagactctactcggcgttgccagccgctgaaattcatcattgaacaagcctggcttcgtcttcggcgaatgccctggcgtaagcctgcgggctcgccgggagggcctggcgtcgggttatttcatcaccgcgagcatgaccgacagcggggtggccggcagatgcgggcagcgagggcgggctccagcgtgtggcggaaatccgccagctagtcgtcctcatccggcgaggttccgccagcatcgttgaataccaggccgtgcttgcgcagcttgtcgtgcagcgtcttgcgcggcaggccgagcgcttcggcgacgctgcgcagcgagctgtgtgggcgcgacagttccgcggcaatcagcgcacgctcgaaggcttcgacctgctcgttgagcgtcgtggcggtggtgaccggagccccttcggcgtgctgggccgggtcttccaggccgagctcgagacccagggcgaagcgctcggcggtgttctgcagctcgcgcacattgcccggccaggcgtgccggagcagctgggcccgttgttccgggcgcagctcgcgtatcggcaggccatgccggctggccgcggtttcggcaaaatgctggaacaggaacagcaggtcttcgctacgctcgcgcaacggcgggatgcgcaacggggcgacgttcagccggtagtagaggtcggcgcggaaacgcccctggtcggccgcgtggcgcaggtcttccttggtggcggcgatgacgcggatgtccagcgcgatcgattggttgccgcccaagcgctcgaccactcgctcctgcagcatacgcagcagcttgacctgcacgtcgaggctcatgctctcgatctcatcgagaaacagggtgccgccgttagcgaactcgaacttgccgatgcgacgtttctgcgcgccggtgaaggcgccggcctcgtggccgaagagctcgctctcgaccaccgactcggccagcgcgccggcattgatggcgacgaagggcccgccccggcgattggaaagatcgtgcagcgcgcgggccaccacttccttgccggcgccggtttcgccgaggatcagcacgtcggcctgggtgccggcgagggcgccgatctgctcgcgcaggcgctgcatggccggtgactggcccagcaggcgggccgagagttgctggcggtcggccagcgccaggcgcaggctgcggttgtcgagcaccaactggcgcagggccagggcgcggcgtacgccgtcgagcagcgcctcgctgggaaagggtttctcgaggaagtcgtaggccccggcgcgcatggcctgtaccgccagctggatgtcgccatggccggtgatcagcagcaccggcagttcgctgtccagcgcccgcagctgctgctgtagttcaagcccatcgagcccgggcatgcgaatgtcgctgaccaccacgccggcccagtccgctggcagcatcgccggcaggccgcgagcgtcgccgaggctgagcaccttgagcccggcgagatcgagcgtctggctcagcgccttgcgcaggtggggatcgtcgtcgaccaggactacctgatattgcgggtcgatctgactggtcatgctagtcctcgctgggaaaggcgacgccgggatcggcggatcgcagatagagactgagctgggcgccgccctcggggtgattggccagggtcagctctcctcccagggtccgtgtcagggtatcgcagatggccagtcccaggccgagcccctgagcgctggtcttggtggtgaagaagggctcgcgggcacgttgcagcgcggtggcggaaaaccccggaccgttgtcgcgcaaggtcagcagcacgccgtcgtcctggcgctcggcgcgcagccagatgcgccggaccggcgggcgttcgttaagcgcgtcgagggcattggccagcaggttggacaggatctgccgcaggcgggtctcgccggcctggacccacagcgtggcgtccggcaggtcacggatcagctcgacgcccatggcctgccttcgcttggccagcaatgcgagcgcgtcgtccagtgccggttgcagggcgacccgttcaggtgcatgccgatcgcgccgtgcgaacgctcgcagatgggcgatgatcgaggccatccgcgcggtcagttcgctgatcaagcgcagattgtcccgggcttcctcgttgcgctgttgatcgagcagcacgccggcgttgtccgcgtagctgcgaatcgcgcccagtggctgattgagctcatggctgatgctcgccgacatggtgcccagcgccgacagtttgccggcctggagcagttcgtcctgggcgcggaccagctcctgctgggcctgctcgcgttccagcacttcttccttgaggcggctgttcagcgcctccagatcctgggtgcgctcctgcacacggcgctctagctgctgccgcgccttggcatccagggcgatacgttccaggtagtggcggcggcgctgcatgagcagaccgagcagcagcaacagcgccgcgagggtggcggcgccgatggccacgacggtttgcaccggacgttcgacgaggcttatcggcgccaggatgcgcaccgtccagccggtttccttgagctcgcggctctggatcagccaggcgtctatgtccagcgtcagcagtcgcggatcgagggtcggataggggcgttcggaggcgatctgctcacgctcgtcggcatccagcgcccggctggcgcgaaatcgccattcgggccgggaggtcagtatcaccacgccgaagttgtcggtaaccatcagctgttcgggcgtgctgccccacagggtctcggtatggtccagatccaccttgaccaccagcacgccgagtacctggtcgccatcgcgcacggccgcgccgaagtagtagccacgcttgcccgaggtggtgccgaggccgaagaagcggcccagcttgccggccatggcttcgcggaaatagggacgaaaggcgaagtttcgtccgacgaagctgtcctcgtcgttccagttggaggcggccagggtttcgccgtccggtgccatcaggtagatgacgtcggcgccggtctccttgcgcaactggcccagcagacggttcgcctgatccttcgcggtcgggctggccggttcgcgcagagccgtacgcagcgtcggcaggtcgccgaggatgcgtggcagcacctcgtagcggcgcagcgagccgagcaggttggcgacgtacagatctagggtctggcggttctgctcgatcagctcgttgctgtagtagcgctcggccagttgttgcagcggccacagcagcggcgccagcagcagtgcgagcagagccagattgcgccagcgtgggcgacgaggaggtagggatggtgtcatgccgatgcgcctgtgattcgggcgacattatgcacgttcgacctggcgcgggcgccgctatgaagaggggcggctgccggccctggtttagacgctctgtacggagggcatggcctgatcggcctgggcaccgtatgaactcgccaggcaccgatgcagcgccgtttcccaatcgggcagttcgacgccccactcgcgttgcaggcgtgcgcagttcaggcgcgagttgagcggccgctgcgccgccgtagggtagttacaggacaggatcggttcgagcctggcccgaggcaggccttgctgttgcagatgctgggcgatgctgcaggcgaagccataccaggaggtctcgccgatggcggtcagatggtacaggccgtccgggccgccggttcctgcccgccatttgctcaccatggccgccgtggtcgtggcaatggtgtcggcccaggtcggcgcgccgatctcgtcggcgaccaccgacagcgaatctcgctcctgcagcagccgctgcatggtcagcagaaagttgctgccttgcagcgagtagacccagctggtgcgcaggatcagatgcttgccgcccaccgcctgaatcgcctgctcaccggccagtttgctcgccccgtagacactgagcggagcgggctgatcggtctcttcgtaagggccgggtttgcgcccgtcgaagacatagtcggtggagtagtggatcagcggtacgtcgagcgccgcggcttcctcggccagcactccgggcccgacggcgttgacggcgaaggcccgttcgcgattgtcctgtgccggatcgaccgcggtgtaggctgccgcgttgatgatcaggtcagggctgagcaagcgaatctgctggcggatctgtgccggctcggccaggtcgagtgccttgtggcccagcgcaagcaccttcccttcaccggctagcgcccgctgcagtgcctgagacagttgccccttgctgccggtgatgagaattttcatgcgaacaactccgcctcgctcaacaccttgccgtcgatatccttctgcgacagttgcggcggctcggtgaatggccagtcgatgccgatctgcggatcgttccagagcaacgagcgctcatgggccggcgcgtagtagtcggtggtcttgtagaggaactcggcgctctcgctgagcaccacgaagccgtgtgcgaagccctccggaatccacagttggcgctggttctgcgcgctcagatgggtaccgacccagcggccgaagctcggcgagcttttgcgcaggtcgaccgcgacatcgaacacctcaccggcaacgacccgcaccagctttccctgcggttgctggatctgatagtgcagcccacgcagcacaccgcgctgggatttggagtgattgtcctggacgaattggcgcttgagcccggtggccgcttcgaaagcggccgcgttgaagctctcgtagaagaagccacgctcgtcaccgaacaccttgggctcgatgatcaggacgtcgggaatgctggtttcgatgaccttcatgcgtcttcaccggccaacttgaacaggtactgaccgtaaccggtcttgcccagggcatcggcgcgttgcaatagctgttcgcggtcgatccacttgtgctggtaggcgatctcctccaggcaggcgaccttcaggccttgacggtgctcgatggtctgcacgtactgcgaggcttccagcaggctgtcgtgggtaccggtgtcgagccaggcgaagccgcggccgaagcgctcgacattgagatcgccgcgcttgaggtaggccatgttgacgtcggtgatctccagctcgccgcgcggcgagggcttgatcgacttggcgatctcgatcacgtcgttgtcgtagaaatacaggccggtcaccgcgtagctggacttgggtttggccggcttttcctcgatggacagggccttgccggtctcgtcgaagtcgatcacgccgaagcgctccgggtccttgacccagtaaccgaatacggtcgcgcccttttcctggcgggaggcgcgctgcagcttctcggtgaagtgctgaccgtggaagatgttgtcgcccaggatcaggcacaccgagtcgttgccgatgaactcttcaccgatcaggaaggcctgcgccaggccgtccggcgagggctgctcggcgtagctgaagttgacgccgaactggctgccgtcgcccagcaggttctggtattgcggtaagtcctgcggggtggaaatgaccagaatgtcgcggatcccggcgagcatcagcaccgatatcgggtagtaggccatgggcttgtcgtagatcggcagcagctgcttggatacgcccagggtgatggggtgcagacgggtgccggagcctccggcgaggatgattcctttcatgcggtctccagggcgccgaggcgctcgcgttgatagcttccgtcctgaacgcgacggcaccattcgaggttgttcaggtaccactgcacggtcttgcgcaggccggtttcgaaggtttcctgcgggacccagccgagttcgcgctcgatcttgctggcgtcgatggcatagcgcaggtcgtgaccgggacggtccttgacgaaggtgatgaggtcttcgaagtgctcgatgccggccggcttctgcggtgccagctcttcgagcagggcgcagatgccgcgcaccacgtcgatgttcttctgctcgttgtgcccgccgatgttgtaggtctcgccgatcttgccctcgctgaccaccttgaacagcgcacgcgcatgatcctcgacgaacagccagtcgcggacctgggtaccgttgccatacaccggcagcggcttgccatcgagtgcgttgaggatcaccagcggaatcagcttctcggggaagtgatacgggccgtagttgttcgagcagttggtgatcagtaccggcaggccgtaggtgcgctgccaggcgcggaccagatggtctgacgaagccttgctggccgaatagggcgagctcggcgcgtagggcgtggtctcggtgaacagatcatcgacaccgtgcaggtcgccatacacctcgtcggttgagatgtgatggaagcggaacgcctcgcgacgctcgaccggcagcgtctgccagtaggcacgtgcggcttcgagcagctggtaggtgccaacgatgttggtctggatgaattcggccgggccgtctatggagcggtcgacgtgggattcggcggccagatgcatgatggcgtccggctggaattccagcagcgcctcgctcacccgctcacggtcggcgatatcggcctgcaggaaccgataacgatcactggtttccacttcggcgagcgactcgaggttgccggcgtaggtcagcttgtccaggttgaggacgctatgctcggtgtcctgaatgaggtggcggatcagagcagagccgatgaatccggctccgccggtaacgagaatgcgcatgattgaaggcttccttggcgcgctacagagcaacaggctcttggcatgtcggcaggatagacctgtcgaaaatacaaaaattcccagaccgggattgccgcgcgcagcaccgtgggaaaaacccgggcggcagcgacgacggaagagggcggcctcggcgccccgggcccggcgatgccgcgcagcagacggcgccatgagctcggccatccgccatggctggctcgcgacgctgcggaaaaaattcagcgaatggcgaacggatgcatggcgcgaccgacgcaattgagtactatcgcgtcgactttttccaccggaagcaatggaatgcctatccgtcacgaccagctcgctgagctgttgaaccttaccacacacagcgttacgcagctctcggaagccattacctgcttttcactggagctcatggccagcgaggatccggccgtacgcatcgccagccggcgcatggtgtcccgcgtcgcggcggtgcaatcggcgttcggccagcagctgaccgcgttcggcctcgatgcgcctgccgatggcggcacggatggggccggcgaaaccctggccgacagctagcgcaaggacacccgcaagcgggacagcgcgccgaggaagaacaccgcaccgattgccagcagggccgacagctgcggccagatgaccggcaagccggcgccgcggaacaggatcgcctgggccagttcgacgaaatgcgtggtcggcgccaccagcatgatgtgctgtaccgcctcgggcatgctctcgcgcggggtcacgccgccggagagaatttgcagcggaatcagcgtcaggatcaccagcaagcccaactgcggcatggagcgcgccaccgtgccgaagaagatgcccatcgacgtggcggcgaacaggtgcagcgcggcgcccgccgcgaacaacagcagcgagccctgaatcggtatctccagccagccctcgacgacgaagcgcagggcgaacgcggctgcggccaggaccaccaatcccatcgcccagaccttgccgaccatgatttcgaagggagtcaccggcatcaccaacaggtgctcgatggtgccgtgctcacgttcgcggatcagtgcggcgccggtgagaatgatcgccagcatggtgatctggttgatcacctcgttcaccgcgccgaaccaggcacggctcaggttgggattgaaggccgtgcgcaccaccgcctcgaccggataggcgtcgctgctgcggtaacgcctgatgaactcggcgctctcgctggcaatgatctgctggatatgcccggcaccggtgaaggcctggcttacctgggtggcatcgacgttgagttgcagggtcggctgccggccggccagcaggtcggcctggaagtctggcggaatgttcagggtgaaggtgtagaggccggcatccatgccgcggtccatctgctgcaagctaatggccttgggctcgatgaagtagggcagctggaaggcgttgacgatacgcaaagaggccggcgagcggtcttcatccaccacggcgatgcttgcacgatgcggcgcctcggggattgccgtggcgccttcgtagatcgccagggtgaacgaatagagaatcaggaccagcattgccggatcgcggtagaggctgcgcagctccttgaagccgagctggacgatgttgccgagcgtacggcgcaggcgttccatttcaggcctcctgcttgcgcaggccggcgatgctgagcagggtcagcagcggaatggccagcagcatcggaatgaaatagggatacagctcgatcaggcccaggcccttggagaacacgccgcggctgatgatgaggaaatggctggtggggtagagcttgccgagaaaggcgccgacgccctccattgccgagaccggatggatcagtccggagaactggatagcgggcagcagggtcacgatggtggtgccgaagatggcggcgatctggctgttgaggatcgacgacatcagcaggccgaggcccgtggcgcaggccacgtagagcagcgcgccgaggcacagcgtgaagatgctgcccttgatcggaatgccgaagaccaacaccgccagcactaccagcgtggcgaagttgatcatgcccagcgcaatgtagggcagctgcttgccgagcagaaactcgagacgggtggttggggtgacatagaaattggtgatcgagcccagctctttctcacgcaccacacccagcgcggtgagcatggccgggatcatcatcagcaacagtggaatcattgccgggaccatggccggcaggctctggacatcggggttgtagcgataacggatggccacgtcgaccggcgagagctgtccgctgacgccgttttcccgtgccagctgttgcagatagctcaggtgcaggccttgcacatagcccttgatggtgtcggcgcgcatcggcatggcgccgtcgatccagaacgcgacttgcggcatggcgccgcgtttgaggtcgcggccgaagcccggcgggatttccacggccaggctgatgtcgccgctgcgcaggcgccggtcgagttcgtcgtggctggccaggggtggcttctcgacgaaatagcgcgagccggcgatgttcagcaggtaatgctggctggtggtggtctggtcgcggtcgagcacggcataagtcaggttttcgacatcgaagctgacgccgtaacccatgatgaacatcagcatgacgctgccgagcatggccagggtcgcgcggatcggatcgcggcgcagctccatggcttcgcgccggctgtagctcagcagacggcgcaggctgaaccgcgcttgcagcgcgcgggtactgctggcgagttgcgcaggccgctcggcaccggcgacggtcgcgctcgcctgcggcgggtcggcatcgccttgcgccacggcgtctttcagataggcgatgaaggtggcttccagcgtcggcaggccgcgcttggccatcagcgcctgcggcgtgtcgctgtccagtacccgcccggcgtgcatcaacgagatgcggtcgcagcgcagcgcctcgttcatgaagtgagtcgagatgaagatggtcacgccatcctcgcgggacagctggaccagcaatgcccagaagccgtcgcgcgcgatgggatcgacgcccgaggtgggctcgtcgaggatcaggatctccggcttgtgcagcacggcgaccgccagcgacaggcgctggcgtacgcccagcggcagggcgtccggcaggctgtcggcgtcgctgatcaggtcgaaacgctcgagcatggcctggatccgcggctggcgctcggcgaccggcagatggaacagccgcgcatgcagatccaggttctgccgcacggtcagttcgctgtacagcgagaaaccctgggacatgtagccgacgcgctggcgggtctgcatgtcgcgcgggtccaccggcttgccgaacagcagggcatcgcctgcgctggcgggcaacagaccggtgagcattttcatcgtggtgctcttgccgcagccgttggagccgaggaagccgaagatttcgccacgctcgatgcggaagttcacccggtccaccgcgacgaaatcgccgaaccgcatggtcagctcgtgggcttcgatggcgatgccctcgctgtgctcacgcgcagggatctgcagcgcctggtgacggctgcgcttggcctccggcagcaggcggatgaaggcttgctcgagggtgtcgctggccgtgcgcgccagcaactcgtccgggctgccggtggccagcacctgccccgcgtccatggccaccaagtgatcgaagcgctgcgcttcgtccatgtaggcggtggccaccagtacgctcatctgcgggcggtcggcgcggatgcgcccgatcagctcccagaactgggctcgcgagagcgggtcgacgcccgtggtgggctcgtcgaggatcagcaggtcgggatcgtgaatcagcgcgcagcataggccgagcttctgcttcatgccgccggacagcttgccggccggacggtcgacgaagggcgccaggcccgtgctgcgcgtcagctcggcgatgcgccagcgacgctcgtcggcggcctggccgaacaggcggccaaagaactcgaggttctcgaacaccgtgagtgtcggatagagattcttgcccagaccttgcggcatgtaggcgatgcgcgggcagaccgtgcgacgatgcgcagggtcgccgatgtcgccgccaagcacccgtatcgagccctgctgaagtttgcgagcgccggcgatcagggccagcaggctggatttgccgacgccgtccgggccgatcaggccgaccatgcgttgcgccggcaggctcaggctgaggtcatccagcgcacgggtcttaccgtattgcaggctgaccccggcgacctcgacgaccggttcgagcggcgcgctcatggcgtgacgttgatctgcaactgggccggccactgcgcatcggcgtccagcttgagataggccatgcccggcaggccggtcttgacctgctccatgtggcgtttgagcagctgcggatcgatccgcgccttgacccggaacatcaacttctcgcgctcgctttcggtctccaccgtcttgggggtgaactgcgccacgctggcaacgtagctgatccgcgccggtatcacgtattgcggcgccgcatcgaccaccaggcgcgcctccgcgccgatggccacgcggccggcctggcgctcgggcaggaaaaaggtcatgtagacgtcggccaggtcgaccagattgagcagcctgccgcccgcaccgaggacttcgccgggttgcgccacccgatactggacccgcgccaggcggtcgcttttcagctcgctgtcacggatatccgcttgcagccgatcgacgccggcctgtgccgcctcgaccgccgattgcgcctcgatgacctgcgagcgcgccgcggcgatacccgccgtcgccgaaaggacctgggagcgcgccgccgccagcgcagcctcggcgctttgcatggcggccagatgatcgtcgagctgctggcgtggcatggcgttacgcgccaccagggtttcggtgcgttgatagcgcttgcgggcggcggtcagctcggcctggcgctgggccactccggcttcggccgcggctttctcgctttcgcgctgggcgaccagggcctgcgccgtgaggatggcattctcgccctggcgaagctgcgcccgcgcctggttgagctgcgcctgcaatacctcggtgtccatgcgcgccaggacctggccgggctgaacgaaatcgccttcgtcgacgaggatctccagcactcggcccgggctcttggtggccacgtcgatctcggtggcttcgatgcgcccgttgcccgccgcgaagccctcgcccaggccgctggggcgtagttcattccacagcaccaggccgaccacgacgagcgtggccagaacggccagggccttgaacagggttcggctggatggctgactcatgaatggctcccgcagcgatggtccgggcaccatgttaggcgttaaaggttacgccaatgcctacctggatcaattttgctgcgagtaaccaccacgatcagcgaatttgctcggtttactgctgggtattggccagcgtccagtcgaccacctcgcggctgagccggtcactggccttgccgaacgcctccaccacctgctcgatgcctgtgtcgcttgccggctggcggacctcgaaacgccggttggccagcgtgtgctgggtgttgcggtcgaccaggcgggtgtcgagggtgatcagcaccaccggcttcaccggcttgccgtcgacatagacgctctggaaggcgcgcagatcgctgtgcaggctgtagtcggcatagagattggcgtcttcgttgctcaccgacggcatccggccgtcacgctggaaggcctcgatgaggcggtcacgcagcaacaccggagcggcatcgctccagcgtgcgccaccataggcgctgatctcgttgccttgcgggaccacggcgatgcgctggctggcgaggatgcggctggcttgcggcgtgttgatgcgcagcgcctgttgccgggtcggctcgctggcctgaggctcgaccggggcggtcggcaacaggaagatccgcaaggtctcggcttcgggtagcaccgaacaggccgcgagcaggctgaacagcccgagcagcgcgaagcgcgacagggaatggcgaaggctcatgggttgaactcctgcagtttgtcgcggccgagcaggaagccgctggggttgtcttccagacgctgggtgacccgacgcagcgcgcccagggtggtacgcagttcgttgatcgccgggcccagttcgttgaagccctgcatgccgttgttcagagcgccctggttgtcctcgagcagcgtatccaggcgcgcggtggtgcggtccagcgctttcatcgagtgtgccgcgctgtccagcacgctgcggccctgctcgtcgagcagcccgttggcgttgcgcgccaggctcgacagctcacccatcaccgtgttggcctgctggctcagctggttgaactgctgcagcgtctgcgccaggtcgccgcgttggtcggacagcacgctggtggcctgttccaggtgctccagcgtacggctcaggcgagtggtgttctcttcggaaaagatctggttggcgctgagcaacagattgttgatgttgctcatcaggtcttcgccgttctccagcagcgcgctgagtgaagaagggtcggcgacgatcagcggcgggttgtccggatggcccttgagacgcgggctttccggggtgccgccgtgcagctggatgaccatgctgccggtgatgttggccagggccaggcgcgcctgggtatcggacttgatcggggtaccgccatagacccggatgcgcgcgcggaccttgcgcggatcgtccggctccagccacagctggacgacatcgccgaccttgatgccgctgtactccaccgaactgccgctcgacaggccgctgacggcctggctgaagccaatgtcgtagtagctgtattcgcggtccatgctggacttgcccagccagagggcgaacagcagcgcgcagccgaccgcgaccacggtgaacagtccgatcagtacatgatgggcacgggtttccatctcagggcatctccagcttcagcgcagcatcctgcgcggcgcggccacgtgggccgtgaaagtattcgcggatccagggatcgtcggtggcggcgaccctctcgagggtgtcgaccaccagcacgcgtttctgtgacagcaccgcgacgcggtcacagatggtgtagagcgtatccaggtcgtgagtcaccagaaacacgctgaagcccagggcatcgcgcagggtcaggatcaactggtcgaaggccgccgccccgatggggtcgaggccggcggtgggctcgtcgagaaacagcacctccgggtccagcgccagcgcccgggccagggcggcgcgtttgaccatcccgccggaaagctcgtcgggatatttgcaggccgcctccggtggcaggccggcgagcgccagtttctgccgcgccaggtgttcggcatcggcgcgcctgaggccggcgtgctcgatcagcggcagggcaacgttttcctgcaggttgagcgaagtgaacagcgctccgccctggaacagcacgccgaagcgccgttcgacttccgagcgccgctgggtcgagagtttcaacaggttttcgccgaataccttgacgctgccggcgttgggccggcgcaggccgacgatgctgcgcaacagcaccgacttgccggtgccggagccgccgaccacgccgaggatttcgccgcggcgaatgtccaggtcgaggttgacgtggaccgcctgcttgccgaagcggttgaccaggccgcgaacctggatcacggaatcgtcggtgctcaccagcccatctccatgaagaacagtgcagccacggcatcgaacaggatcaccatgaagatcgactgcaccacgctggaagtggtgtgttcgcccaccgattgcgcgctgccgctggccttgaagccctccaggcagccgatcaccgcgatcaggaaggcgaacaccggcgccttgccgaggccgaccaggaagtggttgagctgaatgtcacgctgcagaatggtgaagaacatggtcggcgagatgtccagcgccagcgagcagaccaccagcccgccggcgatgccgctgagcatgccgataaaggtcaggatcggcagggtgatcagcatcgccagtacccgcggcagcaccagcagctccaccgggctcaggcccagggtgcggatggcgtcgatctcctcgttggacttcatcgcgccgatctgcgcggcgaaagcgctggcggtgcgcccggcgagcaggatcgcggccagcagcacgccgaactcgcgcaggaaggagaaagccaccaggttgacggtgtagatggtcgcgccgaaatcggccagcaccgtggcgccgagaaaggccaccacggcgccgacgagaaaggtcagcagggcgacgatggggatcgcgtcgagcccggtctgctcgatctgcgcgaccagcgcggtaatgcgccagcgtcgcgggcggggcagctgcatgaccagtgtctgcagggtcaggccgatgaagccgagcagggtgcgctgctggttccagacgcccgccacggtgcgaccgatgtgggccagaacgtcggccaggccattggtttccggtgcctgttcggcttcgggctggtccagcgcggcggcgacggtccgcagcagcgcctggcgttcgctggccagctgcggagcccattcgtcgaggcgggcgacccgagccggaccgagcaactcgaccagcaacccggcgccggccgtatccagctcgcccatggcatcgagctcgatctgatcggcgtcggacacctgatggcgcgctcgctcgacctcgccgcgcagcgccgcataatgctgcagcgtccagtcacctttcacactgagcgtggcggcgccggcgtcttgggcgggttgtcgctgcagactgccggccagcgaagtggggtgcgtcaagttggtatccctaaatgcagagggcgtgagcggtacaggtgccgatcgtcgcgatatgacctgatgctatcagttcgacctcgatggcgcggttacgtttagccgttccggccgcatgcagcggcagttggtcggcctggtcggatgtttttcaggtgcatacgaactatcgatcgctttgaccctccatagcgtgcacgccgacggttatgctcggtacgcgcggcgaaggctgctatcttacgccgcctttgtcgctgtcttcagcacgcccgcgcttcgggccctgccatccatcccggtttttctccgatttcagcgaggctatcgcttgcctatgaattacttgcgcttgctgccgttcatcgcggtcatggcgatcatcatcttcagcgggctgcgccccgagccggtcccgcaggttttcgaccagcaggacaagctgcatcacatgctcggctttgccgcgctgatgttttcgctgcgcctggcctttccacagtggcgcttgttctggtcgatcgccgcgagcctgagcgtggcctttctgatcgagatggggcaggaattcctacccaatcgtgagccgtctttcggcgacatgctggccaacacactgggcgtcctgctgggctgggtctgttcgtccctggcgtaccagtggtatctgcgccggatcggcgtgaccaccgatcccgaggtgcccgaggctggcgagcacctcggcagcccggaacggccctgacctaagcctgggcgttcgcctggctgcccgcgccagcgttgacatggcgcgtcctgacgagcactgcggtggcgagcatggcgatcagcgcgccgaccaccgccaccgccatgtctttctgcgggtcccaacgatcatgctgcgtggcgagaaaggtacggcccagtccgtcgccaagcatttcgccgccgatccattcgatcagctcgtagaccgccgaggtcgaaagcacgatgtccaccggcagcaccaggctccacaggccggggcgtagaccgaggcggatcagtacctcgcgtatcggataggccagcaacaggccgtagctgaagtgcgccaggcgatcgtactggttgcgatcccagcccagttggcggttcaggctctcgccagtcagggcctgccaccaggcgtcgtagggcacatgggcgtaggtgtagtgagccccgagctgatggatgcacaggtacaggaagatcagcgtcgcggcgctgggcgagggtgagtagtgacggtggcccagcagcaaggcggcgaccagtccgaacaccagcatgttttccagcaaccagtcgtggcggtcgtagggggcaatcgccagggccgcccagaacagcagaaacaggccggccaggcctagcacatagcgtcgctggtagcgctcggtctccatgatctcctctcccatatttccggctcatgcataggaccagcgcagcggcgagagggtcccgcagaaggtggaatcggtcattggccaaccttttgcgaccgcgaagggtcacaacccttgatgctccagcgaggcggcccatgccatccatccacagccatctacttgtcccgctgtccggcgccagcctcgggctagcactgctgacgctggcgggctgtgacgggcagcaatcggctctcgccccggccggcaccggtgcgcaaagcatcgccacgctgttctggtggatggctggcggtgcgctggcgatctggctggtggtgatgggcatcgccctatacgccacccatgcgcaccccgaagcacacagcatgcgcggcgcgcgctggttgatcatcggcggcggcgtgatctttccggtggcgctgctgaccgggctgctgatctacgggctgatgctgatgccgcagttgagctcttccgaaaacgtcgccctgcggatcgatgtgtcgggcgagcaatggtggtggcgggtgcgctaccggaccgcgacgggtgaggcggtggagctggccaatgaggttcgtctgccggtgggcaagcgggtggccttcagcctgaccagcccggacgtgatccactcgttctggattccttcgctgggcggcaaggtcgacatgatccccggtcgcaccaatcaactggtgctggagccgaccgagaccggcaccttccgcggcgcctgcgccgaatattgcggcacctcccacgcgctgatgaacttcgccgtggtggtgatgacgcgggagggctttgatcagtggctcgctgaacaggccgagcccgcgcagcaaccaactagcgaattgcagcaggccggccagcaggcctttctggccaacggctgcggtgcctgtcatcaggtgcgcggcaccgaagccgacggcacggtcgggcccgacctgacccacgtcggcagccgcctgagcctggctgccggcacgctgccggccgatgtcgacgccttcgagcgctggatcggccacagcaccgccatcaaaccagacgtaaaaatgcccgccttcggcatgctgcccgaggcgcagctgaccgccctggcgcactacctgagcggactccaatgagcgagccgatcgagtaccgcgacccacaggaggaggcccgcgccaaggcgcaggccgaacgcctggccgcggcctggaaaacgcccaccggctggcgctactggtcggcggtgaacaacaccgaggtcgggctctggtacaccggcgtgtccttcctgttcttcctcttcgccggcgtactggcgatgctgatccgcgcccaactggcggtgccgaacaacgacctgctgtccgccgacacctacaaccaggtcttcacgctgcacggctcggtgatgatgtttttgttcggcgtgccgatcttcgaggccttctcgatcctgatcctgccgcagatgctcggggcgcgggatctgccgttcccgcggctgtccgcctacggcttctggtgtttcatcatcggcggcgtgttcgtctgcggctcgatcttcttcggcgtcgcgccccagggcggctggttcatgtacccgccgctcaccaccacctatcaggacgggctcggcgcggacatctggctgctcgggctgtcgtttatcgaagtctcgtcgatcgcggcggcggtagagctgatcgtcggcgtgctgaaaacccggccgccgggcatgcgcatcaacctgatcccgctgtattcctggtacatcctggtggtcgccgggatgatcctgttcgccttcccgccgctgattgccggtgacctgctgttcgagctggagcgtgccttcgactggccgttcttcgatcacacccgtggcggcgacccgttgctgtggcagcacctgttctggattttcggccacccagaggtctacatcatcttcctgccggcggtggcgctggtggcgaccatcgtgcccaccgctgcccagcggcccatcgtcggctacaccttcatcgtgctggccgcggtgggcaccggtttcatcagcttcgggctgtgggtgcaccacatgttcaccaccggcatgccgggaatctcgctggcgttcttctcggcggcgtccgaggcagtggcgattcccaccggcgtgcagatcttctgcttcttggcgacggcgctggcggggcgcttcgtcaaatcggtgccgatgctgttcgtcgccggggcgctggctatcttcgtgctgggcgggttgaccggtgtgatggtggcgctggcaccgttcgatttccaggcgcacgacacctacttcatcgtcgcccacctgcattacgtgctgatcggcggcatgctgtttccggtgatcgccgggctctattacttcttcccactggcgatgagcaagacgctgtccgatcgcctcgggcgcatcgccttctggctgatgttcatcggcttcaacatcgccttcctgccgatgcacttcaccggtctgctcggcatgccgcggcgggtctacacctatgcgccaggcatgggcttcgatgtgctgaacatggtctccacggtgggcgccttcatcctcgctggcggcgttgcggtgctggtctgggacgtgttgcggcccaagggcaaacagccctgcagcgcgcgcaatccatggcatgccgggacgctcgaatggctggcggaaatgccgggtgaggcttggggcgtgcgctcgatcccgatcatcaaaagccgctatccgctatgggatcagcccaacctgatgcaggacgtcgacgccgggcgcttctatctgcccgatgccgaggaaggcaagcgcgagacactgatcagcagcatcatcgatgccgagccgatccagtgtctgcgcgtgccggggccgaccttcctgagtatgtgggcggcgatcttcaccggtggcctgttcatcttcgccacctatagctggtacgtcgcggcgctggtcagcggtggcctggcgctggtcaccatcctgatatggctgtggaccggcacggcggtgatcccggagaagccgcagaaagacatcggcctgggcgtgacggtgccgctctatgcctcgggcgcccactcggtgggctggtgggccaccttcatcaccatgatcggcgacatgagcgccttcggcagcctggtgttcggctatttctttttctggaccgtgcatgaggatttcccgccagcagaagcggccggcccgggcgtgttctggccattgctggcgctggggctgatcgccgcgtcctgggcgctgacgctgctggcgcggcgctgcaacgtccatgatcaggccgccggcttctatggctcgctggggctggcggccgtctgcaccctggccggcgcgtactcgatgtgggccggaccgcatttcggcgggctcgacccgaccactcacgtctatcccgccacggtctgggtgctggtgctctggtgcctgctgcacctggcgatcggcctgatcatgcagctctactgcctggcgcgccgcgctgcggggcggatgactgcggtacacgacatcgatatccgcaacgttgcgctgttctggcacttcatgttcatcaccgttggcgtcaccgtggcggtcatcgccggctttccggaggtgttatgagcgagaacctgagcgaacagccacgcagcggcgaccgacagtcgccggaagcgccaccgcaggagcgcgactcgctctggttgatcaccttcagcccggccatctgggcggcgcatttcctgctttcgtacctgatgacctcggtgtggtgcgccaaggtggcaggccgtgacggcgagctgggcgatattcgcctggccatcggtgtgctgacgctcgttgcgctgaccggcatcgcgctgaccggctggcgcggctggcgcaagcactccttcggccacgccacggcgccgcatgatttcgacacgccgggcgatcgccaccgcttcctggggttctcgaccctattgctcagcggcctgagtttcgtcgcgacgatcttcgtggccttgtgtgtggttttcatcaggagctgcgcatgatctggcggccgctttcgctgatgctcggcctggcgaccctgggcgcggtctggcttggcccgctgcccgctatggccgatcggttgttcgtcgggcacatgctgatgcacatgctggtggtcgcggtcgccgcgcccttgctggcgatcgggctggctggcggtcggctggacttctccgctcgcctgccgattctcttctcgccgatcctggcttcggtgatcgagctgttcgtggtctgggcctggcacatgccgacgctgcatcatgcggcgcgcacctcgaccggggccgagctgctggagcagggcagttacctggttgccggcctgctggtgtggctcgcggcgttcggtggcgtgcggcatcggcgggcgctggccggcatcgcagggttgctgctgacctcgatgcacatgacgctactgggcgtgctgctggcgatgtcggggcgacctctttaccagcacaccggatcggcgctctcgggcctgagcccgctggaagaccagcagatgggcggcgtgatcatgctggcctttggcggcagcgcctacctgatcggcgggttgtacctgctgttcggccttctacaggacaagcgcaatgcctgttcagtcagctaaacgcatgctccggcgatgcttggcgcccctgcggcgctggctgtgctggctaaccggcggctcatggaagcgcgtcgtggccgctgtcgcgctgctgacgatgctcgccggcagcggcgccttcgtgctggtctcgctggggctggtcccgatcggcgccaggtccgggcactggaaggcgacgggctggctgctgcactacgccatgcgccgcgcagtcagcacccagtcgatgggcatcgaggtgccgccgctggacgatccggcgctggtgctcaagggtgccgggcattatcacaccggctgcctggcctgccacggcgcgccgggcgagagacgttcgctgatcgtccagcagatgacacccgagccgccgctcttgccgccgcgaatcgaacactgggagccgcaggagctgttctggatcgtcaagcacggcgtgaaatacaccgccatgccggcctggcccgcgcaggaaagggacgatgaggtctgggccatggtggccttcctccaggcgctgccgagcatgtcgccggaacgctaccgacagcttgcgctgggcgggcgtagcgcggccgaacccgtcacgcccgatcatctgcggcggctcgaggacccgctcggtccggtgttggccaactgcaaccgctgtcatggcgaagacggcgggggccgaggcgaaggcgccttcccgcggttggccgggcagagcgagccctatctgctcggcgcgctgcaggcctatgcccgtggcgagcgctatagcggcgtcatgcaaccgattgccgctggtctggagccggaagtgcttgaagccctggccgggcattacgccgagctgccgcccgccagccgaaccagggccccgaagcctgcacccgacgtgctcgcccgcggcctgacactggccgagcgcggtgtaccagagcgcggcgtcccgtcctgcgtgcactgccacggcccgaagaacagcccgcgtaacccgatgtacccgaacatcgctggccaatatgccggctacctgaaggcgcagctggcgctgttcaacgatggcaagcgtggcggcacggcgtatgcccgaatcatgcacagcgccgcgcagcggctgacgccggaagagatgcaggcgctggccgactactacgcatcactgccggtagccgccgcaccggcgctgtccgcggatgccagcaacgaacccgcgtcgcccctcgccgagtcccggacgcgggaaaattcatcccaacagcagaggtaaccgatgttcgacaagatcgtggaaatcgtctcggcgttcggctacatcggcgtgttcgtgctgatgctgctggaaaacatcttcccgcccattccgtcggaactgatcatgccgctggcgggcttcgtcgcggcgcgcggtgagctcaatttcatcgcggtgatcctggtcggtacggctggttcggtggtcggtgcgctgccctggtactacgccggtgccaagctcggcaccgagcgcatgaaacggctggcgcgccgttgggggcactggttgacgctgtcgccggaggatgtcgacaaggccggtgcctggttcgatcggcacggcaagggcgcggtgttcttcgggcgcctgatgccggcggtacgcacgctgatctcggtgccggcgggtattgtcggcatgccgatggcgctgttcctgctctattcgacactgggctcgctgatctggactgcgctgctggcgctggccggcttcctgctcgaatcgcagtacgaaagggtccaggcgtatctcaaccccgtgtccaccgcgatcgtggtgctgatggtgctctactacctttatcgcctgatccgtcagcggctcgcccgacgcgactgaacggatggcagcgggatgaaacggggcgtcgccctgcacgcatcgcagccaaaggtagggtgggctttaggccgccgcgtgctggcaacaccagcgcgcccacgcctcgtccgttctatggctgtgtgccgctgggctgaagcctcggacagcggcttgcccggccgggtgaaggatgcgcaacacccagcgccggtcgcgccgtagcggtcaggccgcgccggcggcctgcggatgcgtctggcggatgcgctcgcactggtcgatgacggcgaagacgtcctgccacatctgctcggactgctgcttgagctgatcggtgcgtgcctgtatcagtgtcctgacccgctcgctttcgtcgattaccagatcgatcttgcgcttgatttccgcctcatcggtggtgacctgaaccagcccatcggggaaaccgtaatcctcgaacagcatctggtacttgtggctccagccggtcgccagcgccggtacgccttgagacaaggcgctgaccagaccatggaagcggctgcccagggtgccgctgcaggcgccgaggatgcccttgatctccagcgcgccgctttccttgacgatcggaatgccgcccaccgccgccgacagctcatcggccaggcgctggtcatccttgccttcatgcaccagcacgaaaggtttggcgttcttttccagcaggtagcgcgtgcaggcgatcaggaatggcagataggcgtcgcggatctgctggtcggttttgtcgagcatccggcagttgggcacgatgcagaagcggttctgctcgacatcgaaattcgccggcaacacgcctgtgatcaggttggtgaagtccggcgattgcctgatcttggcctgctcgccgaccaggttggtcaggtgctcgtaggacacacgctcgcgcgggaagatcagatcgatgttctcgaccgccgttttcatcgccgcccggttcttctccgacttgaacgggcccagcgcctggggcatgaggatcacccgggtgccgttcttcttccagcgcctggccgactgggcgagttcggcacagggggcctcgccccattggtcgctgtaggcgaagccggctgcgtcgatgaccacatcgacttctttatccagcaccacgccatacatctcacggagctggcgcggcgcgaagttggccaaggtgccccactgaatgccgtagcgccacagccaggccttgggatagaagcccagctggaccagtttgcgaaacggctgctcggcctttttcggggtcggggccatgacgaaggtagcgtctggataccgggccttcagcttctgcagcgccgcatgcaacatcagctcagcgcctttattgacgaagcctgcttttctgatctcgataatcatcgcttacctcagttgtatacgatcaagtctgtctcggtcttcttgtccgaataaggaatccctcccgttggatcggcgtaacccacagcgagcagcatcacggtgcgctcctggtaggccaggcccagaatctttgccagttgacgctcgcgttcctcgacgtccggccagttgatcgagcagctcgacagacccaggctttccagcgccagcatcagttgcatcgccgccagcgagccgtcgatataaaccacgtggcggtcgcgcgcctcggggtagcagcccagatcgccgaccacggcgatgacgcatggtaggttgtcatgaaagcccgccgtaccgccggcacacttggcgacccttgcggccttttccttgccgttgctgacgtagaagcggaacggttggcgattgcaggccgatggcgccagtgccgcagcccgcaccgcctgctccagcagctcgttgctgaccggcttgtcctgataccagcgcaccgagcggcggcggcggaacagcaccatcagctcctcgtagctgaccgggcactcgggcagctggctgtgcgggtagggcacgcagcggttggcttcgtcgctgtggatgcccgcgaaggcctgcctggccgaatcgatacgcggcgtattgccgaccgcgccgaagtagtcggtgagcacatcgttggcccagcgttgctgaccgttggggacacctgcctgggcggcgtcggcaaagcaacgcacggtcgggccaatgtaatcctcggcaaaggtcgcgcgccgcggacgcatgatcaggcccttctccagccgatggacgttgcgtcgcaggaaggcgtcgttttcgcccttgccccgcatccgccgggcgaaattcaggcgtccgagcagcaccgcacgatgctcgcggtcgaattcgcggctgacgaagcagtaatacagcgaggcgagaaagccgctgctggaaaacagccggaccagggccagcccggtggtgtcccgggtcgccttgatcgcgaccttgaccggctcaggcagggctctggctagggacatgaggctcatcgggcggctcctacggctttgaatgcatagcggacgggactgaccatcgatttggtcatcatgagaaagaccgggcgcgtcttgctgtgcaccagcagcgcagcgtacgaagcgacggcgtaggaaatgagggtcgccatcgccgcgccttcaccgccgtagtgcggaatcagcagcgcattcagaccgacgttggccagcgcgccgaggccctgggttaccagggagaacatcaacgcgccttcgatcaggatccaccggctgaacgccgcgcgcatgaagatgaacacgcctgcccagatatggatggtgaggatggatgcggagttctggtactcgctgccgaacagcagggaaatcagcggtccggcgacgagtgacaccagcagcgcaacggcaatggccaggacgaacagcagatcgagcaactgctggaaacgctggttgaagcgggtcgggtcggcctcgtgcagcttgatcagcttggggaagaaagaggcgacgatggcggtcggcaggaaataccaggcctccgagagctgcgcggcgacggcgtagacgcccacttcctcggcgccgaccatccacttgagcatcacctgatcgatcttcatgtagaccacagcgaagatcgagccgaggtagatgatccagccctggctgagcaactcccgcgcccgcgcgaagctggccttccagctcatcagcgaaacgcgcgtggtgcccttgtagagcaacgcgaggatcagcgccgccatcacgaactgagccgtatgcgcaaaggcaaaggccaccacaccggcgccgctgatcaccatcaagagctttagacccgccgagagcaggatcgcgctggacttggcgatggccgggtatttggcctgcacctgcgattggaaccagtactccaccacatcgaaggtctggaagaagattgctgaggcgacgatcagcaacatccagaactcggtcccgccgatctcctcgaacagcgaagcgtagatcaggatcagcagaaagccgagggtcatgccggtcagcttgagcatgaaggtggtgcccagcgtctccggcactgccgccggctgcttgaccacctcgcgcaccaccagtcccgccaagcccatgtggccggcagaggcgaagatggcggtcatggaaatggcataggcgagaatgccgaactgctccggccccaggtagcgggccagcacgatcgccatgagaaaacccacgccgatgttcagcaaccgctccgccatcatccaggaggcgttgaagaggtagagcttgagtttgtcgaatatcgtcttgattgctgtcatcaggtggcctggctcctcaaggctggctccgtggcggcaagcattgcctttcagttgcgctggagtggcgacggatagctgacagcgtttagcccggcatgttccgacagccgatcggctcgttccgagtttcagccacgtcgaacggcgctttctgccgcccaccaatcgccgacccaactcgccgcagcccaaggcgcacggggctgcacgcatgtcggccgggagcctggcatagcgtgtccgcgctgcaacataaaacgcgccggcgatcggaagcggcgacagatcggcccgtttgagaccggggtcacaggcgcatcgaaaagcccgtcggcttaacctgatggccttttcatttcaaaagtggaacttttgccatcatgcctgctcttaaccctgccgccgttgctggccgctccctgacccgccccgtcgtgccaggaaacgcctagcacggcgtccagcccgcacgttccaggctgtgacaaggctgctgcgaagggagctcgcaagcgccaggataggcgcaggaaattgctgcttggagcagccaaagggaaacggacccagcccgaaaaacagaaaagccccgcatcaagcgatgcggggcttttttgtgcttggtcgctattgggcgcgctgcgcggtagccggatatgcaggtgagagcgggttcgcttccgtacccaggccaggcataagcccgaacaaaaaaggcccacccggaggtgagcctttttcgttgtttcgtatggtgccggcaccaagagtcgaactcgggacctactgattacaagtcagttgctctaccagctgagctataccggcgaaaagatgggcgccattatagccattgctcgcggcgagtaaaccgtttgttgccagttgtttgcacggctttgttcaagtggttgcgtgtgggtggacgagctctgccaccaggatgaggttgcgcggtgtcagctcggccgggcagaaggtgcccagatggacggcgtagccgttttccgccagcagcaatgcacggtcgagggccagccagagctccagtggccggcggaacagcccgcgcagtagctcgaggttgcgtacttcagcgaggcgttgccagccgtggcgttcgagcgtaggccagtcccggggcgtcggttggggtagtgatttcagcgctgcgagatcccggcaatagtgttcgaagtctttcttcagccagcttgccggcagtgagggcgttggcaggtattgatcgacgccgcgcagttcacgctgcagcaggtcgaagcccagccgccaggccatcgactggtcgcgctggcggcgttcgcgggctcctgcggtgaccgtttcgttgagcgggagtccgagatcgtcgcgcgacagcgagagggccgattgcgcggcgcggttcgacagggggcggtagtggtcgccctggatgcggttgtagcagcacggcgcgattgccagctgccgacagccccgggcaatgctctgttcgatgaggcgtacatgcaggtcgccgcaggcgtgcagggccaccggggttacggttgggccgaggcgcgcggtcacgctgtcatgcatgacgtcctgctgccggtgctcggcttcgatgccaagcttcacgctgagacgctgcccggcctcgaccagtgccgggtcccactccagacaggtcaccgcgtccccgtgcagggccagcctcctccccagatggcccttgccggcacaccaatcgagccagtgctgcggacgctcgcgaaacctgagcgccgaaccgaaagcctgaatttgcagccatttgcgcccgggtacatcgacagactggcggggatcggccactgcgtccggtgcatgagctatcggctccagctcggtcaggcgggcagcttgagcggccagctgcggaaacggagcgggggccgtgaggtgggtcgggtggttgtgtaccgcctcggcttgcgccagggatcggctgcgcagccattcggctagcgccgggtggtcggcttcccagtcgaggcgtcggtgggtgaaggggcgaggccgccataatgcctgatggcggagcaggaacgcgtcgagccgctgaaagcggtcggcgagttccgagaggctgaacggttggctgggcatgacggctcggggctggcggctgtggctcatgatcgcgccgaaacccctggccgaaaagccagacgcccgtcgcaacgggcgtctgccgggttacttgccgtagacctgctctggcagccaggtgaccaggccagggaactggtaggcgatgaccaggagcagcagctggatcaggatgaagggtatgacgcccttgtagatggtgctagtgggcaccgagttcggggtcacgccgcgcaggtagaacaaggcgaagccgaagggtggcgtcaggaacgaagtctgcaggttcagcgcgatcatcactccaagccagatcgggtccaggcccatggccagcagcacgggcccgacgatcgggacgacgacgaaggtgatctcgatgaagtcgaggatgaagccgagcaggaagattaccagcatcaccacgaagaaggcgccgagcacgccgccgggcagctgggcgaacacgtcttcgatcagcacctcgccaccgaaaccgcggaagaccagcgagaacagcgaggcgccgatgaggatcaggaacaccatggcgctgatttcggtggtgccgtaggcgacttcgcgcagttggccgaagttgagctggcgcttgtacaccgccagcaccatcgcgccgagggcaccgagcgcggctgcctcggtgggggtcgcgtagcccgcgagaatcgagccgagcactgcgctgatcagcagcagcggtggaaccagtgcgttggcgagcctgccccattcaatcgggccgagctcctcctgcggtagcgccggcagtttcttcggctgaaagaccgccacaccgatgatgtagaggatgtacagcccgaccagcagcagccctggcagaaatgcaccgacgaacaggtcgccgaccgagacggtcttcggcgagaagatgccgagcttgagctgcgcctgctggtaggcgctggacatcacgtcgcccagcagcaccagcacaatcgacggcggaatgatctgcccgagggtgccggtggcggcgagggtgccggtcgagatggccgggtcgtaaccgcggcgcagcatggtcggcagggccatcaggcccatggtcactaccgtggcgccgacgatgccggtgctggccgcgagcaatgcgcccacaacgcacacggagatcgccaggccgccgcgcagcgtgccgaacaggcgtgacatggattcaagcaggtcttcggcgacccggctcttttccagcatcacacccatgaagacgaacagtggcacggccagcatcgtctggttgttcatgatgccgaacaggcggttaggcagggcgctcaggtagccggcatcgaaggtgccggtgacgatgccgaggccggcgaagagcagcgacacgccgccaagcgtaaaggcgaccgggtagccggccatcagggctgcgcagatgcagacgaacaggagaatcgccatcagctcagccatgcttcacctccggggccggcaggcgaccagtcatgatgtagccagccttgatgatctcggcgatgccctgcagcgccaggcagaagaccaggatcaggatgatgcttttctgcaggtagacgaagtgcaggcctccggtctcgctggagctttccagcgtggcccaggagttggcgacgtaatcccagcttgcccagccgagaaacaggcagaccggcagcaggaaaagcagggtgccgaacacctcgaccaaggcctggtagcgcgggttgaagcgctgatagaagatgtcgacgcgaacgtgaccgttgcgctgcagcacccaggccgcggcgcccatgaagaccagtgcgtgagcgtacagaacggcttcctgcagcgcggtggcgccgatgccgaagccgtagcgcagcacgaccacgaccgcggtaccgatgaccagaaacagagtgagccaggcgcaagcctgcccgaagcgggcgttcaccgcgtcgatcgccctggcgagaccgagcagtggaggggcatgtttcgacattgcagatcctttattgttatggcccagacggccggcgattctaggtggctgcgtaacagtgtcgcaaccggcagtactacgtacgtagtctcggtacgtagtcacggcgcttgagcgagagatagccatatgatagctagaaccacctgagttcggggtcccgatattcagcattacaacaacaaggagtcatccatgaaacgtcgtcaaattctggccgccgctggcgttggcttggccgcaaccgctctggccggttgcaacaaggaagccgagaagaccgcgggcaaagccgaaggcacctccgataccgagaaattccactggaagatggtcacctcctggccgaagaatttccccggtgtgggcgtcggcgcggaaaacttcgccaagcgggtcaacgaaatgagcggtggccggctgacggtcaaggtttacgccgccggtgagctggtcccggcactggaagtcttcgatgccgtctcccgcggcaccgccgaaatgggtcatggcgcgccttactactggaagggcaaggttccggcggcacagttcttctgcgccttgccgttcggcccgaacgcgcaggaaatgaatgcctggctgcactacggcggtggtatccagctgtgggaagaggtgtacaaaccctacggcgtgctgccgatggcctgcggcgccactggcgtccagacggccgggtggttcaacaaggagatcaattcggtcgatgacttcaagggcctgaagatgcggaccccgggcctgggtggcgaagtgctgaccaagatgggcggtaccgtggtcaacatgccggccggtgagatcttcaccgcgctgcagaccggcgccatcgacgccaccgagtggatcgggccatacaacgacctggcgctgggcctgcacaaggcggcgaagtactactacaccccgggctggcaagagccgaacgtgaccttcgagctggacgtcaacctgaaggcctgggaaaccctgccggacgacctcaaggccatcgtacgttcggctgcgcgcgcggtgaacggcgacatgctcgacgattacaacgccaagaacatggaagcgctggagcagctgcgcgagcagggcgtcgaagtgaagcgtctgcccgatgaggtgctggcgcgcctgaaggaagtcgctgccgaagtggtcgatgcctccgcggccgccgatccggtggccaagaaggtctgggaccagcagagcgcctacctcaagcgtctgtacgaatatgccgagttgaacgagaaggacatctacaacatccgcggctgacccgagccgccggccgctggccgaaacgaaaacgccgcccattgggcggcgtttttgcattcacggaccttcagctttccagcgtcgcgttcaggctgatctgcgcgttgaggactttggaaaccggacagccttccttcgcctggttggcgatctgctggaagcgctcttcatccgcgccgggtaccttggctttgagcgtcagcgcgatggcggtgatcgaaaacccttcgccatccttgtccagcgtcacttcggcggtggtgtcgatgcgttcggcagtcaagccagcctgaccgagcatcatcgacagcgccatcgaaaagcagccggcatgggccgcgccgatcagttcttcggggttggtgcccggtgcgccttcgaagcgggtattgaagccgtaagggttgtccttcagtgccccgctctgggtgctgatggtgcctttgccgcttttcagatcaccttgccagacggccgatgcggtttttttcatgtcgcctccgatgctgtgggtgtgtggatgccggtcgccctgcttgctggccgcacgtacgccgggcggccagccggtccggagccttactgctgctcggcggcgagaatggcgttcgccagctgcatatcgctggcctggagcgccggctgctcgctacgcaccttcaacagcatggcttcgaggtagggcccgcgtatcgcgccgtcactggcgacgaagctgccagcgtcctcgcgcgccgcagcgaccagcttgtcgtcatggaaggtcatgtaggtggaggcagtggtcgcgcccgatgacagaacctgtctaacgaagctgctgtccgccattgccgcgccaaaaggaagaacactcaaggtaattgctgccgtcagtagggtcttgcgcatggttggtgcctccgcttgattctcaactagagagtgtgcgccggccggcagagttcctcggttcactcattgcgttcgagcaactggcggaccttggtgccgagggcttcgatgctgaagggcttggccagcatatccatgccgggcgcgaggaactcgcctcgcacctcggcattcggcgcgtagccggtgatgaacagcacgggcagttccggacgttgctgacgggcgatctcggccaattgccgaccgttgatgcccggcaggccgaagtcgctgaccagcagatcgatgcgctggtcgcctttcagcagcggcagtgcactggcgctatccaccgcttgctcgacccggtagcccagctcctgcaatacctcgaccaccagcatgcggacggcggcttcgtcctccacgaccagtatggtttcgtcgggttgcgcgccctgtatcggcccgggctcgctgccgtgccccggtcgcggttccagaggctgctggttgcgcggcaggaacagcgtgatcagcgtgccttctccgggcgtgctgtcgatgcgtacgtgcccgccggtctgcttgatgaagccatagaccatcgacagccccaggccggtgccctggccgatgggtttggtggtgaagaacggatcgaacgccttggccaccacttccggcggcatgcccgaacccgtgtcggccacgctgagggtcacgaagtcacccggctcgggaccatcgggctgtgacgtgccgatccgtacgcagccggtctgaatgacgatccgaccgccgtcagtcatggcatcgcgtgcattgatcaccaggttcagcagggcgttctccagctgatgggcgtcggtgtaagccagccacggatcgggctgcagatacatggcgaactcgatgtgctcggccatggtgcggcgcaggatgtcctccatcgactgcaccaactggttgacgtccaccggctgcgaatccagtgactggcgccgggcgaacgccagcagacggtgagtcagcgcggcggcgcggttggccgaactggtggcggcatcgacgtagcgggtcaggtcgttcacccggccactggcgacccgccgctggatcaggtcgagcgcgcccagcacaccggtcagcatgttgttgaaatcatgggcgaggccgccggtgagctggccgatggcctccatcttctgggcgtggcgcagggtttcctcggcacgctcgcgctcgctcatctccacgtgcagcagatggttgatctcggccagttcgcgggttcgctcggccacgcgccgttcgaggttgtcgttgagctcgcgcagcgcctcttcggcagcgacctgggcagtaatgtcggtattggtgccgaaccagcgggtaacctggccgaaatcatcgcgaatcggaaccgcgcgcgaaaggaaccagcggtactggccgtccttgccgcgcaacgggaaggtttcctcccagaccgaaccgatggccacggcgcgtttcatcgaggcgctgacccgcacgtgatggtcggggtggtgcaccgatcgccagcccagcgcgcgcatggcttccagcgtggtaccggtgtagtcgtaccagcgcttgttgtaccagtagatgcgcccggaagggtcggccatccaggcgaactggctcatgttgtccgccagggttcggaactgttcctcgctggcgcgcaatgcccgttcggcgcgcattcgctcgtccgcggtccaggcgcggtcagcgacttcgcggatgaaggagatgtcgtcttcggcccactgccgtgggcgatcttgcaacaagatcagcgcggcgatcaggcgcccctggtcctgcagcggcacgcagaccaggctctgaatacgccgcagccgcaggcttgccgcctgtgcggcggtgcgggtgtcatgcaggacatcatcgaccacgaccagctcgtcgttctgcaggtcgtaaatgaagtcgccgtagtctgcgaagcacaggcgttcgctgaagtcgcctagcgcaccgtcgctccagtaccgctccatggtggcgtactgaccgcccgggtcgacggtcaggaaggctgcgcgggtgacgttgagggtcatgcccaatgcgcgcacggcggccgtcacgatggtgatgctgtccggctggcctcgcagcagatcgccgagctccatcagtaccgtttgtcgctgctcggtcatctggcgctcgcgtatctgctcttcgagcagggcgttcatgcgcagcagcttcagttcggcgttgcgttcggtggtgatatcccgggccgtgccgagcatgcgcaccctgccatcggcatcgatcaagcgccggccgcggttggccagccagcggaactgatcgttacgctcgtcgtagacccgataaaccagattcagctcgccgtcgccgacaccctcgagcgcgttgcggaaggcttcgatcagcgagcgccggtcatcggcgtgaacgcgggcgagaaactcatcgaccgacagggccggctcgttcggcgccacaccggccagcgccttgagttgcccatcccaatgcagggtgttgcgctggtagtcatagtcccagacgccgatcgaggcgatttcgttggccaggctaactcgttgctcggcctccagcagtgccttgcgcgcgcgggcccggtcgccagcggcgcggatgcgttcggccacttcgcgcaccagggaaatgtcggcctggctccagggccgcgattgacggctggcgaacaacaggaaggcgcagtgcgaggtcggttcctgcagcggtgccagcagcaggctggggaagccaacgtggtcgtgcaaggcgccgcattcgtcactgcagtcggcttcgtcgagcaggtcctcgaacggcacgatgagtccctgggccaggcgcaggcgcagaatgccggcacagctgcccagggagcagggcgcacgatccgtatgttcggtgtgcggccagcgaccgtcgatatgcacgtcaccctgctcgtcgagacggccgacggcgatgcagtcgacctgcatcagtggcgccagctgctcggccatgaggtcggtcaggtcgatccggccatcggcgtcctgcaggtgatcgctgaggtccagcagataggcctgctgcgcctcgctgcgggtgcgctcgctgatgtcggtgaaggtgcagatggcaccgtgcaacacgccgtcgcggtacagcggggcgactcggtactccaccggcagactgctgccgtcctggcggaaaaacagctcgtaggccacgtgggcgggctcaccggtgcaggcggtgcgctggatcgggcagtccgccacggcatagggcgagccatccggatggctgtggtggatgacctgatgcagctggcggccgagtacctgatccctgctggggaagccaagcagctcgatgaacgcttggttgcatagcgtgacgaagccgtgggtgtctaccgagtagaagccctcgctggcggagtccagcagcagacgggtgaaggcctcgctctccagacgctcggtctcggcgcggcggcgctcgtcgatgtcctgcgccaccagcacccagtgcagcaggttgccgtcgcggtcatagactggcgcgccacagccctggaaccagcgtgcggaaccgtcggcggcaagcagggggacctcgaaactgccggacttgccactcttgagtgccgagtgccattgctgcagcacggcgtcccggtgatccggtgccacgccctccagccagccccagccggccgaatcgctggccgacaggccggtgaaattgcaccagtagcgattgcagaaaatcagcgaaccactggcgtcacactgccagatgacctgtgggcttagatctaccagcgcgcgatagcgctcatcggcctcgcgaaccgaagccgcgtccgcaccgggctgggtgtcgccgtcgcgccgccagtgctcgtcgtgctcgccggcgtgggggcgtgccagcagggcgataatctgccgagccagcgtctgtagccgcgcaatctgccgctcggtcaatgcgctggcaacttcgttcatcacacagagcgcgccgagcgccacaccgtccgggctgcgcagggcaaccccggcgaacaagcccatggacgaggggctgcacggatcgtcggcgaggttgtcgatcaccagtggccgatggctgtcgatcacgcgggcgtacagcgcctgagctggcccagcggtgggctggacgcgaccgaaagccgccttgatccatcggcgatccttgtcgaggaacacgatggcggcgctggagcagtcgcagagatccgcggcgagcgctgccagatcgtcgaagggcgcctgcgctggcgtgtggacgtcgtaacggccaagcgctgccaggcgcgcggcctcgctgacggtgttgtctgctttctccatgttcacgtgttctgctcggctatccatgacggcaagaatgtcgtgcccagccgtaagactcgagcatcggcgagtagcggtgttacctgattattgactggcgcacggcgccgcgaaaggtgtctggtgcgggattcatcgcaagtagaccgcgcccgaaggagcttcggccagtgccgccggtccggtcgttcgtcgcggggcctgtggatcactcacggctcgctggggcgtggcgagcggcgccgtctggcgaaccctcgagcaaccgaccgcgatcggcggcctgcaatgcggccaacagggcgggatcgcgcccgtacacgtctggccggtagtgggcctgcccgctgctgtcggcctcggcggtccagtaggccagcaggataggcgtgggcttggccaggccgaactcgtgagtctgacccgtcgcgagcagccggtcgaagcgctcgtgctcgccttcggtcagtagcagatcgaccagttgcatcaccgattcgacccggacgcagccagagctgaaggttcgttgcgagcgttcgaacaggccctggctcggcgtgtcgtgcaggtagatggcgaaagggttggcgaagcgaatcaccagccgtccgagtggattgtcgggcccggctgcctgccgcagcatgatcctgccggggttgctccaatcgacctgcgccgggtccagcaccttgccctgatagtcgagcacctgcatgttgtgactggccagatagtccgggttctcacggatcgtcggcagcttgtcctcgcgcaggatggtcggcggtacggtccacgtcgggttgagggtcaggcgggtaacgttcgatttgatcgccggagtctggcgggtgttgcggccgacctggctgcgggtctcccactgcggacggttgccgttgaagaaaatcacccgccctccggcaatgtcgaccaacagcgagcgcgcctcgatatcgctagacagccagcggaaccgttccagattgatcttcagctggttgagacgatcggtcggggtcacgttcaacgcggttcgggtgtccttgcccagcacaccgtcgtcctgtagcccgtgaagacgctggaatgccttgagcgcctgctcgatcgacgcgctatagcgcatttcggaatcggtcggcgggacggctgccggcagatagccgtcgctggccaggcgctggcgcagcagcggcacacgagggtccgacatgccggggcgcagggtcgggcctgccggaatcgacagccactgccgcggcggttcggcgcgcagccgcgcatgcgcctggcgcaggttgtgatactgctcgagcgtcggccgcgccctgtcgaaagctccctcgagatccgtcaagccgttgtcggctatttccagtaacggatcgtcctgctgcggtgccgcggcatcagggctgcgccagaccggctccagccgatcctgcggcaggcgtccatggctcaagtgctgtagcgccagcaggtaggcgtgagtggcgagaatgtcgctgcactcacggtgcagcggttcgctcgtggcggtctgcatggcccggcgaatggcctcgggatgatagatcgccggattcaggccgtcgtcgaccagtgcgtcgagctgcccgagcagcttgtcgagttgcgcgtaggaggtccagagcgcttcgaaacggtgccggcgataaagcgcttcgagcggctgcactgccgtctggccgatctcggcgagcgggccttcgcagctgctggtcaggctttgcagggcctggcggatggggctgggcgggtcgtcggcgggctgtgccaacgccagcaagggagcgagcaaccccaggataaccagacgaaatgcatgttttttgtacaacgctccactcccgggcatccaagcgactgctagactccgcggctcaatccgctgcggttttggaaagccaagcccttgcggaccaccacaaaatgacctgtcagctgcgtgaagtcttgtcggctcacgtctgacctgtttcgctgccactcatgccggcagtgcgtgagacgccggtcgaggcacgttcggccttggcgtcgatgaggtatttcaacacatgatggtttcgttccgacgccttttactcgtcgcaggcctatttctgtcgacgccgctcctggcggccactcccacctatcagccaatggtcgatgacctggcacccttggcgcccacgctgaaccgcaaggtgctcacccatgccgtcgcggccatgcagtgcgcagtcaacaacggtgccagccccgcgcaacggcttgcggtgatcgacttctcgctgccgtcgtcggaacgacgactctggatcttcgacctgcaacagcggcgattgttgctggaagattttgtcgcccatgggaagaagtccggcgaaaacctggccacgcgcttctcgaacgctctcggcagccaccagtcgagcatcggtctgttccgcaccgccgagagttacagcggcaagcacggctactcactgcgcatggacgggctcgagcccggcgtgaacgatctggcgcgtgagcgggccatcgtgattcatccggccgactacgtgaatcccgcctggatcgaaacccagggccgcatcggccgcagccagggctgccccgcggtgcgcccggaagtggcgcgcatggtggtcgatagcctgaaaggcgggcagttcatgttttcttggtacccggatcagcagtggctgcaatcctcggcctacctgaactgcaagcccgcgcgggtcgcgggaatcttggcggcgaggcaggggtaacggccgacaagagcgctggaggctggaggctgaacggaaaaggcgctccgagttgtcggaagatttgccaatctgcgggcggggtggatcacgctccaccgatccaccggcggagttgtggtggatgtaaaagcgacatccaccctacaatctgcaatcctcggcctacctgaactgcacgcccgcgcgggtcgcgggaatcttggcggcgcggcaggggtaaacggccgacaagagcgctagaggctggaggctgaacggaaaaggcgctccgagtagtcgggttaggcctcccaagctacaggccgcgtagggtggatcacgcttcaccgatccaccggcgaagttgtggtggatgtaaaaagcgacatccaccctacaatcgcttccagcttccagcttccagcttccagcttccagcctccagcctccagcctccagcctgttttttctatttctgctcgctctgcggcgtcacccgcagcacttcttccagcgtggtcagccccgcggcgatcttctgcgcgccggacaggcgcaggctgtgcatgccgtccttgaaggcctgacgacgcaaggcgatgaggtcggtatcggccgtgatcaagggtttgatcgcgtcgttgagcagcatgatctcgtagaccccggcacggccgcggtagccggtgtcgcgacattcgatgcaacccacggcctgttgtgcattgcccggcagcggggcgttccagggcttggtcagggcctgccagtcatcggcgtccagttgcaccggcgccttgcagtgcgggcacagggtgcgcaccaggcgctgggccataacgcccagcaaggttgcgcgtagcaggtaatgcggcacgcccagttcaagcagacgcgtgatggcgcttggcgcatcgttggtatgcagggtcgacagcaccaagtggccggtgagcgcggcctggatcgccatttccgccgtttccagatcgcgaatctcgccgaccatgatgatgtccgggtcctggcgcatcagcgcgcgcacgccgctggcgaaggtcaggtcgatgttgtgctgcacctgcatctggttgaacgcgccctcgatcatctcgatcgggtcttcgatggtgcagacattcacttctggcgtcgccagctgcttgagcgtggtgtagagcgtggtggtcttgcccgaaccggtcgggccggtgaccagaatgatgccgttgggttggccggtcatgctctgccagcggcgcaggtcctcggcggaaaagcccagctggtcgaagcccttgagcagcacttccgggtcgaagatgcgcatcaccatcttttcgccgaaggcggtcggcagcgtcgacaggcgcagctccacctcgccgccgtctggggtcttggtcttgacccggccgtcctgcggcttgcgcttttccgcgacattcatccggcccagggtcttcaaccggctgaccaccgccatcgccacctgcggcgggaactggtagacgttatgcagcacgccgtcgatgcgaaagcgcaccgtgccctgttcgcgccgcggctcgatatggatatcgctggcgcgctggtcgaaggcgtactggaacagccagtcgacgatgttgattatgtgcgagtcgttggcatcgggctcctggtcgctggcgccgaggttgagcagctgctcgaagttgccggcgccgctgaccttctgatcggtggcggtggcgccgctgaccgacttggccaggcggtagaactcgaccgtgaagcgctgcaggtcgaccggattggctacgacccgcttgatcgggcgcttgagcacgtgggtgaggttggcttcccagctttttacgaacggctggctgctggcgatggtcacggccgagttgtccaccgccacggcgaggatcttgtggcgctgggcgaaggcgtaggacatcagcggagtgaccgcggccacgttgatcttcagcgggtcgatgcgcaggtagggctgcccggcttgttcggcgagccagaccgtgagcgtctcgaggtcgagcttcttgcccggacgcgtcaggtcatcgagctgctgcgcggcgatgaactccagcgggtgctgctgggcgttcgacgcgctgcgccgcagggccatgcattgctcggcggcgtcctgcggcaggcggccctgggcgacgagttcgcgcaataggtcgttgaggtcgaggaaacggtcctgggcgggagcattcagcacggtaagggcctttcgatcatgcggaaacagaggccaagcttgccgataaaaccgcatcctgtctgcggcaagctgcatctttgcggtgcccgtcgcgcagtttggataccgcggtgcttaggcgtcgaagacaaaaccagtgctgttggttgcggccgttccggcgagtcgcagaccttcagccgcttgctcgccttttttcgcggtcaagaccgctcccacagggggcctggctgcaccgctaccggcatcaggctaaacgctcagttctggtgggagcgaccggccgtcagactaaacgctgagctttggtgggagcggtcttgaccgcgaagagggctgcacggtgcttagccgtctaagacaaaccagtgccgttggttgcggccgttcgggcgagtcgcagaccttcagccgcttgctcgccttttttcgcggtcaagaccgctcccacagggggccaggctgcaccgctaccggcatcaggctaaacgctcagttctggtgggagcgaccggccgtcagactaaaacgctgagctttggtgggagcggtcttgaccgcgaagagggctgcacggacttggccttcgaggacgaaaaacagcgccgtcggtcgcggtcgttccggcaagtcgcagaccttcagccgcttgctcgcctttctttcgcggtcaagaccgctcccacacgggccaggcggaaccgctagcggccgtcagactaaacgctgagcttctggtgggagcggtcttgaccgcgaagaaggctgcacggaagtcggctgtcgaggacaaaaccagcgccttcggcgggccgaccacgccggccccagccctctacttcatcaacaacttccacggcttgagggtccataccctatgggcctgatctacccgcgcgtcgagcacctcgtcgccaagcggctgcgatgacagcgcgtagagcttggccagctcgccgtacagacggtcggtttccggcagttccagcgtggcgcgggccagatgcagccagaccagcaggcgctccatgcgcgggcgctgttcagccaggtcttcgggttgttgctgatagcgcggaagttgcagtgcctgagcttcctcggccagcaggcggggcaaccaactgcccagctcggcagcgccctggcggttgccgcggttgttgcgctcggcagtccatgcgcgctgtagcaaccacagcgaggcgctcagcgagaacagaccccagcgcggttgcgccaattcggcggcgaaatcggccggcgcggcctggcggacgctttcatcgtcctggcccgcttcgaggcgcgggcgccaatcctggatcagcgcgtccagccgctcgcgcagttcgcggctgctggcgcgcggtgcggcttggccaaggctgccgagcagggcacgcagctcgatcagttgctgcagccactcgccaagcagtttccaatgcccgttgtagcggtattgctcagccagccgctggctgttgccgagcaggaaccaggccagcgcggcgaaggcgtcgtccaagggcatgccggcctcgacctgcggcgccggcaggctcagcgagtagctgtcggcatcgtacaagcggtagccgcgttcggccttgctgatgtcgcagggcatcagcggcaggtcggcggccagctcggcggccagctccagcagcgcttcgggttcgccctggcgcagctcgagctccagctcgcagatttcctcgctccgcttgccgacgacgaccttgcccaagtccagtgccgcctcgatgaccaccttcgacttgccgcgtccccaggcgatttcggctttttcgcggacgaaatcggtggtgaagatcggcttcagcgtcttcttgtccagctcggccaggctggccggccagcagtcgtccgcgagtttcttcacgtccagcttggctttgtccaggtaccagtcccactcgttgcgctcggacagtccggccacgctctggccacggcttttcagcgtctggatgaactgctcaccgtcgcgccgcagacgcagcgcgaccttggcctgcgccagctcgcgttccggcgtgtcgtagtactggttgaacagttcatgccgctgccagccgctcttgttgcgctttttcagcagcggatgctcacgtagcgccagcagggtttcgcgactggcgcgcagtttgatttcggtttctttctgcatgatgcccagatgatgcctatgtttgagtgtgacctacgtcacttggtggcggccctttgaggtcatccgtatacttgccgccttctgaagccggggtgttccctatgccaatcaatcctttcgtcagcctgttcggacgctcgcctatcggtccgatgcaacagcatatggccaagtctcacgaatgtgccgccaacctggttccgctgttccaggcgatcacggcagaagactgggaacgggtcgaacagatccagaaagagatggcccgactggaaaacgaggccgacaagctcaagaagagcgttcgtcagcacctgccgaaaagcctgttcctgccggtcccgcgctcggatttgctggaactgctgagtgtacaggacaaaattgccaaccgcgccaaggacatcgccggcctgatgctgggccgctgcatggccattccgccagcgttgcagccggagatgctggccttcgttcagcgcagcgtcgatgccagttgccaggcgctcaaggcactcaaggaactggattcgctgctcgaaaccggcttcagcggtcgtgaagccacgctggtggaaaagatggtcgaggagctcgaggagatcgagcgtgaaaccgaccgcatgcagatcacggtgcgccgtgccctgttcaagctggaaaaggaattgcctccagtcgacgtgatgttcctctacaagatcatcgaatggatcggtgacgtggccgaccgtgccgagcgagtcggcaaccgtctggaacaattgctggcgcgctgaggcgccagcgtcctttctgggttcaacaggtaattcttatgtcatttatttcggaatacggcttcgtactcctgatccttgcctgcgccttcggtttcttcatggcctggggcgtgggtgccaacgacgtcgccaacgccatgggcacctcggtcggttcgcgggcgctgaccatcaagcaggccatcatcgtggccatgatcttcgagttctgcggcgcctacctggccggcggcgaagtcaccgagaccatcaagaacggcatcgtcgatgcggaagtcatttcgcctgatctgatggtgttgggcatgatgtcggcgttgctggcggcgggcacttggctgatggtcgccaccatgaagggctggccggtatccaccacgcattcgatcatcggtgccgtgatcggctttgccgccgtgggtatctccgtcgatgccgttcattgggatgcgatcgggccgatcgttgccagctgggtagtcacgcccatgctttcgggcatcgtcgccttcggcctgttcatgagcgtgcagaagctgatcatcaatactgacgagccgttccttaacgcgaaacggttcgtgccgctttacatgttcctcaccggcttcatggtcgcgttgatgacggtgaccaagggcctcaagcatgtcggtctgtcactgagcagcagtcagggcgtgctgctggcatttgccatcggcgtgctggtggccttgatcggcgtcgcgctgctgtcgcggatcaaggtggacgaggaagcggaccgtacctttcactacgccagcgtggaaaaggtcttcgccgtcctgatgatcttcaccgcctgctccatggccttcgcccacggcgccaacgatgtggccaatgcggtcggcccgctggccgccgtggtcggtgtcatccagtccggcggtgcggcggaaatcgctgccaaatcggcggtgccgggttgggtactgctgctcggcgccatcggtatcgtcatcggtctggcgacctacggctacaaggtgatcgccaccatcggcaaggaaatcaccgagctgacccccagccgtggcttcgccgctgaattggcgacagcgaccacggtggttggcgcctccgccatcggcctgccggtatcgaccacgcataccctggtcggcgccgtactgggcatcggcatcgcgcgcggtatcggcgcactgaacctcggagtggtcggctcgatcttcatgtcctggctgatcaccctgccggccggggcgttcctggccatcctgttcttcaccatcctcaaggcgatcttcgtctgaaccaatcgtcgccgcagcttttccctcatcggtgaggctgcggcggcgcgtttcatgtttcactgggtgccttcgtagtcgtctttctggaggtcgccggtgcccatcccctcgctcaaagaccagttcgccgcgctgatcgcagctccctcggtcagctgcacgcaagcgcattgggaccagaccaaccgccccgtgatcgacctgctggcaagctggctgagcgatctcggcttcgcctgtgagatacagcaggtcacgccgggcaagttcaacctgctcgccagctacggtagtgggccgggtgggctggttttggccggacacagcgataccgtgcccttcgacgctgagttgtggacggccgagccgctgcgactgcgcgaagccgatgaccgttggtacggcctcggcagctgcgacatgaaaggtttctttgcgctgatcatcgaagccgtgctgccgctgctcgatcagccgttcaaacaaccgttgctcatcctcgccacctgcgacgaagagagctccatgtccggcgcccgtgcgctggccgaggccgggcggccgctggggcgtgcggcggtgatcggcgagccgaccggcctgcgcccggtacgtttgcacaagggcatcatgatggagggcatcgagatccatgggcagagcgggcactcctccaacccggcctacggccacagcgcgctggaggcgatgcacgaggtcatgggcgagctgatggcgctgcgccgtgaatggcagagcacatacaacaacccgctgttcgacgtgccgcaaccgaccctgaacctcggctgcattcatggcggcgacaaccccaaccggatctgcgggcagtgttcgctggagtacgacctgcggccattgccgggcatggagcccgagcagctgcgcgatgcgatcgccggacggctgcgaccggtggctgaccggcatcaggtgaagatcgagctggcgccgctgttccccagtgtgccggcattcgatcagccggtcgacgccgaactggtcaggctggccgagcggctcaccggtcatgccgccgaggcggtggcctttgctaccgaagcgccttatcttcagcagcttggctgcgagacgctggtgcttggccccggcgacatcgcctgcgcccaccagccggacgagtatctggaactggaccgaatcgaacccactgtgaggttgctgcgcgggatgatcgaacactattgcctgcaaccgggccgaggataggagcaggtctggcgattgatcgcagcatgaccctgctcccgcacccccacttcgaaccgactcccggactgaacaagctgttactgaaggcttttgcaatgcacaactacgtcacctggctccgcgactcctcgccctatatcaatgcgcaccgcgaccgcaccttcgtcgtcatgctgcctggcgacggcctggagcaccccaacttcgccaacatcgtccacgacctggtgctgctgcacagcctcggcgtgcgcctggtgctggcgttcggctcgcggccgcagatcgaagcgcggctggccgcccgcggcatcgagccgcgctatcaccgcgacctgcgtatcaccgactcggcgacgcttgagtgcgtgatcgatgccgtcggccatatgcgcatcgccctggaagcccggttgtcgatggacatggcggcctcgccgatgcagggcgcgcggctgcgtgtggccagcggcaacttcatcacggcgcggccgatcggtgtgcatgatggggtcgactaccagcacaccggcgaagtgcgacgcgtcgatcgcaagggcattggccggctgctcgacgagcgcaccatcgtgctgctgtctccgctgggctattcgccgaccggggaaatcttcaacatcgcctgcgaagacatcgccacccgcgccgccatcgatctacaggccgacaagctggtgctctacggcgccgagcgtggcctgcgcgacgaaagcggcaggctcgtacgtgagctgcgtccaccgcagatcccggcctatgtcgaacgcctcgccggcacctaccaggccgagcttctcgatgccgccgcacaggcctgcaagggcggcgtgcgccgcagccacgtgatcagctatgccgaggacggttcgctgctcaacgagctgttcacccgcgacggtggcgacggcaccctggtgacccaggagcagttcgagcaattgcgcgaggcaaccatcgaggacgtcggtgggctgatcgacctgatcacgccgctggaagagcagggcattctggtccgccgctcgcgcgaagtgctggaacgcgaggtcgagcagttcagcatcgtcgagcgcgacggcctgatcatcgcctgcgcggcgctctacccgatcgccgattcggacgccggcgagctggcctgtctggccgtgaaccccgaataccgccatggcggtcgcggcgacgagctcctcgaacgtatcgaagcgcgcgcccgtgcgctgggcctgaaaaccttgttcgtgctcaccacccgcacggcgcactggttccgcgaacgcggcttcgagcccagcggcgtggagcggctaccggccgcgcgggcctcgctctacaacttccagcgcaattcgaagatattcgagaaggcgctgtgaggcagacctgccagccaaggcagaggctagcggagagatgtgagagaagggtggagaggtgcaagtgggagcggtcttgaccgcgaatgggtctgcatcggagcccgatctgttcgcggtcgagaccgctcccacaattcgcttgacgcagcacggacgtagggcgggtaaaacccgcgaggtgcttcagccaaccaccttggcgccgcgcatggtgcggtgatgcgttgagtaggcttccaccggttagtagtaggctaaagcccacggcctgagggcgcccagtcagccaagcacagcggtgcaagtgggagcggtcttgaccgcgaatgggtctgcatcggagcccggtctgttcgcggtcaagaccgctcccacaattcgcttgacgcagcacagacgtagggcgggtaaaacccgccgaggtgcttcagccaatcacctcggcgccgcgcatggtgcggcgatgtattgagtcggcttccaccggttagtagtgggctaaagcccacggcctgaggtagcccagtcagccaagcacagcggcgcaagtgggagcggtcttgaccgcgaatggttctgcatcggagcccgatctgttcgcggtcgagaccgctcccacaattcgcttcatgcagcgcgagcgtagggcgggtgaaacccgccgaggtgcttcagccaatcacctcggcgccgcgcacggtgcggcgatgtattgagtcggcttccaccggtaagtggcgggctaaaagcccgcggcctgacgcagccctgtcagccaagcaccgcggcgcaagtgggagcggtcttgaccgcgaacgggtctgcgccagagcctggtctgttcgcggtcgagaccgctcccacaagtcgcttcatgcagcgcgagcgtagggcgggtgaaacccgccgaagtgcttcagccaatcacctcggcgccgcgcacggtgcggcgatgtattgagtcggcttccaccggtaagtggcgggctaaaagcccgcggcctgacgcagccctgtcagccaagcaccgcggcacaagtgggagcggtcttgaccgcgagtgggggcaagtccagccccacccggccgcactgaatcgcttccaagctacagctgcgtcaaactccgctgatactcctcgacgaagctgtcgaaatcctgagtatccgccgcttccatctcggtctgctgcgccagtgagctgcgcgcggcttcgtcgaaccaggccacgtcggcatcggacagtgcacggccacggaagtcttcggcgtgctggcgagtctggcgcagggcgaactggctgaagctttcgccgtggcggcgcatcgcttcaagtacctgggccgatggggtcaggctgctgtcgtcgaccttggcctgttgcgcggcgatcgcgcggatatgctcgtcgctgccctggctgcggtccagcagctcggcgacctggctgatctggccgatcagctcgctggcccaatgctgcaggctgaccggttcgccgcagcggctcagttccagacccggctcgcgcccctgcttgaccaccttgaggaagttatcgctactggcccgacattcgccctcgatcagacaagggctctgctgcagcgcacagaacagcaggaaggcatcgaggaaccgcgcttcgccgaggtcgatgcccagcggcaggaacgggttgatgtccaggcagcgcacttcgatgtactggataccgcgcgcacgtagcgcatgcagcgggcgctcgccggtgccggttacacgcttgggccggatgttcgagtagtactcgttctcgatctgcagaatgttggtattgagctgctgccagttaccctcggcgtccttggtgcccagcgccgcatattcggggtaggacgtcgagaccgccttgtgcaggctgctggtgtagctgggcaggtcgtcgtagcagggcgtgaggcctgcctgggcgttgctctggtagcccaggtcgctcatgcgcaggctggtggcgtaaggcaggtagagcgtttcgtcgtcgaactgctcgagctggtgcgcccgcccacgcatgaaggacgcatccagcgccggcgaagcgccgaacaggtacatcagcagccagctgtagcgacggaaattgcggatcagggcgatatagcgccaggattggtagtcctgcggcgagcggccatcctgctcgtcggcctgcagtacggaccacagcgcctcgggcagcgagaagttgtagtggatgccggcgatgcactgcatggtcttgccgtagcgcagcgccaggccttggcggtagacgtacttgagccggccgatgttggaactgccgtactcggcgatgggaatctgcgcttcttctggcagtagccccggcatcgaggggctccagaggaattcgctgtccaatcggctataggtgtagcgatggatggcatcgagatcgtccagcgtccgggccgggtcggtttcggtgccggtgatgaattccagcagcgcctcggaatagtcggtggtgatcttcgggtgcgtcagtgccgaacccagtgcccgcgggtgcggggtcatggccagctgaccgtcgttgtcgatgcgcaggcattcccgctcgatcccatgcagacattgcgagagcagcggaaggtttggatgctcggccaacagtgccaggcggtgggagaggaggtcgctcaagtttgggttccttcacgcatcagtcggcacaatatggggcggcgagcgacaagcttcaagccacaagagcgggctcggtgtgctgagttgacgctcgtagcgtgctgcctgccgcttttagaggcaggcaaaggtcgattgcgccttggccaccagcttttcaccctgatgaacctcggcctccagcacctgagtgcgccgcccgccgtgcaccacccaggcgcggcaaatcagctcaccgtccgtcaccggacggatgtagttgaccttgcattccagggttacgctgttcggcgaaccatcgcccaggctgtggctcgcctgacccatggccgtatcgatcaatgagaacagcgcgccgccgtgcagtttgccgtgcaggttgcgcagaccgtcatgcatcttcaggctgaggatggcctcgccaccttcggccttgagaatctccaggcccagcaggcgcccgaaggcgctgctgctgccgatcgcttcggcttttgcgctcacggcttatttcctcagactcttggcattggcgaacagcgcggccatggcgttgttggctggtgccggcttcgtctccggcttgctcggcttgcgctcgccgcgcgcctggccgccacggttgttgccaccgccgcgcatggtgtccgccttctcgcccggggtatcgctcatgcgcatggacaggccgacgcgctgtcgcgggatgtccacctccatgaccttgaccttgacgatgtcgccggccttgaccacttcgtacgggtccttgacgaacttctccgacaacgcggagatatgcaccaagccgtcctgatgtacgccgatatcgacgaaggcaccgaagttggtcacgttggtcaccacaccttcgagcaccatgccgggcgtgaggtcgctgagcttctccacgccttcctggaattcggcggtcttgaactcggggcgcggatcgcgaccgggcttctctagctcctgaaggatgtcgctgacggtgaccaggccgaaggtctcatcagtgaactgcttcgggtcgaggcgcttgagaaaggccgagtcgccgatcagcgagcgaatgtcgcggccggtgtcctgagcgatgcgcttgaccagcggataggtttccgggtgcacggcggacgcgtcgagcgggttgtcgccgttcatcacacggagaaagccggcggcctgctcgaaagtcttgtcgcccagacgcggcactttcttcagctcactgcgtgccttgaacgcgccgttggcgtcgcggtaggccacgatattctgcgccagggtggtattcaggccggagatacgcgccagcagcgccaccgaggcggtgttgacgtcgacaccgacggcgttcacgcagtcctcgaccacggcatccagcgagcgcgccagcttgagctgggagacgtcgtgctggtactggccgacgccgatggctttcggctcgatcttcaccagttcggccagcgggtcctgcaggcgacgggcgatggacaccgcgccgcggatcgaaacgtccagatccgggaactccttggccgccagctccgatgccgagtacaccgaagcgcccgcttcggagaccatcaccttggtcagcttgaggcccggcacctgcttgatcaggtcggcggcgagcttgtcggtttcgcggctggcggtgccgttaccgatggcgatcaggtcgacggagtgcttggcgcagagcttggccagcacggccagggtaccgtcccagtcgttgcgcggggcgtgcgggtagacggtggcggtgtccagcagcttgccggtggcatcgaccaccgcgaccttgcagccggtgcgcaggcccgggtcgaggcccagagtggcgcgcgggccggccggcgcggccagcagcaggtcgtgcatgttgcgggcgaatacgccgatggcgtcgtcctcggccttgtcgcgcagctcgccgagcaggtcggtctccagatgggtgtagagcttcaccttccaggtccagcgcaccacttcgcttagccacttgtccgccgcgcggccacggttggcgatgccgaagcgctcgccgatcatcacttcgcccgggtgcatggtgccgggcgcttcgtcacccaccttcaggctgacgctcagcacaccttcgttgcgcccgcggaagatcgccagggcacggtgcgatggcgcactcttgagcggctcgtcgtgctcgaagtaatcgctgaacttggcgccttcgttctctttaccgggcaccacacgtgcactcagggtggcgttgtggctaaggaaatcacgcagcttggcgagcaggttggcatcctcggcgaagcgctccataaggatgtacttggcgccttcgagcacggccttggtatcggcgaagcccttctcggcatcgacgaagcgcgcggcttcgctttccgggttcagttcgggatcggcgaaaattgcgtcggccagctcaccgaggccggcttccagagcgatctgacccttggtgcggcgcttctgcttgtagggcaggtagaggtcttcgaggcgggtcttggtgtcggcgagatcgatctcacgcttgagttcgggggtgagcttgccctgctcttcgatgctggcgaggatcgacgcgcggcgatcgtccagctcgcgcatgtagcgcaggcgctcttcgagcaagcgcagctgggtgtcatccaggctgccggtgacttccttgcggtaacgagcgatgaagggcacggtggaaccttcgtcgagcagcgccacggtggcggcaacctgttgcgggcgcacgcccagttctgcggcgatgcgggaattgatgctgtccattggatgtcctgcgggcggaaatgacggccgaccggccagaaaagcgcgcaagtataaccggcgatccgtcgcttcgggcgctcggcataccccgttgccagccgtcgcggcagacatcgcggcgcttgtcttttggttggcatgccgccaccatcgagatagttaactggcactgcgccatcatggcggagcctgcttacgctgttccttgaccaagagttcgtcgtcatgtccggccaggcgcggctgttcgccctccgatatcccctcgtcttgctggccgttctaggactggtgcggctcggctgggcggtcaccggcgactgggatttcgttcgcatcctgagtctcgccgagcagcagcacgggccgctcggagaggggcgtaaccgcctgctggcctggcagtcgctgctgaccgagcagacgggcgccgcagagcacgaccagctgcgcgcggtgaacacgttcttcaacgtgcagctgcgcttcgaggatgaccgcgcgctatgggggcagggcgattactgggcaacgccggtcgaggcgctgcgcatcggcggaggtgattgtgaggactacgccatcgccaagtacatcactctgcggcggctcggcatctccgccgagaagctgcgcatcacctatgtcaaggcgattcgcctcaaccaggcgcacatggtgctgacttactacgagcaacccagcgccgtacccgtggtgctggacaacttggtaggcggcattcttccggctacccagcgtaccgatctggtgccggtatatgcgttcaacggcgagggtctgtggttgcccggccgtagcggagacaggcaggtcagcgatagcaagaggctctcgcgctggcaggacctgttgaaaaagatgcacaaggaaggttttccagacgactctggatcctaggagttcaacatgtccctgttcaaacagctgttactggccatctgcctattcttgctggccgctttcactggcagcttcgtagtcagtctggaaagctcgcgcggccagtacgccaatcaactgcgctcccatgcgcaggatgccgccaccgcgttggggctgtcgctgacagccaacatcgacgatccggcgatggtggaactggtggtcagctcgctgttcgacagcggctattaccagtcgattcgcgtggtcggtctggacgacgagcaaccgatgatcgaacgtcaggccgagccggatgcggggagcgcgccgcagtggttcgtccggcttatcgatctgcagcccgagggtggcgaggccatcgtcagccgcggttggcagcaggtggcgcgggtcgaggtggtcagccacccgatgttcgcggtttcacgcctgtggcagagcacgctgggcatgttcggctggctcctgctgtgcgggctggtcagcgccttgctcggtgcgttgttgctgcgccggcagctccgaccgcttgacgacatggtcgagcagtcccaggccatcacccgtcgggagtttctcagcgtgccgcagctcccggccacgccggagttgcgccgcgtggtactggccatgaacctgatggtcgagaagctcaaggcgttgttcgatgaagaggcccggcgaagcgagcgcctgcgcgacgaggcctaccacgatggcctgaccgggctgagcaaccgccggcacttcgacatgcaactgcaggctcgtctgtgtggcgaggacctggccggcagtggctacatgttcctgctccggatcaacgacctggccgggcttaaccagcgcctcggtggggcccgtacggacgaactgctgcgcgctgttgcggcgcaactgcgccaggtgacgggcgaccgccatctgatcggccgcactcgcggcggggaattcgccctgctggccgtcggtctcgatgccctcgaagccgaacggctcgccgagcagctcgcccatgggttggccacgctacagcaaaccggcctgagtgatcgcctgccggtggcccacatcggactcaccccgttttcccaggatcacaccgaggtggcgctctatgccgcactcgatcaggcgcttgcccaggccgaaagcaaggcgcgccaaggctgggcctgctatgagccggccgagcccgccccggttgccgagcagcaccgcgactggtaccagctgctcgacagcgcgctggagaagggcctgctgcagttgtatttccagccggtgatgagcgcgctcgaaccgcagcgcctgatccacagcaaggtgctggcacggctggtcgatcgtcaaggtgatgtggtgcctgcggcgcggttcctaccatgggtagaacgcttcggctggacctcgcgactggacttggccatgctccggcaggcgctcgcggcgctcaaggtccagcattctccgctggcgatcagcctgggcggcgccacgctcatcgagcctgaatcgcgggagcaggtgttcgaattgcttgcgcggcatggtgatgtcgccggcctgctcacgctcgagctggacgaagcccaactgccggatcagacgagcctcgaagccctggcgcggcgcctgcaccagctgggcttcggactcggtatccagcacttcggtgggcggttcagcatgatcggcaacctggcgcggctcgggctgggctacctgaaagtcgatggaagctatatccgcggcgtcgacgccgagaatgacaaccacctgttcatccaggcaatgcagcgcgccgcgcacagcatcgatctgccgctcattgccgagcaggtggaaacggagggggaatggatgaccctgcgtgcgctgggcttcgagggtgggcagggccgtttgctgggcaatccagcgccggcgcaggccgggctggagcggtcagatcaggccggtgtcgtcatcgtcgactagtaagcgcgtcgcgccgagcgcatcacgcgcccggctgcgcccggccagcttggcctgagcggcccctggcagatcggtaatgcgcagcacgcccttgtcgatcagggcgtgcaccaggtcttcgagtacccgcaccatctccagatcgctctgacgcaggtgggcgaggctatcctgcgcggcgatccaggcgcgcacttcgttgtcatcgtcgggtagctcgccggtcatctcctcgaaaggcaccggctcgactttcaccagatgcccgttggcatcgcgctttatgtacggcatgcaatgtcccgcttggaaggcttgcgcaccggggtacgcaagcaatggcctcaggaggtatggtcgaccttgatcaactcttgctggccaaccagggcgttgatgatatcggctgatgtcgagccataggccgacaggtcgaccggcgcaccgttgttctccagatggatggtgacattggcattgctgccgtcggcgttcaacgccccgttcgtgttgatctgcaaggtcgaagtagcggtatccatatgcagatagttgaggatgttgccgtcgttctcgccttgcagaaggtcgcgcaggtcgatgcgatcaccttcggcgatgttgaagtccttgatcacgtcctggccgagatcgccagccttccagataaaggtgtcggctccgctgccaccgttgagctggtcgttgcccaggccgccaatcaggatgtcatcgccggcgccgccgaagagctggtcgttgccggtgccgccgtccagcgtatcgttgccctgcagtccgtagagcacatcatcgccagcgcctccgccgaggtagtcgtcgcccgcggcgccactgtgtatcgagctggccgagccgccaatgaccgtgatagcggtgctgtcgccgtcgctgagggtaagcatcaaggtcggcgtgaatccggtcggtagcggtgtgctggtgaccagttgcagttgtacggaccccgacacttctgaaggcgtcgttagcagcgatatgtagttcgtgagatcgaattgcccgttggcgtcggggttgatttccacatagctggcgccgttctgcacgctcaatgctgtgttggccggcaggtcgctgagcgacattgcgctgatgtgctcggcgaccccaacgatatcgcgcacgtgggcaaccacatcgatcgggtaatggtagttggtcgcaccagacgaacctgcgtcgaacgacaggtattcgatctggaatccgttgttcttctgcttgaacgtattggacacatcctgcccgatgctcaggctggtcatctctacgttgctggacagcccaacgtaggcatcggtgttgccaccctggttgaacaggctgccgtcgacgctcgccaccagcaccgccttggtcacggtaccggcgtaggtgtagcttgccgaccaggttccgtcagccttaacggtagcggtgatgggcgcgaggctgttgccgttggcatcggtgagcagcagttgcagcttgagggtcgaactgctcgcaagaccaccgccggaggtcagtgcgccggttattaggtggttggatggcaggctgctgacgtccagcacgctcttgaactgcacgctgtcgtcgctcgcattcttcaagcgcatgctggctgtatggatgccgaccgggaagtcgatccggatcgattccgtaccgtcgatacgattgtcgccattgacgcctgcgctacgcacagccagcaacgagccggtggagaaggtgaacaccttgccggttccgctggtgtcgactgccgaaatcgaaataccgctcgggaaggtataggtcgatgcgccgtccagcccggtgatattggtgctgaaatcgatcgcgctggtggtcggcgtgccgaccactaccgacacgtcgctggcctgcagcgcgtctgccacgggcgtaacgacaatactgatcgagtcggtgtcgctcagtgcaccgccgcttccggtgttgccgttgtcgttgctggtcatcgtcaaggtgaccgtgctgctggcgtcaggcgtcggggtgtaggtcggctgggtagcgggttgcgccaggaaggcattgatgtctgtcaggctaccggtgagcaccagcgtgttactggacgagccgctgaccgtgacgccggctgcggatgcggctaccagtgagccctgctgtacggccagcgttaccgtaaccgagccgctgctggcatcgacatcggaaaccgccagcccgctcagcttgagcgatccgtcttcgctcatggtgtagctgaccggcatatgattgaccggtgcatcgtttactgcgttcacctggatcgacaccgtcgcgggcgactgatccacgttgccggcggcgtcgctggcatggtactggaaggtggtgctgccgttccagttggcgtccggcacgaagctgatggttgcctggttgcccactgccggaatggcctggccgatcgcgaccggttggccgttgtagctgagcgtgccgttggccggcaggctggtgacggtgaagctggcgatgctgctgccggcgtcggttgcgctcagggtgacgccgacggcgctggcgtcctcgttagtgctgacgacgacgttcgccgtctccggtgcggtggtatcgccaacggtgatgtgcgtgctggccgaggcagtgctggagccgtcctgggccgtggcggttaccgcgatctccaggctgccggtcgggctaccggcaagcgtcatgctcaaaccggtcaccgtcacggcatgcgtggttggatcgattgatgcgctgtagctgccgttgcttgccagcggcagcgtccagctgccatcggcgttggccgcgccggctgacagggtcgcgcccgcaggaatattcagcgtgacgctgctgatcgattcggaatagtcgatgtcggtcggcgcggcggtgagggtgagcggatagctcgtgctgttagcgaagctgatcgagtggatcagatagtcgtcaccggctctcggcgcactgaactcgatccggctgatcgcgctgccgttgctgctggtcagcgtaatggccgggtccaccgcgtcggtcaggccggcaatggtgccgctgccgatcagggttcctttcgtgtcgaacagctgatatttcgcctgttcgcccgtattgagccaggcgaatctcaccgttgcgctggatactggcgcgtcgaacgccacgatgaggcgttccgattggacgccatccgagcccagctcgtttgcagcacccgcggtgccgccagccacgccaaagccgaccggactgctgttgtgcgaaatgctgcccgtgctgccgttcatgttcagcgcggtgacggtgtagccctggccgctgaggttcgcgttggcgctggtgatgaccgtggtggccgtgctggcggccccgacggtgatgctgacgttcggtgcgtcggcgaccggggcgacatcgaaggtcagggtgttgggcgtagcggaaaacgctccggactgatcactcaccgagaacgtgagcgtggcgtactggctgccagccccgtcgtgtccgggggtgaacgtcagcttgcccaggtcggaggctgcaatgatctgcccagcggtgaccaggatgccgttcagttgcagcgcgccggcagtgggtatgacgtcgatacgcaccgcctgcaggctgtcgccggcatccgggtcggtaaaaccgaagctcgcggcgctgagtccggcagtgccgtcctccagcaggttgatcgtgccgtcggtcccggtcggggcatggttcaccgcggcgacgttgaccgtgacgctggccggggcggacgtgtctatgccgtcgctgacggtatagctgaagtcggcgacgccgctgtagccggcggtgggcgtaaaggtgaccgaaccatcggcgttgagcaccgcggtgccccctgtaccgctggtgacgctggcgatagtcagcaaggggctgtcaacgtcggtgtcattggccagcagctggcttgccgtgtaggtgacgggggtgttttcggtggcgctaaggctgtcgcccagcgcgacgggtgcgtcgttgctgccgctcatggtcacggttatgagctgcgtggtgccatcgaccgtagcgacagtcaggctgtcggtgtagtcggtgccagcgacgaacgcgtcatgcgcggagttcatggtgtaggtccagacgccgtcggtgccgatgctgaagctgccgtagccattgctgccggcgacgttagtctgcgcgacaaaggcactggagctgtccgggtcggtagccgtcagggtccccccgatggtctgcgccatattggtttcggttagcgcagcggtgctggccccggtgatgacggtcgcatcgtcggtaccggtgatcgtcacggtgactgaggctggggtgccgtcgatgctggtggcggtgaaagtctcctgcacctgctggccgacgttcagttcgttgaaggcgctgttggccacgaaggtccactgaccggtggcgtcgatgctgaaggtgccgttgctgccgacggtgctggccgcggtgaagctgttgttcaagttgtcggcatcggtgctggtcagggtgccgctgagggtcagcggggcgtcggtttcagcagccgattgggcagtatcaccagcgatcacagcggcatcgttggtgccggtaatcgtcacggtgactgaggctggggtgccgtcgatgctggtgacggtgaaagtctcctgcacctgctggccgacgttcagttcgttgaaggcgtcgttggccacgaaggtccactgaccggtcgcgtcgatgctgaaggtgccgttgctgccgacggtgctggccgcggtgaagctgttgttcgcgttgtcgacatcggtgctggtcagggtgccgctgagggtcagcggggcgtcggtttcagcggccgatccggtgacatcgccagcgatcacggcggcatcgttggtgccggtaatcgtcacggtgactgaggctggggtgccgtcgatgctggtgacggtgaaagtctcctgcacctgctggccggcgttcagctcgttgaaggcgctgttggccacgaaggtccactgaccggtggcgtcgatgctgaaggtgccgttgctgccgacggtgctggccgcggtgaagctgttgttcgcgttgtcgacatcggtgctggtcagagtgccgctgagggtcagcggggcgtcggtttcagcggccgatccggtgacatcgccagcgatcacggcggcatcgttggtgccggtaatcgtcacggtgactgaggctggggtgccgtcgatgctggtgacggtgaaagtctcctgcacctgctggccgacgttcagttcgttgaaggcgctgttggccacgaaggtccactgaccggtcgcgtcgatgctgaaggtgccgttgctgccgacggtgctggccgcggtgaagctgttgttcaagttgtcgacatcggtgctggtcagggtgccgctgagggtcagcggggcatcggtttcagcagccgattgggcggtatcgccagcgatcacggcggcatcgttggtaccggtgatggtgatggtcagcgtactttgacctacgccgccgtgttcatcggtcacctgatagggaatgaccagatcatgggtctcgcccgccgccagcgagtcgtaagcgctgtttgtcgcatcgaaggtccagcgaccatcgctggtcaggctgaagcctgctggcgcagtcccgtccacgctgaatgtcaggctcgcaccctggtcgacgtcagtggcaatcaattggccgctgacagtgcccacctgcacgagggcagacaggtccgcattgctggccccattagtggtcagcgtccagccattggcggttggagccactgcaccggcactgaggctcagtgttgcattggctgacagattgcttagcgaaaggttggaatcaacgccgccgtctctggtatcggcgacgccgatcaccagcgtataggtgcccggtgagccgaactgatagctgaacgtctgggtacccgagttgccgtaatcgccgacgctggcgacgttgctcagtacttgaacaggctgaccattgacctgcacgaatgcaaagtcgttgaagggcaggtagtccgacgtcgcgaattgccagtcgaagctgacggtttcgccggcgctggtggtggtcacggttaggactatcgccgagccatccgtagcttcgcttaccgcgccaacggatgtggttgcaccttcgatggcggtggcgttggccgcctgggctaccggcaagtcgttggtgccggtgatgaccaacgtaaggctgtcgctgctgctggcgccacttgcgtcggtaacggtaaacggaacctgcagagtcagcgtctgatccttggccaagtactggtaggccgcatcgctggtgtccagtgtccagctgccgtcgtcggcgagcacgaacccggccggagccgttccgtcgaggccgaaactcagggtgtcgccggcatcgacgtcgtacgcggcgagctggcccgtaaacacgccactgtcctcggtaccctgtccctgcgatggctgggcaatcggtgcgtcattgacggcagcgacgtcgaccgtgacggtcgcaggcgcggaggtgtggacaccatcgctgagcgtatagctgaaatctgccgtgccgttgaagttggcgttcggcgtgaacgttacagaaccgtcggtgttgagcaccgcggtgccacccgtaccgctggtgacgcttgcgatggttagcgcatcaccgtcggcgtcgctgtcgttactcagcagttcgctggcctgaaaggtaacaggggtgtcttcgacggctttgagtgtgtcgttggcagcttgtggtccgttgtcattcaggttggcttcgaacagtgtgacgttggcggccgagacgttacccgcggcgtccaacgcttcgatggcatagccgtggttgttggatgcctgctcgaaatcattgacgcccgctgccgcacccgcctcggtcaaggtgatacggctctgactgtcgatctggaaatagccgtctgcactcgtatcgccgccactgtcggcgaatcggaaggcaaccacgcccactgcgtcctgtgcgctgacactgccgatcagggcattggccggctggttctcgtcataggtgaattgctggccggccgttatggcgggtgcctgagtgtcgagcacgaagctgacggtggtggcaccggaggtattgccggccacgtcggtctggcgcacggacactgtgttgttgccttcgaccggggtgaaggtcgaagtccaggtctggccgccatcggtgctgtattcgatggtcgcgccggtttcgatgccgctgatgctcagggcaccgttgttggtgatgctgtcggcgttgctgacaccactgtcattgctgagcaagacggtcggcgcggcgacctgggtatccagcacgaagctgacggtggtggcaccggaggtgttgccggccacgtcggtctgacgcacggagacggtgttgttgccttcgaccggggtgaaggtcgaagtccaggtctggccgccatcggtgctgtattcgacggtggcgccagtctcggtaccgcccacggtcagggcgcccgagttggtgatgctgtccgagccgcttgcgcccgtgtcgctggtcagcgaaacggtcggtgcagcgacctgggtatccaggacgaagctgacggtggtggcgccggaggtgttgccggccacgtcggtctggcgtacggaaacggtgttgctgccttcggccggagtgaaggtcgaagtccaagtggtgccgccatcgatgctgtattcaatcgtggcgccggcttcgatgtcgccgacgttcaaggcgccgttattggtgatgttgtccgtcgggttggcgctgtcattgctcagcacaacggtcggcgcgacgacctgagtgtcgagcacgaagctgacggtggtggcaccggaggtgttgccggccacgtcggtctggcgcacggaaacggtgttgctgccttcgaccggcgtgaagctaccggtccaggtctggccgccatcggcgctgtattcgacggtggcgccggtttcgataccgccgatgcttagggcaccggagttggtgatactgtcggcgttgctgacaccgctgtcattgctcagcacgacggccggcgcggcaacttgggtatccagcacgaagctgacggtggtggcaccggaggtgttgccggccacgtcggtctggcgcatggatacggtgttgttgccttcgaccggggtgaaggtcgaggtccagatctggccgccatcggtgctgtattcgatggtcgcgccggcttcgatgccgccgacgttcagggcgccggagttggtgatgctgtcggcgttggtgacaccgctgtcattgctcagcacgacggtcggtgcagcgatctgggtgtcgagcacgaagctgacggtggtggcgccggaggtattgccggccacgtccgtttgacgcacggaaacggtgttgctgccttcgaccggggtgaagctgctggtccaggtagttccaccatcgatgctgtatccaatcgtggcgccggtttcgatgccgccgatgttcagggcgccgttattggtgatgttgtccgtcgggttggcgctgtcattgctcagcacgactgtcggcgcggcgacttgggtgtccagcacgaagctgacggtggtggcaccggaggtattgccggccacgtcggtctggcgcacggacactgtgttgttgccttcaactggcgtgaagctgctggtccaggtagttccaccatcggtgctgtattcgacggtggcgccggtctcggtaccgcccacggtcagcgcgcccgagttggtgatgcggtccgagccgcttgtgcccgtgtcgctagtcagcgaaacggtaggagcagcgacttgggtgtccagcacgaagctgacggtggtggcgccggaggtattgccggctacgtcggtctgacgcacggaaacggtgttgttgccttcgaccggggtgaagctgctggtccaggtagttccaccatcggtgctgtattcgatggtggcgccggtttcgatgccgccgatgctcagggcgccggagttggtgatgctgtcggcgttgctgacaccactgtcattgctcagcgcgacggtcggcgcgacgacctgcgtgtcgagcacgaagctgacggtggtggcaccggaggtattgccggccacgtcggtctggcgcacggacacggtgttgttgccttcgaccggagtaaaggtcgaagtccaggtctggccgccatcggtgctgtattcgacggtggcgccggtttcgatgccgctgatgctcagggcgccgttgttggtgatgctgtcggtagggttggcgctgtctaccgcgagagtgacggttggacgcgcaacatccagatccacgtcgtagttatgccggtcagacgcgctgccgacattgccggcggcatctacgtgagtcacggttgccgtcacggtatcgctggccgcaatgacacgcgtattcacgtcgatggcgaaacccaggctgccgtcagggcgttgtatgacgcgtccctcataggtctcgttaccgatatcgagctggacccggtcgcctacctgggcttcgccagtgatactgccggtcagcgtcagagtgcctgcggcggcttcggctgcgttcaggctgttgtcggcagtcagcgggtcgagcctgataccgagtactggtgcctcgacgtcggtggcgtaactcgcttcggtggtggcggtgccgacattgccggcggcatcggggctggtaatggttgcgatcacgcggtcgttggcagcaagcaggccgctgtcgacttcaatggcgaagccgagggtgccgtcagggcgcaggaagacgctgccgctgaaattgactccaccgatggtcaaggtgacggagtcgcctgccttggcctcgccgccaacgctaccggtgagcgtaacgagggcgcttaggctctcgttgaggttgagcgtgccgtcgctggcgacagggtcgagcgtgatgctcaccaccggcgcggtagtgtcgacaaaggccgcgctgggtacgccgttcaactgctcgacgcccacaccgtcattgctcaggcctgcggtcgcaaaccctgtcacggcctcgacgcgcgcaccggtctcgctgagcatcacggcgctatggccaccacctcctgctccgctggctccgcctgcggccggacctgccgcggtcggctcgagctgggtagtcgggtcgaagccatcagcaatggctttctccaggtcggccacggcctgcgtgttcacctggttttcgtcagaggcggcgggggtgcccgcttgccaactggccgagctacccagcgtgagcaattccccgttcggcagctccagggtgaccccaccggttgcatccgtctccagccgctcgccagcaaagacaggctcaccttcgaacacctgacggcgtacgccctcagcggtaaccgcgaaaacctggcctatcaagcttttgacgacagcgtaggcgttgctcatgaccgttgctccgagaataggtgcggccgtgtccggctgcgatagcatttaccggcgtagccgagtcctttcgacaaaaatatggcgccatgtgcgcgccgacaaacggcgggtcaaactattgacccgccatggcgcgatgttaaacaatgcacatcgtgatgtcactgtgctagtaccactatttgacatccgcctgccgctgtgacgtggagggggaacgggcgtagccaccaagcctgttttgtcctttccgcctggctctaacgtcagctgattattgaaaggatttccccatgaaacgcgcgttcctcctgctaccccttgctgccgcattgccgttcgctacccatgcgcagtcgctgcaagaggcgatgcgcagcgccctcgaggtgcatcctgagatccgcgcgggtgtcagcgctcggttggctgccgaagaagagctgaaggcggccaagggcggatacatgccacgtgtcgatctcgttggcggctatggccgggaaggcaccgataatcccagcgggcgcgccagtggtgatcatgattacgaaacgttgacccgcagcgaggcgcgtctgagtgttgaacagatgctgttcgatggcttcgcgacttccagcgaggtcaagcgcaatcgcgccgtggtcaattcacgagcattggagctgctgggcaattcggagcgcaccgctttgcaagtcgctcaggtttatctggatgtgctgcgccgacaggcgctggttgggctggcagaggacaatctgcgcagccatgagcgcatcttcgaccagatcaatctgcgcagtcagcgcggcgtgggccgtatggccgatctggatcaggctgaagcacgcctggcccaggcgaagaacaacctgctcactgagcaggcgaacctggcagatgcacgcgttaatttcatcagcgtggtgggtcaggcaccggagcagttggacatgccagctcccgccttggcaggactgccggagtctttcgaatcggcacgcgacgaaatgctcgcggataaccctcaactgcgctcggccgaggccgatatcaacgctgccgaggctcagatggcagctgcgaagtccgcgttctatccgcgttttgcgcttgagctcagcaccggagccaacgacaacatcgatggcgtacgtggtcatgagaacgaatggcaggcgatggtgcgcatgcgctacaacctgttcgccggtggcagcaacaaagccgaattgcgtgcccgctcgtaccaggccaaccaggcattggacatacgcaacaacgccctgcgcctgctgaccgaagagctaggactggcctggaacgcattggataacgctcgccgacagttgccgatcgcgcgggagtatgtcgaccgcagcggccgggtgcgcgactcctaccggcagcagttcacgctgggcgagcgcacattgctcgacctgctggacagcgaaaacgaaatgtttaccgcagcgcgccgccttgaagacgtccgcttcaccgaggctctgacccagtaccgcatcaaggcggtgaccggatctctgctgcaaagccagggtgtagtggctcccttggctgccgtgccgatggacgaggtccaggcgcaggtccaattgcccgcaatgaattgaagggtgccccggggggccggctatgagtcagttacagcagtcggccgaaacgggccctgagatcacacgtgtcgatccgcgcgggcgttatgacgatccattgctcgacagcctgctgtcgctttgcgcctgtcatcagaagccggccagccgaacgacgctgacggctggcctgccgcttgccaatcagcgcctgacgcccgagctgctgccgcgtgcggccgctcgggctggcttgcgcgggcgctggctgcgccgtgaacttggtcaaatccctgcgctcgtcctgcccgccctgttgctcctgggcgatggccgcagcgcattgctgatcggctggaatcccgacggccgcgcccggctgatgccgagcgagaccgagggaggggagatcctggtcgaccgcgagatcctcgaagaggactacgccggtcaggccttttttgctcaaccgcagcacaaattcgaccttgatcagggtgagctcgtcccgcgggcgcgccattggttccgcgatacgctgaagcgctcgcgctggctgtatgccgacgcgatagtagcgagcttcatgatcagtttgattggcctcgtcaccccgctgttcgtgatgaacgtgtatgaccgcgtggtgccgaaccaggccgaggcgactctgtgggtcctggcgatcggcgttggcggcgcgttcctgttcgatctgatcctcaagacgctgcgcgggctgtgcctggatctggccggcaagaagaccgacctgatcatctcggcgacgttgttcgagcgcatcaccggcatgcgcatgacccaccgacccgcacgggtcgggacctttgcccagcacattcacgagttccagtcgctgcgcgattttctcgcttcgctgacgctggccagtctgatcgatttgccgttcacgttgctgatcatcgcggtgatcgcggtgatcggcgggcatctagcttggattccgctgatggccttcccgattgccgccggcatcagcctcgcgttgcagcgcccgttggccgacacgctcgagcgcagcatggcgttgtcggccgagcggcagtcggggctgatcgaaacgctagccgggctcgatgcggtcaaggtcaataatgctgaaagcgagcgtcagtatctgtgggaacagaccatcggcacgcttgggcgcctggagctgcgcgccaagatgctgtcgagcctggcgctcaattcgaccatggcgctgcagcagttggccggcgtggtcatgatcgtgctcggcgtttaccagatcatcgccggccagctgagcatgggcggcctgatcgcctgttatatgctcagcggtcgtgcgctgggcccgctgggtcaggtggcgggcctgttgacgcgctaccagcaggccaaggtcaccgtgcgctcggtcaacgacatgatggcgctgccgcaggagcgcgaggccggcgaacggccactcaagcgcgaggcgttgctgggtgcgatcgagtttcggcaggtcgatttcagttatccggatcagcagcaaacggcactgaaccaggtcagcctgtccatccggccgggcgagaaggtcggcatcattgggcgcagtggctcggggaaaagctcactggccaagctgatcgtcggcctcaaccagccgagcgacggcagcctcctggtcgacggcgtcgatgtgcgtcagctcgacgtcagcgatctgcggcataacatcggatacgttccgcaagacgtgcagctgtttgccggcacgctgcgcgacaacctcgtgatgggcgctcgttacgtcgaggacgaacaggtcctgcaggccgctgagcgtgccggcgtgcacgagttcgctcggctgcacccgaagggttacgagctgcaggtcggcgagcgcgggcagcagttgtccggcggccagcgtcaggccgtggtgctcgcgcgcgctctgctgctcgatccaccgatcctgctgctcgacgagccaaccagttcactcgacaacaccagcgaagatcgcctcaagcagcagatcgccggcgtgatcggcgacaagaccctgctgctggtaacccaccgcacctcgatgctgacgctggtcgatcggctgatcatcgtcgatcgcggccagatcgtggcggacggccccaagccagtcatcctcgaagccttgaagaaggggcagatccgtgtcagctaagcgcctgcctgaagtgccttcactggttcgtgctggtgtcggtggcctcttcggatcgtccgccgagccgttgcccgaggtccgcaaggcgttggtcgaagacgcaccgcgcatcgtgcggctgacgatctggggcttgctggcctttcttctgtttgcgctggcctgggcgcatttcgccatcgtcgacgaagtgacccgcggcgacggcaaggcgattccgtcgtcccgcctgcaaaagatccagaatctcgagggcggcattgtcgccgagctgtatgcgcacgaagggcagatcgtcgatgtgggcgacccgctgctgcagctggacgacacccgcttcgcttccaatgtgggcgaaacgaccgccgacgccaacgcgctggccttgcgtgtcgagcggctgaccgccgaagtcgaggggcgcgagccaagctttccggcagatatcgctgcacaggctccggcgctcgcgtctaatgaaatggcgctgttcaacagtcgtcagcagcaactgcgcgatgagctcggcggtctcgaggagcagctggttcagcggcgccaggagctgcgcgagatgggctccaagcaagggcagttccgtagcagcctggcgctgctgcacaaggaaatcgagatgtccgagccactggtggcatccggcgcgatttccccggtggaggtgctgcgcctcaagcgcgccgaggtcgagagccggggccagctggacgcaacgacgctcgccatgccacgtgccgaagcggccatcaaggaaatcgatagcaagatcggcgaggcgcgaggtcgataccgaagcgaagcgctgacgcagctgaacgaggcgcgcaccgacctgacgaagcttcagtcaaccggcaaggcgctggaggaccgcgtccgccgtacgctggtcacatcgccggtgcgaggcgtggtcaaacagctcatggtcaacaccgttggcggcgtcatccagccaggtagcgacatcatggaaatcgtcccgctggacgacaccttgctgatcgaagcgaagatccggccgcaggacatcgccttcctgcatccgggccaggaggccgtggtcaagttcactgcgtacgactacaccatctatggcgggctcaaggcgcggctcgaatacatcggtgcggacagtgtcaccgatgatgaaggcaacagtttcttcctcattcacttgcgtacggacaagagccacctgggcaccgacgacaagccgctgctgatcatcccgggtatggtcgccacggtggatatcatcaccggtcacaagagcgtgctgagctacctgctcaagccgatcatccgggcgcgcgccgaagccttgcgcgagcgttgagcgcggcgactgccctgcggcgaaaaatctgctaacaatggctgacacatgcgcctgcaccgcagcgcgcataatgcaccgacgatttttccggggagttcccatgagcagcaccgcgcccgccaacgaaggcgagaagatcctgattgtcgatgacgacgcgcggctgcgtcgtctgctcgagcggtttcttgatgagcagggctaccgcgtgcgtaccgtggaaagtgccgagcagatggaccgcgtgctcagccgggagctgttccatctggtggtgctggacctgatgatgccgggcgaggacggcctttccgcctgcgcgcggctgcgtggggccggcaaccagatccccatcatcatgctcaccgccaagggcgacgaggccagccgcatccatggcctggagcagggcgccgacgattacctggccaaaccgttcaacccgcgcgagctgctggcgcggatcagggcggtcctgcgtcggcaggcaccacaggtgccgggtgcgccgggcagcgaggacgagacggtcaccttcggtgactacgaactgttcctcggcacccgcgagctgaagaagggcgaccaggtgcatatgctcaccaccggcgagttcgccgtgctcaaggccctggtgcagcatgcccgcgagccactgacgcgcgacaagctgatgaacctggcgcgtggccgcgagtgggacgcgctggagcgctccatcgacgtgcagatctcccgcctgcgccgcctgatcgagcccgatccgtcgaagccgcgctacatccagacggtctggggcgtgggctacgtgttcgtgcctgatggcaacaagtaaagcggccgcaggcggtaggctgcaggccgcaggcagagatggctggggctcgcatccgggcggcctgtggcttgatgcctgcagcctgcagcggctcttatgaaaaccccgctctggttcccgcaaagcttcttcgcacgcaccctgtggatggtgctgatcgtcgtgctgttctccaaggtactgatgctggtgtacctgatgatgaacgaagacgtcatggtcgatcgccagtacagccacggtgcggcgttgaccctgcgcgcctactgggcggccgacgagcaaagccgcgagcgtatcgccgaggcagccggggtgcggcgggtcgtcgaggacgaggtgccgcccagcgaataccactggccgtacaccgagatcttccagcgccagatgcagctcgagctgggcgcagataccgaggtgcgggtgcgcatccagccacagacggcgatctgggtgcgggcgccgagcctggggccggactggttgcaggtgcccctgtatgcctatccgttgcgtgggcagcggatctggagcgtgctcggctggttcctgggcatcggcctgctatcgaccgctgctgcgtggatcttcgtcagccagctgaatctaccgctcaagcggctggtttacgcggcgcggcagatcggcaagggccgccgtgtgcggctgcccatcagcgacacgccaagcgagatgaccgaggtctatcgcgccttcaaccagatggccgaagacgtcgagcaggcggggcgagagcgtgaactgatgctggccggcgtatcccacgacctgcgcacgcctctgacccgcctgcgcctttcgctggaactgatgcccaacgacaccgaactgaccgacgacatggtgcgcgacatcgaggacatgaacgcgatccttgaccagtttctcgcctttgtccgtgacggcagcgacgaaccgctggaatgcctggacctgggcgaactggtgcgtgaggtggtcgcgccctacaaccagcatggcgaacaggtgcgcctgtgtgtcgagccgatgccgccgctgccgctgcggcgggtttcgatcaagcgcctgctggtcaacctgatcgagaacgccctgcgctacggcggccatggcgtcgaggtcgccgcccatgtgtcgggcgacagcagcgcgccctatgtggtgctcagcgtgcttgaccgcggcaccggcatcgatccgcaggagctgggcgagatcttcaaccccttcattcgcggcgatcgcgcacgcggcgggcagggcgccggactcgggctggccatcgtcaagcgcatcgcctcgcagcatggcggcgtgatcgaactgcgcaaccgcgaaggcggcggactggaggcgcgggtcagtctgccgttggggttgttgttgccgagggatgcgataaagacgtaaagccgatacgagcgcttgaggctggaaagcttggcgaggttcagtgctcgttcagaagctgtccagcctccagcctccagcctccagcctccagcctccagcctccagcccgggtcagcctttacccttcgtccgggtcagatgcggtccggcattcttctccaggtactggatgatcagcccggccacgtccttgccggtggtttcttcgatgccggcgagacccggcgaggagttgacctccatcaccagcgggccgtggttggagcgcaggatgtcgacgcccgccacggagaggcccatgaccttggcggcgcggattgcggtcatgcgctcttccggggtgatcttgatcaggctggcggtgccgccgcggtgcaggttggagcggaattcgccgggcttggcctgacgcttcatcgccgcgatcaccttgtcgccgacgacgaagcagcgaatgtccgcgccgccggcttccttgatgtactcctggaccatgatgtcctgcttcaggcccatgaaggcctcgatcaccgattccgcggcggtggcggtttcgcacatgaccacgccgataccctgggtgccctcgagcaccttgatcaccagcggcgcgccgccgaccatctggatcaggtcggcgatgtcatcgggtgagtgggcgaagccggtcaccggcaggccgatgccgcggcgcgccagcaactgcagcgagcgcagcttgtcgcgcgagcgtgcaatggcgaccgattcgttgagcgggaacacgccctgcatctcgaactgacgcagcacggcgcagccatagaaggtaaccgaggcgccgatccgcgggatcaccgcgtcgaagccttccagcgggcggccgcgataatgaatctgcggtttgtggctggcgatgttcatgtacgcgcgcagggtgtcgatgacgaccacttcgtggccacgttgctggccggcctccaccaggcggcgggtcgaatacaggcgtgggttgcgcgacagcacggcgattttcattgggcaccgggagaggtaagggtctggggtttttcctgcacgtaggtgcgtgcagggtcgaccagccatttgccgtccatcagggcttttgaccccaacaacaggcgatagcgcatggtcttgcgacaggtaagggtgaattccaccggccacaggtgagagcccagcgccagcagcgtgcgcaccacgtagcgcgtctgcgcctggccgttggagctcttgatcgtcttgcgtgccaccaccggcgcttcacagcgatggcgtcgctgtaccagcgtgcccagatgcgcggtgaaacgaacccagcgctcgccgccgcgttcgaattcgctgatgtcggtggcgtgcaatgccgaggtgctggcgccggtgtcgattttcgcacgcaggccgaccacgccgagctcaggcagggcgatccattcgcgcaaaccgatgattgtctgggggtcgggactgttcaaaagctgtatccagtagatttccgcgcattctagacggggtgcatgacaaccgcatctacctgtacgaacctatgacaacgagacgccacgcagagttgaacgatgagtgagaaagacgacggcaaggtccggctggacaagtggctgtgggcggcgcgcttcttcaagacgcgggcgctggccaaggctgccatcgagggcggcaaggtgcattgccgcggcgaacgctgcaaaccgagcaaggagcccaagcttggcgaggagctggtcattcgcgccggctacgacgagcgcaccgtggtgatcagggcgctgtcggcggtgcgcaagggcgcgcccgaggcgcagctgttatatgaggaaacgcccgacagcctggcccgccgcgaacacgccgcggccatgcgcaaggctggcagcctgggtgtggaaaccgatggcaagccgagcaagaaacaacggcgcgccttgcagcgttttcgttcggatgcggggtgaccgtgtccggttggacggccgtcactttggacctagaatgcggtcccttctttaatccgggatggttttccggacgccgtacctgcccgaaccaatcattccttcattgccctggtcatgcccatgctcgatttcgattacacccaacgtttcctcttcgatgataccgatgtgcgcggtgaatgggtcgggctcgagcgtagctacgccgaagtgctggccaagcacagttatccggagcctgtggcgcagttgctcggcgagctgcttgccgccgcctcgctgttggtcggcacgctcaagttcgacggcttgatcgtcctgcaggcgagctcgaccggcgcggtgccgctgctgatggtcgaatgctccagcgatcgggaagtgcgcggcatcgcccgctacgacgaaacgctgttgagcccgggcgccaccctggccgagctgatgcccgacggcgtgctggcgatgaccatcgatcctgccaatgggcagcgttatcagggtatcgtcgccctcgacggggccaacctggcggaaagtctgtcgagctatttcgcgtcctccgagcagctgcccacgcgtttctggctcgctgccgacggccgccgcgcctgcggcatgctgctgcagcaattgccggccgatcgcctccgtgacggcgaagagcgcgaggccagctggcagcatctacgcaccctggccgataccttgtcgaccgaggagctgctcggcctcgacacccagaccatcctgcatcgtctctatcacgaagagcaggttcggctgttcgagccgagaccgatagtgttccgctgcagctgctcgcgcgagcgctcggccatggcgatcatcagcctcggccagcaggatgccgagcacttgctgcaagagcagggcggtgccatctccatcgattgccagttctgcaaccacagctatcgcttcgatgcggccgatatcgcccagctattcgcaggcgcggggacggcgggtccctccggtacgcggcactaaaaaatgcaggggggcgtagaaccttttcgccattacgccctcataccctccgctgcgccttttctgtcataatcgcgcgcacttttttcgatgtagtccatcgtcgggtgggctacaacagcatggaggaatcggcccagggccgacggggaactcatgacgcaagccaataacgccgtgtacatcgatatcagcatcgctcaactggtcgaagaggccatcaagcgcggtgagggtgaattggccgccaacggcgcgctcgtcgtgaaaaccggccaccggaccggtcgttcgccagctgatcgttatatcgtcgaagagtccagcactcaggcttcgatcgcctgggggccgatcaatcgtccgttccccgccgacaagttcgatgccctgtgggatcgcgtcgagaccttcaacaaggctcaggatcacttcgtttcccatgtccatgtaggctcttccgaggggcactacctgccggtcaagatgaccaccgccacggcctggcagaacctcttcggccgccagctgttcatcaatccggcgcagtacaacacgtccggcaaggacgagtggcaagtgctcaacgtcgccaacttcgaatgtgtgccggaacgcgacggcaccaattccgacggctgcgtgatcatcaacttcgccgccaagaaggtcctcatcgccggtatgcgctacgccggtgaaatgaagaaggcgatgttctcggtgcagaactacctgctgccggaagccgacgtactgccgatgcactgcgccgccaacatcggcgaagacggcgacgtcaccctgttcttcggtctgtccgggaccggcaagaccaccctgtcggccgacgagtcgcgctacctgatcggcgacgacgagcacggctggggtaccggtgtcgtgttcaacatcgaaggcggctgctacgccaagtgcatcgacctgtccgagaagaacgagccggtaatctggaaagccatccagttcggcaccgtgctggaaaacgtcgtgctggacggcgagcgtgtcgctgattacaccgacgacagtctgacccagaacagccgtgccgcctacccgctggaatacgtcgagaagcgctccgagaagaaccttggcggcgagccgaacgcggtgatcttcctgacctgcgacctgaccggtgttctgcctccggtatccatcctcaatgaagagcaggcggcctaccacttcctctccggctataccgcgctggtgggctccaccgagatgggttcgggcagcggtatcaagtcgaccttctccacctgcttcggcgcaccgttcttcccgcgtccggccggcgtctacgccgagctgctgatcaagcgcatccaggcgttcggctccaaggtctacctggtcaacaccggctggaccggcggtggctacggcgtgggcaagcgtttcaacatcccgaccacgcgtgcggtgatcgctgcgatccagagcggcgcgttggtgggtgccgagaccgagcatctgccgatcatcaacctggatgtgccgaaggccgtcgaaggcgtcgatacccagctgctcaacccgcggaacacctgggccgaccagaacgcctatgacgaagcggcgaaggaactggcgaacaagttcatcgagaacttcaagaagttcgacgtttccgaggcgatcaaggccgccggcccgcagctctaaagctcgcgtcgtatcagatcaagccgccttcgggcggctttttcgtgcctgctcactcgccgacggatcgaagcaggcgatgagtaccatcagtaaagacgcatggattcgatcaatccgtgggcatagcatggcggccacatttctcgtcaatggagccgttcatgcaaatcgaagaagccattcagacccgccgcgccgtcaaagcctacgacaccagctttcaactcagccgcgaagagaaagacgagttgtttcggctggcgctgatggcaccttcggcgttcaacctgcagcacgtgcgcttcgtcgaagtgagcgatccggcgctgcgtgcgcagattcgcgaagtgggctggaatcaggcgcagatgaccgacgcctcgatgctggtggtggtctgtgcccagctcgatagctgggagaagaacgtccgccgcgtctgggacggcgcgccgcccgaggtgcaggactacatggctggcgccatcgataactactaccgcggcaagccgcaggtgcagcgcgacgaaaccatgcgcagctgcgggctgatggcgcagacgctgatgctcgccgcccgcggtaaagggctggattcctgcccgatggacggcttcgatttcgatgccgtggccaagctgatcaacctgccggacaatcacgtcatcgcgatgatggtcgcggtcggcaagcgcgccgccgagcccaagccgcgtatcggcaagctgccgttcgatgaagtgatcatccgcgaccgtttctgagccatctgaaggggcgcacggagcgtccttttcttcgcgccgccgcagcccgttccgcagcggcgcgcttccattccccgacccgccagcgcgttgggggatgccgcttttttgcatccaccgtgacgccagtgctgtctgtctggtggatcggtgaagcgtgatccaccctacgcatcccgcaccttgctaccctccggactccagtcaaaggagtgacctcgcatgatcgaacagaccctcgcccagacattcggctacgacggcttccgtcccggtcaggagcaggccattcgcgccgtggtcgccgggcgctcggcggcggcgatctttcccaccggttctggaaagtcgctgtgctatcagttaccggcactgctgctgccgcacctgacgttggtggtttcgccgctcctggcgctgatgcaggatcagctcgccttcctgcaccggcacggcatcgccgcggccagcatcgattcggcgcagagccgcgagcaggcgagcgagaccatggtccgcgccaagtcgggtgagctgaagattctgatgatctcagtggagcggctgaagaacgagcgcttccgccacttcatcagccaggtgccgatctcgctgctggtggtggacgaggcgcactgcatttccgaatggggccacaactttcgcccggattacctcaagcttcccgactatcagcgtcagttcaacattccacaaacgctgctgctgaccgccacggcgacgccgccggtgatcgccgacatgcaggccaagttcgccatcgcagcgcaggatgtggtgaccaccggtttctatcggccgaacctcaacctgctggtggagccggtcagcggcttcggcaagcagcggcggctggtggaatggctgacagacaaggccggccagccgaccatcgtctacgtcacccagcaaaagaccgccgagcaggtcgccgaacacctgggtcagcgcggttttcccgccagcgcctaccacgcgggtatgggccacgagctgcgcgagtcgatccagcgtcgcttcatgggcggcgagctcaactgcatcgtcgccaccattgccttcggcatgggcatcgacaaggcggacatccgcaacgtggtgcattacgacctgcccaaatcgatcgagaactacagccaggaaatcggccgtgccgggcgtgacgggcagccgtccgactgcctggtactggccaaccgcgacagcctcagcgtgctgcagaacttcgtctatggcgacacgccggaacgcgagggtatccgctgcgtgctcgaggaattgcgccaggcaggcgcgggcgggcaatgggagctgatgctcaaccagctgtccgaccagagcaatatccgccagctgccgctgaagaccttgctggttcagctcgagctcaagggcatcatcgccccgcgtttcgcctatttcgccgagtatcgcttcaagtacctgctcgagtccgaagcgctggtggcgaagttcgaaggcgagcgacgtcagtttgtcgaggccatcgtgcacacctcggcgcgggcccggacctggtgcaccctggatttcgatgcgctctatcagcagcacggcgccgaccgcgcgcgggtggtcaaggcgctggagtacttccaggagaaaggctggatcgagctggaaagcaagcagatgaccgaggtctatgcgctactcgatgcgagcttcgataccgaggcgctgagtggcgagctgcacgcctatttcaagcagcacgaagccagcgaaatcacccgcatcgacaacatgctggcactgttcgagtccgccgagtgcctgagccagcggctggcggagtatttcggcgatcgccaggcgccccagcgttgcggacattgctcggtctgtcgcgggcaggtcgcacaactcccggcaccgccagcgttggcgccgcttgcggagaccgacctggacgcccgctgcgccgatttcgaccagcgctaccggcagctcaaggggcatgcgcccagcgccgaatgccggacgcgtttcctctgcggcatcagcgtgccgctgttcaccaagctcaaggcccgccagctcccgggattcgcctcgctggaggcctacccctatgccgaggtacgcgcgcagctggcaggctagcgtgccgtcaggccgatcagccggtcggcgacgcccttggtctggcgtgaagtgcccgcggtgaggttgctggaattctccagcgcatcgagcagtccggtgagcgagccgatgccggccgactgggtctcgatgtgctgcgccaccgcgcggatctcactggccagccggtcgatgtcggtaccgatctcctcggcattcttgccggtgatctcggccagcttgcgcacctcgtcggcgaccaccgcaaacccgcgaccttgttcgccggcgcgtgcggcctcgatggccgcgttcaacgctagcaggttggtctgcccggcgatctgctgaatggtctgcaccaccgactggatacgctggctggactgcgccaggtcgcgggcgctgccaaccacttcgtcggcctgatgaaccatctgcttgaccgatgagccggcttgctcgatcaccgtgccctgctgattgatgttcaaggtcaggtcgtccatcgagccgtgcagctcgttggcgcactggctcagctgctcggacatggattggcgctcatgatcggcctgggacagcacctgccccagatcggccaggccacggaacaccggacggatgtgctcgtccagtccattgacgtccaccgcgctgctgtagtcctggcgcttgaactgctcgatctgcttgaccaccacctggctgagaccggtgagtttcttaatctgccggcgcaggaagaaggccttgaactcgccgtggtaggcgatgaagttgtcggtgtagtcgtcgtggaattcttctttgccattggtgcggaagaagaacaccgcggtcagcgtctggttgaggttgaggccgagaatttcaccgaaggtggaatatccggcgaccggcacgtcgtcgaacaccgggtccatgccgccgagtgcctgctcattgttcaggcggcgcaggatgcagtcgttgaggatgcctaccaggggcttgccgggcttgttgcgcatgaatttctgatagtcgcggcgggtggcctcggccagcggggtgcgcttgaccatgatcagctcctcgccgggcgccacgtcgcagaacaggtgcacgcgctcgttggcgaagtcgatctgcgagatcgagcggacgaacacctcctcaccgacgcggatggcgaaggaatagtcggcgagtcgttgctccagctccttcggggcgcacttgagcgcctcgcacagcgcctgaaccatggtgcggatgttgccgcgggaatcgaccacctggctgatgtagcggtcttccagcgaggcgctgagcacgctcaggctgagcgcggtgggctcgaagttctggctcttgaacacgccgaagcgcacatcgcgggcgcacttgaggaagacgatcagcgcgtggttctggtagctgcgcttgccgtcgtgcaactgggtcttctggaagtccagcttgccgccggccgagccgccgacgaacaggcagggaaaacgcccggattcgtaaagggcttccatgaagaaagactccgacgccgagaggccatcgaagaagatattcgccagggtgtcgcggtagtcgatcttcatcgacacctgcaggcgcttgatcgaggcgctgagcttggcgatccgctgcgccatgctcatacgctgggcgccgttgcgaatgtcctcgcactccagcggcacctgcacgatttccgctgcggcaatcacgctggcgtcgaacagttgcagcaccacgcgatcccactgcgcgccggtcgcgcagtagagccgctggttctcgctggagagctcgccggcggtggtgcacaggctgatgaccgcctgtgggaagcgttgcgagacctgccgcgccacctcgtccagattgacatgaggcgagacgaagccggcaatataggtcggatcgaacttcaggtcggcaagcttttgcgcgagttgctgcgccgtgctgagcaggctcagggtgccgtcggtgtgtctgttgcctggcttgaaacgtgagaaggaaagcatgggcagtactcgcgtgaaggggtgaagcgcaaaccccgcgcgctcgttctatggcgagcaatcgcgtgcagggctacttcgttttcggcaacgccaggctcgatctggataccgttgggcgccgaggccgtcgttcacgttatcggccgccccgcgggcgttcgccatgcaaccttggtatccgtaccaaagtcgtaggcgtcgacagcagccggcagaccgccgcggatgtgcccattcgacgaccggcctctcgtgacgaggcgactggccgataaccgagacattgcccccttggagcgacgtcatgtctcgctttctcaccgatctcggattccgctggaaaatcaccctgcccatcggcgcgctggccctgctgctggtgctgatgggcctgttcggcatgcgcggcatcgaacatgtcgtcgactccagcaaggtcctggccacacggcatctgccggctatcagcctgttgctcaatgccgaccgcgacctttaccaggccttcgtcgccgaacgcagcctgctcgacagcgatgcgggtgaccatacccaggcgctcaaggccagccatgcggacaacctcaagcaggcctatgaccgcgtgcagaagtacgccgccatgcagccggggccagcggccatggcgctggtcgagcggttcaatcgcgggttcgctgagtggtcggacgtttcgcagcgggtgatcgaccagatcgatctcgatccccaggcggccagtgcgctgagctttggcgacagcgaggcacgcttcgacagcatgcgcgacgccatcgatcagctcggcaacctggaagacgcggccgccaatgccgttggcgcggtggcgatcgccgagggtgccggcgccgagacgcagcagagtgtcctgttggtgatcggtctgctcggttgcgtgctgctggtgctcggcctgcccctggtagtgctcaaaccgctgcgccggctgctcgaacgcgtccagcagatcgccgagggcgacggtgacttgcgtacgcggctcgaggtgcgctctgccgatgaactgggccagctgggtaaggctttcaaccgcttcctcgacaagctgcagccgctgattgccgaggtcgggcaggtgaccggcaaggtcgatgcggcggcgcagggcatggccggcatggctgcgaccaacgatcgcctgatcagcagcgagcatgccgccgtcgaccaggtcagtaccgccgccaccgaaatgagcgccgctgtgcatgaggtcgcgcagaacgcccagagcgcctcggatgcggcgcgcgatgccgagagccagtcgcgcaagggcgcggcggtggtcggcagcaccatcgagtcgatccgtcagctggcgcaggaagtggaaagcacctcgcaaaccatcgaagcgctggccgacgagaccgccagcatcggggcggtcctggaagtgatccgcggcatcgccgaacagaccaacttgctggcgctcaacgccgccatcgaagcggcgcgggccggcgagcagggacgcggattcgccgtcgtggccgatgaagtccgcgccctggcggcgcggacccaggaatcgaccaaggacatccagctgcgtatcgaacgcttgcaaagtggcgtggccaaggcggtgcaggcgatgcatgccggcagcgacaaggcccgcgacagtgtcgagcgtgccgctggcgtcgatcaggtgctggccgataccaccgcgtcggtgcagcgcatcagtgacatggccgcgcagatcgccacggcctgcgaggagcagagcagcgtgaccgaggagatcgcgcgcaacatcaccgatatccgcgagctatccaacgaggctgcgtcgaattcggccgagagcatgcaggcgagccagcagctctcggcactgtcgcaaagtctggccacgctggtgggccgctttcgcgtctgacttgccgagcgctcaggtgacggcgacgcgcccgcccttactcaaccccagagcagcttgcccaggccggtatcgctgggcagcagcaacaggctgagcaggaacaccagcagcaaacccaggccataggcgaggctgatcagccgctgtcttcggcgacgctgcggtgttgctgcggggggcaggtgatgctgagggcgatggggcatgctgggtcgataggttgcgtgtcgcagctgcggggcggtctcgactgaatggggccgatgacggtgcgcagtaaaaccgaattggcggcatattgccactactgcgatgccggcccgacgacagggcgaaggcttcgctgaaacaatcggaaaagctctgccgcgccctctggcctgcggatcgcccggcctcgaccatactcaacgtcgaatgctgatcgatccggagactcgcccatgcaaacgcgccgccagctgctccatcgttccgtcctggtcgccactgtcgctgcgctcagtgcgctctggccatcgctgacgagggctgacgagccgttgcggatgcgcgaggtactggcgtccggggcgctgcgtccggtgatcggcctggatacctcgcgtatccatgatgtacgcctggaatcccccgagagggtcgccttgcttgagtcggccgcgtgaactgaaggagcagggcgcgtccgctatatcggcgtgtcgtgctgatggcacaatgacgccactttcacctcgacaggacgtcccatgcgcgccgccaaactgttgttgcccctcgccctgctagcagtcaccggctgcagtatcaagcagaccgtcactcccgccacgctctcggcggagctggtcccggaaatctgtaccatcccggcccctggcctgcgtacgggcttcagcaccacctatcaacagctgcttcgcgacaagggcttcaggacgcggcagctggcgccgggcagcaacccggggcgctgcccgctcagtacgacattcaccggaacctggcgctgggatctgttgctgtacatgaactatgccgatatccgcgtttttgagaacggccgccaggttggccaggccgaatatgacgcccgctggggcggcggacgcccggacaaattcatcagcgccgaaagcaagatcgccgagctgacgcagcaactgttccccacgggcgctgctggcctcggcgtggctgcgcccgttgcgatcactaaggcaccgacgagcaaggccgcctaccggcaggagcaactccggcgcctgctggacgaacagctctcctacgaggagtaccagcgccgctatcgggaggtaatggccgactagcttttaacccgggaaagggcgcgctgctacgaggcgggcgtatttgcgcagcttccctgacctgcgtcagacggccggctggcgggcgtgggcgacaatccttgttaaacgaagccgctgaacctcgacggtgccggcgcctcgaagcttaataggtacgtcatcaaccaggagtagtcgtatgcatgttcaagtcaacagccatcacatccccggcagtgtggagctgcacgaatgggtcggttcgaccgtagaggagcggctggagcgcttcgacgatttcctcacccgtatcgaagtccatgtcagcgacgagaacgcccagaaggccggtgccgacgacaagcgctgccagatcgaggctcgcccgaagggccatcaagccctgtcggtgacgcacaaggccgagtcgctgcaactggctgtcgacggtgccgccgagaagatgcgtcatgcgctggaacatctgatgggcaagttggataccaaggtcatgtccggcggcgagctcaatgacccgctgctcgacgaacaaccacaggcggtcaaggacgccatgctcgaagaagacttcctggaaaagcaggacgaactcgacaagtgataccccggccccggcatgctgccgggcctttccctacgtaatcgcggcgcaaagcgggcaaccctgcgcaatgcctggaacgcaccgctgccggtgcgttccaaacagcctcttcgttctcggtgcctctcatgcaaatcatcctggtgcgtcatgggcggcctgatcaccgcgcccgctcgtggagtacgccggctggcatgaaggactgggtagagcgctacaacgccgccagtgtcgtggtcgccgagcgacccgaagcgctatgccggctcgccaactcggctggcgcggtggtttgcagttccttgatgcgttgcgtggagtcgcgcagcggactcggttgcgattgccgtgccgaacctgatccgctgtttgccgaagcgcacctgccttatccagactggtcgttccccctgatgccctcgcgcttctggcgtatcacctttcgtacggcgtggtttttcggatttgcgcgacacaccgagccggtgagcgaatcgaggcgccgggcccgcgcggctgcggacaagctcatcgaactggcgcatgcccacgactgcgtgctgctcatgggacacaaggtcatgaacgcactgatcgcccgggaattacgtcggcgcggctggcatgggccggttatgccgttgctgtccggctactggcacccgagccgctactccaggcgatcctgatcgcaccaacggtgcccgacgcggcgccttccattccgatagcggcttcagcgcgctttggctgcgctcatacacttcggtttgcaagctgaaacgtttcagctaacgtactgaaacgtttccacaacaataaaaggtgatctcatgactcgtttgcgacttctgtgtggcctgggcatctgcctggccaatcccgctctggcctgggagcaggtgctgatcgatgccgatacccccgcgcgcaactggcaggttaccagcgacgagctcggcatcaagacggcgaagcccttttcggtcagcatgcgcagcctgcacggcgggcgcgcggaaggtgtcagcctgatcgtgatcgacaacggcacgatgaagatgacggttgtccccaaccgcggcatgaacgtgctcgaggcggtggccggagacgtgcgcctgggctgggactcgccggtggacgaggtggtcaaccccgcgttcatcgaactcaacgcacgaggcggcctgggctggctggagggcttcaacgaactggtcacccgctgcggctacgagtgggtcggccatcccggcgaagacaacggcgagctgctcaccctgcacggtcgcgcggcgaacattccggcgtctcgggtagtgctggagatcgacgaaaagccgccttacgcgattcggctgcgcggcgagctgcaggaaaaggccttcaagaaggtcgacttcgcgatcatgaccgaactgagcaccgaacccggccgcagcggtttctcgctgcacgacaccctgaccaatcagggcgactacgccaaggaataccaggcgctgtaccacagcaacttcggcatgccgttgctggagcagggcgcccgcttcgtcgcgccggtcaagcaggtctcgccgttcaatgccaaggccggcaaggagctcggtgactggcaaacctatcgtggcccgacgcctgactacgatgaaaccgtctacaacgtcgtgccctacgccgatgcccagggcgaaacgctggcgatgctgcacgaccgcgatgccgagctgggcgtcactgtcggtttcaacacgcgtgagctaccggtgttctcgctgtggaagaacaccgataccgaaaagcagggctatgtcaccggactggaacccggtaccagctattcctacaaccgcgcctaccagcgcccgctcgggttggtaccgactatcgaacccggcgagcagaagcattttcatgtgcgctacgagctgctggcgagcaaggcggccgttgcggacgcccgcaagcgcatcgagacgatccaggccggtcgccagagcgaggtcaggcaggagccgttggtggacctggacaagaactaatacgcactcagtgcaaggttattgacgaaaaagcggggagcgccttgtctgctgcgttaggaatggtggtcacgggtcgccaagcatatccgactgagccgatgcgccgctctgttccgggtcttctggtctgccgtgctcggtttgcccgcggacgctcaagcggagtccatgttctatcgcccaaacacggctcactcagctatagccaaaggcttacaaaaagctgcgccgatcgccgcttcagctcagggccggaagtacttaatctacacccactctgaagcgcaggacgcgctcaggatcaggatgatcgaccatcgccaggacggcactcgaacggattcggtacggtcagaaaaaacccgcttcggcgggtttttgctttttcaggttcagcccattgatagcgaggctccgctgaaaagctcgcggtcaagaccgctcctacagagaggtgtttgcagggagttgtttgcaggtgaggccatgcgcatagcgcggctcttgtgggagcggtcttgaccgcgaatggctcgactgcttcggaagtgcgtatgtccgaagaagcgagcaaggcaatcatcgctggtgtcttgtgtgttttagacgatctgtcgctttttgcggacgctatgcatccgaaacgtaatctgcccttggcaacatggcttccccggcgagcacaccgcttgccgcccttagccatcgactaccgaggaaacagatcatgagcgcatcgacttctacccaaacggcagccaacgctttgtccggcagctacgtcaccactcgcgatggcgtcagcctctactacaaggattggggcccgcgcgacggccaggtggtcaccttcagccacggctggccgctgaattcggacagctgggagtcgcagatgatgttcctggcgtcgaagggctatcgggtcgttgcccatgaccgccgcggccatggccgttccagccagccgtgggatggcaacgacatggaccattacgccgacgatctcgcggcggttctcgaggcactggacctgaaggacgccaccctggtcggcttctccaccggcggcggtgaggtggcgcgttacatcggccgccacggcacggggcgagtgaagaaggccgtgctggtcgctgcggtcccgccgttaatgctcaagaccgacagcaatccgaatggcgtgccgctggaagtcttcgacgggctgcgccaggcctcgctggacaaccgttcgcagctttatctggatatcgcttcgggaccgttcttcggctacaaccggcccgacgcgaaaccgtcgcagggcttgatccagtccttctgggtgcagggcatgcaggccgggcacaagaacacctatgactcgatcgcagccttctccgcgacagatttccgcgaggacctgaagaagttcgatgtcccgacgctggtgatccatggcgacgacgatcagatcgtaccgatcgacaccgccgcccgggcatcggcggccattgttcgcaatgccgagctcatcgtgtacccgggcgcgccgcatggcctggccgacacccacaaggaccgtctcaaccaggacctgctggcgttcctggaacggtgatcgcgggctgccgatggggtccctttgacaggccgtttcgcagcccggtacgacagcgaaacggccagttggttgcggctatagcgaaaggcttacacggatcgcagcgatcggctatttagccgcgaccatccgaagcctaatctatgcccatctctgaagcgcaggaagcgctcaggatcaaggaggatcgaccatcgccaggacggcacccggaaggattcggaatggtcaggaaaaacccgcttcggcgggttttttgttgcctgcaggaaaatctggccttcaggcgccgtgtcatcgcaccgtgccgctagccgttatcgccgcgatctgctcgatcagccattgtagcgccgcgtcccgctctcgctgggccacgctgacgatgtccagttggaaggcaccgagatcgaacggcagatcgaagaggtgcagcggcagcagcttggcgaagtgccgggccagcgctgtcgggagtaccgcggccaggtcgctgctggcgacgatatgtgcggcttgcaggtagttcggggtggtatacacgacgtcccggctcaagccctgctcctccagccactgatcgaccatcccgcgcgtctgcccgccatggacccagaggtgacgcagacggaggaatccgtcgagatccaggctgtcgccaaccaacggatggctcttgcgcaccgcgacctgcagcgtttcgctggcccagcggcgagcgtgaaaacgcgtcggcacctcgacgaaacggcccagcaccaggtccagctcgccatcatccagcgccgccgcgggcaggctcggagtcaggtgttgaatcgacagctggatgccgggcgccacgcgcgccagatgtgccatcaacgctggcatgcagatcaactcgacgtaatcggtcacggcgatgacgaagcgttggcggctgctggcgggatcgaagaagtcgccggcattcagcgtatgttcgatctgttgcagcgcatcgcgaatcggcgcctccagactcagcgcgcgcggcgtcggctgcatggcgcgccctacccgaaccagcaacggatcatcgagcagttcgcgcaaacggttcagggcgttgctgacggccggttgactgagcgaaagccgctcggcggcgcgagacacgttgcgttcgcgtagcagggcgtccaggacgcgaagcaggttgaggtcgaagttgtagatattcatttggtgaatctgaaacatcacaagactaaatttcaaaaatagtagcgtcttcgtctatggttggtctccagttttttccgccttgcgacgaggacagctgcaatgagccaaacccgcttcgatatccagaccgctgccgtgatcggcgcgggcaccatgggccgcggtatcgtcatgagcctggccaacgccggtgtgcaggtgctgtggctggacaacaatcctgagatgctcgaacaggcgttgggcgtggtcgccgatacctacgcgcacaacgtccgtcagggccgcatcgacgaagcccaggccgaggctcgtcgcgcctgcgtcagcaaggcggccgactaccaggcgctggcggatgtggatctggtaatcgaggcggtgtacgagaacctcgaactcaagcagaacatcttccgcgagctggacggcatcgtgaagccggccggcatcctggccagcaacacctcggcgctggacatcgacgccatcgccgccgtcaccgggcgcccggagcaggtcgtgggcctgcacttcttcagcccggcgcacatcatgaagctgctggaaattgtccgcggcgcgaagacgtccaaagccgtgctcgaggcgtccaccgaactcggcaagcgcatgggcaaggtcagcgtgattgccggcaattgcccgggcttcatcggcaaccggatgctcgccacctacgtgcgcgaggcacggatgatgctgctcgagggcgcctacccgcatcaggtggatgccgcgctgcagggtttcggcttcgccatggggccgttccgcatgtatgacgtggtcggcatcgacctggaatggcgggcccgcgagctggccggcaaagggcaggacgaggcggaagtgcaggtcgacaaccgcctctgcgagttgggccgcttcggccagaagtcgcgcatgggctactaccgctacgccgagggcagccgccaggccgagcacgacccggaagtggatgcgctggtgcagcgcgagtccgagcgcctcggttatcagcgtcgcgagatcggctcggaggaaatcctcgagcgctgcctgctggcgctggtcaacgaaggcgcgaagatcctcgaggaaggcatggccgagtccagtgccgatatcgataccgtttatctgtacggctacggcttcccggccgaggtcggcgggccgatgacctgggccgatcggcagggcctgccggccattcgtgatcgcctcaatgcattggccgagcagcacggcgcgcactggcagcctgccgagctgatcgacagcctggccacgctcggtggtcgcttcgtcgactacaagaaggaggcctgagcatggaatacaaggcgcccctgcgtgacatgcgcttcgtgctgcacgagctgttcgatgccagcgctcattgcgctctactcggcaacggcctggaccgcgagctgatcgacggcgtgctggaagaagccgcgcgctacaccggcggtgagatcgcgccgctcaatcgcaacagcgatgaggaaggcgtgaccctcgaaaacggcgaagtccgcaccccgcagggcttcgtcgaggcgtacaaacagtacgtcgacaacggctgggcgagcatgaccggcccgaccgagtacggcggtcagggcttcccgcagctggtggcgtgcaacttccacgagatgctgatgggcgcctcgctgtcctttcgcatctactcgggcctcaccgaaggcgcggtgctggcgctgtacaagcacggcagcgacgagctgaagaatgcctatctggaaaagctggtcagcggcagctggagcggcaccatgtgcctgaccgagccgcaggccggaaccgatctggcgctgctgcgcaccaaggccgaaccccaggcggacggcagctaccgggtcagcggcagtaagatcttcatctccggcggcgagcacgacatgagcgagaacatcgtgcacctggtgctggcgcgcctgcccgatgcgccagcaggggtgaagggcatcagcctgctgctggtgcccaaattcatcgccaacgccgacggcacgccgggcgagcgcaacgcgctgagttgcggcgccatcgagcacaagatgggcatcaagggcgcggccacctgcgtgatgaacttcgatggcgcgaccggttggatcgtcggcgagccgaaccagggcctggcgtgcatgttcaccatgatgaacgacgcgcgcttccaggttgggttgcaggggcttggcattgcagagcaggcgtatcagggctcgctcgcctatgcccgcgagcgcttgcagtcgcgcgggctggccggcgcggtgcacccggataaggtcgccgatccgatcattgtccaccccgacgtgcgccgcatgctgctgacccagaaaacgctggtcgaaggcagccgcatgttggcggcgtactgtgcgcgccagctggacctcgaacacggccatcccgagccgagctaccgcaaagcggcgagcaagcgcgcggcgttgctgatccccatcgtcaaagccttcttcaccgacatgggccaggaagtggcgagcctcggcgtgcaggtctacgggggtcacggttacatccgagtggggcatggagcaactgatgcgcgacagccgcatcacccagctctatgaaggcaccaacggcatccaggcgctggactatatccgccgcaaactgctcggtgacggcggcgcggagctgtcggcgttgcaggcggagttcagcgagatttgtgaccagcagatcgaccgtccggcactacatgctatggcgggcaaggtgcaggcgcggatcggcgagtggcgcgagctgaccgccgagatcatcgctgccaccgggcgcgatccgcaggaaatcggcgcggtgtcggtggatttcctgcagtactcggcctatgtgttgttggccgggctctggttgcaggcggcggcgcgcgcgcaggatgcgctggagcagggtgccggtgaagaggccttctaccaggccaagctggccagcgcggacttctacctgcgtcgcgtattgccgcgagcgagtgcgcaccgggaagcgatccagggtggggcggggtgtttgatggcattgccggaggcggattttgcgttttgagtgaggccgaggcgcccaacctcacccctacgccgggcgccccaatcctctccccagaggggagggggcctggacgtcgttaggcacaactacgtggtgagatcgggcagggctgttggcttggttgacaccttgctcgacaggtacacagaactaccccctctccccttgggggagaggggcttttgatctgctgctctctcaactccgaatcaaaacaatcaggaggcaccgatgcatccgttcagctttgccacaaccgcccaattgatctgcgagcccggctcgtcgcgccgactggccagcctctgcaaggaacgtggggcgcgctcggtgctggtggtgaccgatccgggcattacccgtttcggcctgctcaatgaggtgttgccgggcttcgaggccgaagggcttgccgtggcggtctatgatcaggtggtcgccgacccgccggagcacatcgtactggcggctgtggagcaggcccggtcagccaaggccgatctggtgattggcttcggtggtggcagctcgatggacgtggccaagctggtggcgttgctggcgcatcctgcctgccagcagacgctgcaggacgtctacggagtcggcaacgccaagggccagcgcctgccgttggtccaggtgccgaccaccgccggcaccggctcggaagtgacgcaaatcgccatcatcaccacgggcgaaaccaccaagatgggcgtggtatcgccactgctgctgccggatctggcgctgctcgacgccgatctcaccctcggcctgccaccggccgtgaccgccgccaccggcatcgacgccatggtgcatgccatcgaggcctacaccagcgcgctgaagaagaatccgatgtccgacctgctggcccgcgaagcactgcgcctgctctcggccaatctcgacgaggcggtgcacaacggcagcaaccgcgaggcacgccaggccatgctgctcggcgcctgtctggccggccaggcgtttgccaacgcgccggtggcggcggtgcatgcgctggcctatccgctggggggcaatttccatattccgcacggcttgtcgaatgcgctggtgctgccacaggtgctgcgcttcaacgtcagcgcggcgaccacgcactacggcgagctggcaccgatcgtcctcggtgatcggctgcgcacggatgacccgtcgacctatgccgagcagctgattcaggaattcgagcagatgagcgcgcgtgtcggcctgccgacccgcctgcgcgatgccggtgtgccggaagacatgctgccgcagctggccaaggaggcgatgctgcaacagcgcctgctggtcaacaatccgcgcgaagtgaccgaggccgatgccctggccatctaccgcgccgcttattgactcgttggcgcaccgcttcgcctgcggtgtgccggtttgctgaacaaggattctccagatggccgaacaaccgcagcacctgcgcgccgattaccgacatttccagtcgatcaccacgcgttggcatgacaacgacatctacggccacgtaaataacgtcgtctattacagctatttcgacagcgcggtgaatgcctatctgatcgagcgtggcgggctggatattcaccaaggcgaggtggtggggttcgtcgtcagctcgtcctgtgactacttcgcctccatcgcctttcccgatgcgttggaagtcggcctgcgggtcggcaaacttggcaacagctcagtgcagtacgagctggcgatattcaaggcaggcgaagcgcaggcctgtgcggcgggacgcttcgtgcatgtgttcgtggatcgtgccagcaaccggccgacaccgatcccgagtgatttgcgccaggcgctggaagcgctggtaatgatggccgagtaaatctcggccccgcgggtagactcgctgaacggccgaacttctcggccgtgtcgctgtgatgaatggcagtcccgcgatgcgcggcgctgcggagcggctggcttagtggtgatgcttgtgtttgtgcttccagtgtcccctggctttacccgggtgcccgtagtaccgacgatcgtcacgataatgccggtcgccgcgatagtcgtcatcgtcgccgtactcgttgccgagcgctccaccggcacccccgcccaatgccgcaccgatcagacccccggtgctgccgccaacacgttggccgatgacgttaccgcccgcggcgccgagaccgccaccgatggccgcctcggtacggctgcgcttgtcggcaccgaccatgcctccggcggcaccgccgacaccggcaccgatggtcgcgccggtcgaaccacccagctgctcgccgacgaccgtgcccaagacgcctcccagcgcgccgcccacggccgcgtcggtgttgcccgccagggcgtagccgccacaggtcaggccgagggagaggaggagcaactgcatggacttcatagacacctcgaggacagagccgccttgcggcgagatttgcgccatagactggcgagctcgcgccgagttcccgtttcggttgttcgcttgttggctttgtgagacggctcacgattcagccgagtttgggagcgctcaaagcaggctctcgcgactccattgctccagcgcctgggtcagcggcagcacctcgccgggacggctcaaggcgtagccgggcagttggctgatgcgcgcctggaactcggggttctgcaacacccgcagcagcgcgcccatggccggcagctcgaggctgtcctcgcggcacagcaggcagtagtgttcgcgcgccattggcaggaaggtcaggccgaactggcgcgccgccgcctcgacgccgaagccgacgtccgccatgccgctggccacgtaggcagccactgcggcatgggtgaactcctcgttgtgaaaacccctgatcgtggcgctgtccagctcgtcgcggcgcagcaggtcttcgaacaacaggcgcgtgccggaacccggttcgcgattgacgaagcgtggctcgccacgcgccaggtccgccagcccctcgatgcctagcggattaccgggggcgagcatcaacccttgggtgcgcacgacaaaggttatcacccgctggtcggggcgcagccagggctggatgcggttcatgctgagcgcgccgagcgggccggccggcacatgcaggccggccacttcgcagtcgtggcgatgcagggcgatgatcgcctcgctgccgctgcgaaactgtacgtcccactgccaactggggtcgcgctccagccactcgcgcagcgccgctacggcgaaaccgtggctggcgtggatgcgcaggccggggttgctggcctgcagcacccgattcagttccagttccagctcgccggcgaggttgtccagttgcggcgacagccgcgcacggatgcgctggtcggcccacagcagcttctcgccgagcggtgccaggcgtgcacccttgccgcgttccagctcgatcagagggctgccgaagaaggcctgccatttgccgaggaggttccaggcatggcgataggaatagccaacgcgggcggcggcctcggtcagcttgccggtgtcgtgcacggcttgcagcagttccagcccctgggggtcgaggctgctgccgtcgcgctgatggaaacgccagcgtggctggatttcgatgcggatcatatgctcgttacttcatatttgttcggctgaaagcccatgatagtgtgccgcacatgggcgctttgcggccaagtataagaacttcaattcatatgtggcgagccccttgggttccgcctgggataagcgtccatcaaccgtgagaggttgtgaagaaatcgtcgcgagtgaaggcagattgcgcttcgccggagcgcagcaagcggaatgtattgaaatacatgagcattgcgagcaccgccgaaatgcgagatgccgaacgcagcagatttatttacaagctctgatggcgcttgtctcccgacagtaccggtatagccgccggctggagcatagaacatggccactcttccccagcgcttcgctcccgagcagtgccaggccgtcgcccgtgaggtactggccgtccaccgcggtcggccaggcgcgctgttacccatcttgcatgacatccaggaccgccttggcgcggtgccaccggagctgttgccgctgatcgccgaggacctgagtctgtcacgcgccgaggttcacggggtggtcagcttctaccacgatttccgcgccacgccgccgggccgccaggtgctcaagctgtgccaggccgaggcctgccggtcgatgggggtaaaggcgctgacggccgaactcgaggcgaaactgggcctgccgctcggcgagacccgcgaagacggcagcctcactttcgagccggtgtactgcctgggcaactgcgcctgcgcaccgaacgccatgctcaacggcgagctgcatggccgcgtcgatgccgagggcctgctggaactgttggctgaacaggagatgcgcgcatgagcgaatccatcaccgtttatgtgccgcgtgatgccaccgcgctgagcctgggtgccgacaaggtggcccaggccatcgttgccgaggccgcggcgcgcaatatcgaagtgaaactggtgcgtaacggctcgcgcgggctgttctggctagagccgctggtcgaggtcgccaccgccgcaggccgcgtggcttatggcccggtcaaggccagggacgtcgcggggctgttcgatgctggcttcctgacgggcggcgagcatccgctgggccagggcctgaccgaggagatcgaatacctcaagcgccaggagcgcctgaccttcgcccgcgccggcatcaccgatccgctgtcgctggaagattacatcgcccacgatggctatcgcgggctccaacgcgccctgaccatgacgcccgaggcgatcgtcgccgaagtcaccgagtccggcctgcgcggccgtggcggcgcggcgtttcccaccggcatcaagtggcgcaccgtgctcggctgcgaggcggcgcagaaatacatcgtctgcaacgccgacgaaggcgactcgggcaccttctccgaccgcatggtgatggaagacgacccctacgtgctgatcgagggcatgaccatcgccggtctcgccgtcggcgccaccatgggctacatctacctgcgctccgaatacccgcatgccgaggcggcgctcaaggcgacgatcgccagcgcctatgccgccggttacctgggcgacgacgtgctcggcagcggcaaggcctttcacctggagctgcgccgcggcgccggcgcctatatatgtggcgaagaaaccgcgctgctggaaagcgtcgaaggcaagcgcggcaccgtgcggccgaagccgccgctgccggccatcgagggtctgttcggcatgccgacggtgatcaataacgtgatctccctggcctccgtgccgatcatcctcgacaagggcggcgcctactacaaggactacggcatgggccgctcgctcggcaccttgccgatccagctgactggcaacatcgcccgcggcggcctgatcgagaaggccttcggcatcaccctgcgcgagcttctctatgagtatggcggaggctcggccagcggccggccgatccgcgcggtgcaggtcggcggcccgctgggtgcctatctgccggaatcgcagttcgacacgccgctggactacgaggccttcgccgccctcggcgcggtgctcggccacggcggcatcgtggtgttcgacgacacggtggacctggccgagatggcgcgctacgccatggagttctgcgctatcgagtcctgcggcaaatgcacaccctgccggatcggttctacccgtggcgaggagctgctcgaccagatcatcgtcgcccgttccgaaggcccgcagccgggccgtatcgagctgctcaagagcctctgcgacaccatgctcggcgcgtcgctctgtgccctcggcgggatgacgccctatccggtgctgagcgccatcaaccactttcccgaggatttcggcgacaccgccgaagcccgctgatccggaggcatagacatggccctgtatcgtgaactcgactatggcactcccgcccgcaccggcgccccggtaacggtggaaatcgacggcaccgtcatcaccgtgccggctggcacctcggtcatgcgcgccgcgcaagaggccggcatcgccgtgcccaagctgtgcgccagcgacagcctggagccgttcggctcctgccgcctgtgcactgtggaaatcgagggccgccgcggttatccggcgtcctgcaccaccccggtagagccgggcatgaaggtccgcacgcagagccccaagctcgccgaactgcgccgcggcaccatggagctgtacatatccgaccacccgctcgattgcctgacctgctcggccaacggtaactgcgaactgcaggacatggccggcgtggtcggcctgcgcgaggtgcgctatgacccggttaagacgcacctggccgagcccaaggatgaatccaacccctatttcacctacgacccggccaagtgcatcgtctgcaaccgttgcgtgcgggcctgtgaagaggtgcagggtaccttcgccctgaccatcgatggccgtggcttcgattcgcgggtagccgccagccaggacgagagcttcatcgattcggagtgcgtgtcctgtggcgcctgcgtgaacgcctgcccgaccgccaccttgaccgagaaatcactgatcgagatgggccaggccgagcgcagcgtgaccaccacctgcgcctactgcggcgtgggctgctcgttcaacgccgaggtcaagggcaacgaagtggtgcgcatggtgccgaacaagaacggccacgccaaccacggccacgcctgcgtcaagggtcgtttcgcctggggttatgccacccatccggaccgcatcaagacgccgatgatccgcgacagcatcagcgaaccctggcgcccggtgagctgggacgaggcgatcggctatgccgccaggcgcttcaaggagatccaggcgcagtacggccgcgactcggtcggcgggctgacctcctcgcgttgcaccaacgaggaaacctatctggtgcagaagctggtgcgtgccgccttcggcaacaataacgtcgatacctgcgcgcgggtctgccactcgccgaccggctacggtctcaaggtcaccctcggcgagtccgctggcacccaggacttcgattcggtgctgtccgccgacgtgatattggtgatcggcgctaaccccaccgacggccacccggtattcggctcgcagctcaagcgccgcctgcgtgaaggcgcgcggttgatcgtcgccgacccgcgcggcatcgacctggtgcgcagcccgcacatcaaggccgagcatcatctgcaactgcgtcccggcagcaatgtcgccctgctcaacagcctgggccatgtcatcgccaccgagggcctgatcaacgaagccttcgtcgccgagcgctgcgaggccgaggccttcgaacaatggcgtgccttcgtcagcgagcagcgcaacagccccgaggccatggaggagctgaccggcgtgccggctgccgaggtgcgcgccgccgcacgcctgtatgccaccggcggcaacgccgcgatctactacggcctgggcgtcaccgagcacagccagggctcgtccaccgtgatggcgatcgccaacctggccatggccactggcaatatcggccgtccgggcgtcggggtgaacccgctgcgtgggcagaacaacgtgcaaggctcctgcgacatgggctccttcccccacgagctgcccggctaccgccacgtctccgatccggtggtacggccgcagttcgaggccgcctggggcgtcagtctgctcgacgagccgggcctgcggatcccgaacatgctcgccgcggcccacgccggcaccttcaagggcctctacgtgcagggcgaagacccggcgcagtccgaccccgacacccagcatgtcaccgatgcgctcaaggccatggagtgcgtggtggtgcaggacctgttcctcaacgaaaccgccaagtacgcccacgtgttcctgcccggcgcttcgttcctggagaagaacggcaccttcaccaacgccgagcggcgcatctcgccggtgcgcaaggtgatgccggcgctggccggcaaggaagactgggaagtgacggtggcgctgtccaacgccctcggctacccgatgaactacacccatccgtcgcagatcatggacgagatcgcccgcctgaccccgaccttcaccggcgtcagctacgccaagctcgaccgcatgggcagtatccagtggccgtgcaacgacgaggcgccggaaggcacgccgatcatgcacgaggatgccttcgtgcgcggcaaagggcgcttcatggttaccgagttcatcccgaccgaggagcgcacctcgcgcaagcgtccgctggtgctcactaccggccgcatcctctcgcagtacaacgtcggcgcgcagacccgccgcaccgccaacggcgcctggcacgccgaggacatcctcgaactgcacccggtggatgccgaggaccgtggcgtcaaggacggcgactgggtcggcatcaacagccgggccggcgagacggtgatgcgcgccaaggtcacccagcgcatgcagccgggtgtggtgtacaccaccttccaccacccggaatccggcgccaacgtgatcaccaccgacaactccgactgggccaccaactgtccggagtacaaggtcaccgcggtgcaggtgcacaaggtcgagacgccgtcgcaatggcagcaggacttcgaggccttcacccgcgagcaggtcgagttcctgccgcggatccaggtcacccagctgtgaaacccgccggcgggccgttgcggcccgccggtggctcctgttttctcttcagcgcatcgaggtgtgcagatgggcatgaatgccacgcaactgatcaagatggccaaccagatcggcgccttcttcgcctcccaacccgaccccgcccaggcgcgcgtcgattttgcccagcacctcaggcgccagtgggacccgcagatgcgcaccgcgctttacgcccatctggacgccaatggcggcgaggggctgagcgagttcgccctgcaatcgctgtgcgggctgcgtgagcagatagaaccgcaggtgcatgcctgagtcgaatatccttacaggctcgccgtcaggatctcgccaacatgccccgtcttgcccctcttaccgacgtcggctcgcccgtcgccaacccggcgccgcagacttaccgctatgtcgagctggatgacgccgcgcagaccggcgacgcggtgctggccgaggagtgtgccctggccatcgcctacaacggcatcagccatgcggtaatgatggtctcgcccagcgcattggaggacttcgtcgtcggcttcagtctcagcggcgagctggttagcggcctcgacgagatctatgacatccagctcagccgtcgtggcgaggcgttcagcgccgaagtcgagatcggcaatcgcgcgttctgggcgctcaagcagcagcgccgcaatctggccggcaccagtggttgcggtctgtgcggtgtggaggcgatcgaccaggcgctgccgcagttgaccccgctgatgcccggtccgttgccgcccgccgcgcatctgcacgagctgcgcgcgcggatcaacgatgcgcaacggctggcgcggcaaagcggtgcactgcacgccgcgctgttcgtcgacgagcacggcgacatcgtgctgtgccgcgaagacatcggtcggcacaacgcgttggataagctgatcggcgcgctgcgtcgcgagggccgtgacggccgccgaggcttcgcggtggtcaccagccgctgcagcctggagctgatccacaaagccgtgcgtgcgggcttgctgacgctggtgagcctttcagcaccgaccgatctctgcgtgcgctgggcgcgccagcaccggctcaacctgatccacctgccgcaccacagcgcgccgcgggtctacagtcccgggcaatagtgcgtcaaaggttcatggcctgacgcctcgtgcctttggcggtttagcggtcgaggtgaactggcgagccgcggccatggtgtcgagcgcgagcccttgcactgcgcccttcacgccaacatatcgcgcacccgcgtcgccagatgatcgatggagaatggcttgctgatcatgtccatcccgatgtcgagaaagccgctgctggccgcctgctcggcgtagccggtgataaacagcaccttcagcgtgggccggtgctggcgggccacatcggccagctgccggccattcatgcccggcaggccgacgtcggaaatcagcaggtcgatgcgctcgccgctgcgcagaatgtgcaccgcggcgttgggctcggcggcttccagcgcgcgatagccgagcatgtccagcacgtccagcaccagggcccgcaccgcaggatcgtcctcgaccaccaggacggtctcgccctgcgacatcggcggggcctgttgctccggctcgctcgggtccggcaccggggtgacgtcctgatgcgccggtagatagagggtcacttcggtgcccttgccgagctcgctgcggatctgcagatgaccgccggcctggcgagcgaaaccgtagatcatcgatagccccaggcccgtgccctggccgatgggtttggtggtgaagaagggttcgaacgccgccgccagcaccttcggcgacatgccgcagccgctgtcgatcacgctgaggctgacatagcgccccggagccaggtcgccgacttccgattgacgctgcaactgcacgttggccgtcgcgatgtacaggctgccgccgtcgggcatggcgtcgcgggcattgatcaccaggttgagaagcgtgctttccagctggttttcatcgctgctcgccggccagaggtcgggttcgagcagggtatcgaccaggatatggctgcccagggtccgcaccatcaggtcgcgcatcgagtcgaccagctcgttgagatcgactcgcttgaggttcagcggttgccgacgggcgaaggccaacagccgatgggtcagcgcggcggcgcgattggccgaattcatcgccgcgtcgatgaagcgctgggtttcgccgtggcgtccggactggttgtagcgctggatcaggtccagcccgccgatgatgccggtgagcatgttgttgaagtcgtgggcgatgccgccggtcagctggccgaccgcctccatcttctgggcttggcgcagggcctcctgcgcctgctgacggctggccatctcggcgaccagacgctcgtagacttcggccagcgcctcggtgcgctcctgcacccggctttccagcgtctcgttgagttcgcgcagcgcctgctcggcctgccagcgctcggtgacatcctgggccaggacgaagaagccctgcacctgccccgtgtcgtctctacgcggcaaatattgcacctcggaacggcgcggccggccgtcgcggtgcgggctgtcggcttcgaaactgctgggctgaccggcgagcgccgcctcgatgttcgcgcgtcgcagcgcatagccctgttcgccgatcacctcgcgtacggatttgccgtagagggattcgggggagaagccgaaccagtcttcatagtggcggttgttgaagcgaaagcgctcatgccgatcgatgtagccgatgagcaccggtagcgcatcggtgatcatgcgcatctccgcttcgctgcgccgtagcgcctgttcgtcgctggggcgcaggcacaacagttgcccggcgatgcgctcgccgtcgcggatcgggctcagggccaggtcgaaccaggccgaggcaccttgcgaggtgccatcgcttgagaggcgatggttgcgcagcaggcaggcgtggctgggttcgttgcgctcgcgcgcctcgatcagctccggccataccggcccccaggtttcagcaacgggcgtgcctagcgcagcaggatgatgagcgccgatcaaccgcgcatgggcatcgttgtacagctgcagaccgctctcgccccatagcacgcacatcggcaagggcgcgtcgagcaaggtgtcgagcaggctgcgcagcgagacgggccagccttcgatcgggcccagcggcgtcgcgctccagtcgtgacgacggatgcgctcgctcatttcactggttccggggggccagcgccctgggtctacagccataggtcatccatcgatgcgcggcggcgttctgcccgatgcgccacaggtacggggcatgatccacctatcgtgacgcggccagcggcccgccttcgttgtgttgtccgttcggacgccccgccatcctaaccagccttgccgactctcgccgagtcaaaggcgacctccgggcagcgcaattaagtcagcgcgaccgccgtttcaggctggatagccctgcaggctgcgaatcagcgtctggtagtcgtcgacggcggaaaattcttccgtatctttctggccgcgccggctgtccggttcgaggatcgccagcaggtgcgcgacgccgaactcccgggcgctgcgcaataccggcaggctgtcgtcgatgaacagggaggtggctggatcgaaatccaggtccgccttcagggcgtaccagaactgcgcctgctccttggggaaaccgtagtcatgcgagctgatcaggcgatcgaaccagggggccagttcgacgcgctcgagcttcagtgacagcgaatcgcgatgggcgttggtaatcagcaccacccgcttacccgcctcgcgcagggcggcgagaaactcgtccgccgccggtcgcagggcgatgaggtcggcgatttcacgcttcatctcgcggatcggcaggttcagctcgcgggtccagaagtccaggcaataccaggtcagcttgccctcgtgctcgttgaacagcggcgccagttccagttcggccatggccgggctgatgccgtgcagttcggcatagcgctggggcaggaattcgagccagaagtggttatcgaagtgcaggtccagcagggtaccgtccatgtccagcaaaacggtgtcgatttgggaccaaggcagtgaatcgatcatggcggactcttctttggcgttgacgcaatggtgcgacagcggtcggctcgatgcaaagcgttcacggtgccgacggaaaggcgggttatgattgcggctcgcgtttcaaggatatcccccatgcgccagaaacctaccgtacttgctcgtgagatcgttgccaccagccgcctgttccgcgtcgaggagctgcagctgcgcttctccaatggcgtggaacgcacctacgagcggctggtcgggcagggtaccggctacggcgcggtgatgatcgtcgcgctggaggccgacggacgggcactgctggtcgaggagtactgcggcggcaccgacagctacgagctgtcgttgcccaaggggttgatcgagccgggtgaagacgtgcttgatgccgccaaccgcgaactcaaggaagaagccggtttcggcgcgcgccgtctggagctgctcaccgaactgtcgctctcgcccggttacatgagccagaagatccaggtggtgctggcgcgcgatctgtatgccgaacacctgcccggcgatgaacccgagccgatgcgggtcgaccggatcgacctgcgcgagctgtcgagcctgatccagaatccgcagttcagcgagggccgcgcattggcggcgctgtatctggcgcgcgatctgttgatcgagcgaggggagttcagccagtgagccatccttatctgacgcgggtcatcgatctggttcgcgacgccgggcaggccatcctgccgtactggcgcaatgacgtgcgggtgcacgagaaggccgatgcctcgcccgtcaccgccgcggacatggcggcccatcatgtgctcgcggctggcttgcaggcgctggatgcgagtatcccggtactgtccgaagaagactgcgcgctgagcctggccgagcgtgccggctggacccgctggtggctggtcgatccgctggacgggaccaaggagttcatcgccggcagcgaggagttcaccgtcaacgtggcgctgatcgaaggcgggaaggtgctgttcggcgtggtgggtgtcccggccaatggccgctgctactacggtggcggcgaattcggcgcctggcgggcggaggccgatggcgctgcgcaaccactgcgggtgcgccccgagccggtcgaggcattcaccgtggtggccagccgtcggcattcgagcccggcccaggagcagttgctcgacggcttgcgccagcgctttggcaacctgtcactggccaacgtcggcagctcgctgaaattctgcctgctggccgagggcgctgccgactgctacccgcgcctggcgcccacatcgcagtgggacaccgcggccgcccagggtgtactggagggcgccgggggcgaggtgctggatatcagcggcgcgccgctcacctacgaagcgcgtgaaagctacctcaacccgtcgttcctggcgttgccgcatggcgtggcgtggcgtggcgagctgatcgagttggcgaaccgctagcgcgccgtcgcagcaggcgaggcccggcctgtttgcggtcaagcggaccgcgacggccgccatgctaggatttcccgccgtggccaggccaagcgcttgagcccgattgcaggagctgcgcagtgtcgaaaacgcccaccggaatacgtcaatggatctggcgcgtcatcgtccagaccgcgctgattccgctggtgctggtcgaatgcgtgctcgtggccacctatctgctgaccaacaatgccatccgcgaggcgcagatcgactacctgcgcgaggccgctctcggcgacctgcaaatggcggtggcgcaagagacgcgcatcgtcgatcagcagttgcagcaggtcgcgcgctccaccgagctgttgcgaagcgccacggcgcgagccctgtcggcggacgctccggttgcgccgtatccgctgcaactcaccgccagcggcagccgctacagcccggaagaccacggcggcgcggcgagcttctattcggccatcacccccgccgagcagcacgacctgcagaaggtcgcccggctgcaccgcctcgacccgctgctgaaggatctgcacgccggcaatccactgatcgccagcgtctatttcaacagctgggacagttacaaccacatctacccctggttcgacacggcgcagcaatacccgcccgacgtagacatccccacctacaacttctactacctggccaacgcctggcagaacccgtcgcgcaagatcgtctggaccgatgtctacctggatccggccgggcagggctggatgatgtcggccatcgcgccggtgtatcgcggcgattttctcgaaggcgtcagcggcgtggacgtcacggtcaacgggctcatcggtcagatcggcgcgctgcgggtgccctggggcggttatgccctgctggtcagccgtgacctgagcatcatggccctgccagaagcgggcgagcgcgagttcggcctcgacgaactgaccgagcattcctacgacgaagccgtgcgccgggaagtcttcaaaccggaggatttccgcctcgatcgccgcgaacacacccgggagctggccagggccgtcgcgacccaggaagacggcgtgatgcgcctgacgctggacggcgaaccgcggctggtcgcctggaccacggtgccgcagaccgggtggcatctgctggccgtggtcgatgaagctaaggtgttcaaccagaccaatgcgttggccagccgtttccagcagatcggttacctgctgattggcggcctgctgctgttctacctgttgttcttcgcctttatctggctacgcgcgcggcggctcagccaggcgctgctgacacccattgccggcatctctcggatgatggcggccatcggatcgggccaatggcgaccgcagccggcggcgtccgatatccgcgagctcgatgagctgagccagcacaccctggccctcggcggccggctggaaaccagcgaggcgcagcgcagccaggcgcaggagcgcctcgagctggtgctcgaaagcgccaccgagagcctctgggagctggacatgcgcagcggcacgatgcagttgcgtggtcgcctgccggcgcgtttcgggctgcccgcggcccagctcagcgaagcgcagttcctgcggcgcatccacccgcaggatgtgccgcaggtccgcgccgagctggagcgtatgcaccgcgacggcgccaggctgcgctacgaaagcgagttccgtttcgtcgacgccctgggtgcgtaccattggctgctcagccgtggccgcgtgctcgaacgcgatccggtgaccggtcaggcgatcctgattgccggcacccacgtggacatcgatgcgatcaagcgcggcgaggaagacctgcgcctggcgacccagcaggcccaggccgcgaaccaggccaagacccacctgatctccagcattagccacgagttgcgcacgccactcaacgccatcctcggttttgcccagctgatgcgcatggactgctcgccagaagccgattcccaggccgtcgactacctcgatgagatcctgctggccagccggcatctgaaccagctgctgggcgacattctcgactggtcgagcttgcaggccgagcggccgcggctgctgctcgagcctgtcgaagtcaccgcgctgatgcgtgagtgcgccgagctggtgacgctcgaggtccggcgtcacggcttgcagctcgcattcgacctgccggccgcgccggtcgacgtgatggccgaggcgaggcggctgcggcaggtgctgctcaacctgctgtcgaatgcgatcaagtacaaccgtccggccgggcggattcgccttaccgtggaaacgctggcagggcaggtgcgcctgatcgtagaggacaccggcttgggcatcgacgaagaccagcatgcggagatgttcgagccgttccgacgcctgggccgcgagagttcgaatatccagggcgccggtatcggcctgtcgctgtgcctggaatacgccaagctgatgggcggcagcatcggcgtcaagagcactcctggcatcggcagccgcttctggatcgccctgcctgcgttcgagccgcagggcgagccgcggcagcacgagcgcccgcggattgtttatgtcgaagacgatccggccagccaactgctggtacgcaaggcgctggccgatctgggagaagtcagtgtgatcggcaacggccgcctggccctggaacgggtgctggccgatccgccggacctgctgttgctggacctgaacctgcccgagctcagcggcgagcaactgctgcggttgctacgccaggcgccggcgacgcgccgactgccggtgatagtgctgagcgcagcgagccaggccgacgaagggctcgattgtcaggagcggctggacaagccgcttgatctgaacgagctgcgtcgacgcgtccgtgatcatcttcaggcgctggacctgatcccgagctgagcggctcgtcgggtaggcgttccggcgtgcccggcagcgagcccgctctacggggcagcgcggtttcgagtggaaatcagatactggcgaaggccgggaagcccggaaggcgccgtggcggcgctcttcatcggtgctcttcatcgatggtcatcggcgctttcagtcggcgcgttcgccgcagagatcgagggcgaaccagtattcgacttccgtctgcgacagtccggctccgagcagcgcgaacagcttgcccagcgcggcctcgcgggtcatgccaccgccggagaccagtccgctggccgccaactggctgccggtcgcgtagatgttgaactccacgtgcccttgcggacattggctgatcgccgccagcacgatcccgcgctgatgcgcgtcctgcattgcctgcagcagcgcggcgtcatccgccggccccgtgccgttgccatagcattcgaccagcaccccctgcacgccgctgccaagcagcgtgcgcacctgggctgcctggatccccggatacagtgccagcaccgccagattgaccggttggcgcggctgacggtagtcgagcgtggcggggatggccgcggcgcgttgcccctggcgcacccgcgtcggcacgccgaaggcatcgaggctggccgtgcccagcttgctggcgcgggcgccatgcatcagcttgccggcgaaatacaggtgcacgccgggcgcgacacccgcatgcagcgcctgcatcgcgccgaacaggttgtcccaggcgtcgctgcccggagcacccgccggcagcatggcaccggtcattaccaccggaaccggcaagcccagcagcaggaagctcagggcggcggcgctgtaggccagggtatcggtgccgtgcagcaccagcacgccatcgcagccgttctcttcgacaccggcccggatggccacgaccatggccagccaattctcctggcgcatattggcgctgtcgatcggtggcagcagttcgcggaattgccagtgcggcagggtcagctgcggttgcagggcctgctgctcgcgcaagcggtcggcaaagccggatgcgggcaccaggccttcggcgctctgctgcatgccgatggtgccgccggtgtacaacaccagaatgtttctggaagccaccatgttggtctcctataaaaacagggggctaagccccctgtctgtaccccagttcgtacccgcttcgtgcgcttagcgctgctgcgccggggaagcggttgccgttcccgtagcaggtgtttcacgggtgccctgggctggccagactctcgggtccaggtccagatcggagaagtgcttcggatcgaacaccggctgatcgacgcccgcgtcacgctggctgtcgtagtcgcgcatcaggcgcagaccgaccttgaacaacagcgccagggcgatcaggttgcagatcgccagcaggcccatggtgacgtcggcgaagccgaacaccgtgcccaggtcctggatcgagccccacatcaccaggcagatgaccagaatgcggtacaccagcaccggccagcgcttggcggtgaagaagcccagtgcgttctcgccgaggtagtagttgtagatcagcgtggtgaacacgaacagcagcagtgcgacgctgatgaagacccggccccattcgccgaccaccgcagccacggcggtctgcgtcaagaccacgccggccatgtcgctgcccggctcgaacacaccggagaggatgatgatcagcgcggtgcagctgcacagcacgatggtgtcgatgaacacgctgagcgactggacgatgccctgcgcgaccgggtgcttcacctcggccactgccgcgacgttcggcgcactgcccagaccggcctcgttggagaacaggccgcgcttgacgcccatgatgatcgccgcgccgatgccaccggcaaacgccggctccaggccgaaggcgctgcggaagatggtgctgaaggcctccgggatgtcgccggcattgctgccgatgacgaagatggccatggcgatgtaggagaacgccattaccggtaccagcacgtcggcgaacttggcgatgcgcttgatgccaccgaagatgatcaggccgatcaccaccatcagcacgatgccgctgatgaaggtggggacaccaaaggtgtcgttcatcgagctggcaacggtgtaggactgcacggcgttgaagccgaagccgaaggtcaccagcagcagcagcgatacgacgatgcccagccagcgctgaccgagaccgtgctcgatgtagaacgccgggccgccgcgatagccgccgtcgggttcacggcgcttgtacagctgcgccagggagcattcgaagtagctggtggccatgccgaccagcgcgacgatccacatccagaagatcgcgcccggcccgccgagcatgatggcgaccgagacgccagcgatgttgccggcaccgacgcggccggcgacgctgagcatcagcgcctggaacgagctgagctgtccgggctggcgtttgaaggcttcgccgaagatctggaacatgctgccgaagtagcgaaactggacgaagcgcgaggcgatggtgaagaacaggccgaggcctatcagcatcacgatgagcagcttgctccagatgagatcgttgagtaaatcgagcatgacggaagggtctctcttgttgttgtgacaaatgttgaaacacagccctggaatggttggccagagctgatcctcatgcaattgcgcggatcgcggcgagctggcgcgagttgatgctagaattgcgccgctcgcatcacccggaaccccgcatggacaaccaccttggcgccaacctcaagctgctctgcagccactatcgctcgatcgccgaggtctgccgcaagctcgcgatcaaccgcgcccagttcaataaatacctgaacggccagagccgcccgacggcgcacaacctcaagcgtatctgtgatttcttcggggtcgagagctacgagttgagtctgcccggcgagcagttcgcgcaactgatcggcctgcgtcagcacgaccaggaacgcatcgccgccagcgatccgctgctcgagctgttccagccggtgcgcgacaacgccaatagcctggcccgttactgcggttactacttcgaatacgccaactgcatgtcggtgccggggcaaatcctgctgtcgcttgtgcatctgcgcgaggatcgcggcagcttcgtcttcgaacgccaggagcgccaggaacaatcgcgcgccgacaatcccaaacaggaagacggagtcgtacgctgccgctacctgggcgccgccttctatttgcaggaccgcctgttcctcatcgactacgagtcactgaccgacaacgagatgagccagaccatcctgatccccagcttcaagagccgtatcagccgcctcaatggcctgaagaccggcgtgtcgagcggggatcggcgcactccggcctgtacccgcgtggtctgggaatatctgggtactgagatcaaccgggtcaacgcctaccgccaggtgatgctctatgacctggacgacccgcgtatcgacccggaaatccgcgcgcgactggcgtcggtgtccctgcgcgacggcttgttcgagatcgagtagggtctagcgcagattccgtcggagaatttccaggcgttgccgctgctgtccctgggcgtcgaagttgtccgcgcgtagccaacgttcgaacgcttcgcagcaggccggccactggtggtcgagcatcgcgaaccaggcggtgtcgcggttgcggcccttgatcaccatgtgctggcgaaacaacccttcgtagctgaaacccaggcgcgtggcggcgcgcatggagcgggcgttgtcggcattgcacttccattccaggcggcgatagcccagctcgcccagggcaagcctggcgagcaggaagacggcctcggtcgatgcctggctgcgttgcatcgcggggccgaagacgacgtgaccgatctcgatgcagccgtgtgccggtgtgatgcgttgaaagctcagcagcccgaccgcgcgctggtgactccggtcgatcacggtgaagaacagcggatcgacggtcgcggcgcagccatccagccaggcgtcgaatgcgccgcgctcaatgaacgggccatagggcaggtagtcccacagcgctgggtcgtcgaccccctgcagcgccgcccagagctcatcgccgtgccgcgtgaagcacagcggttcgagttgcacgtaatgccctatcagtgcggcacggggcgggattggcacgggctgccagtcggttgggttgggctggggcatggtggcgcctgttcagagtagtttgcggtattggatgaaacccgagcgatcggcgatgcgctcgtagagctgcatggcgtcgtggttggtttcgtgggtcagccagtgcacgcgcgacgcacccgcggcgcgagcctgggcatagacgtgctcgatcaggcgcctcccgatgccgccgccgcgcaggccggcgctgacgaacaggtcctgcaggtagcagtagtcaccggtggtccagcaggaacggtgatagatgaagtgcacgagaccgacggcctgcccgtcctgccacgccagcgcggcatgcatgggctcggcggggtcgatgaagcgctgccaggtcgtggcgctggtctgctcggctaccgtgctctggtagaagtccaggtagcgctgccacaagggcagccaggcagcatggtcttcggcggtgacggggcggatatcaatgctcatacggcttccttggggtgggctgacgatcgctgatgtgggcggccagttcgcggtcgcggctatcgctactgctcgccagcgcctcgcgtacgccggcctggtcggcctggctgcggttctggctgagcttgaacttgccttgcaactgttcgatcggcagggcgaagccgacgatggcgcgtagctgcttggcgatataggcgctgggcgcatcgcttaccgcccagggccgctcgcgcgtggcctcatgctgcgcgctgagtcggctcaccagttgcagcaggcgctcgctgtcgtcaaatacctctgcgcgcccctgcgcctgcacgctgatgtagttccaggtcggcaccacctcgccgtgctcggccttgctgggataccaggacgggctgacataggcgtccgggccctggaatatcaccagcaccggctggccttcggcgaggtcgcgccactgcggattggcccgggcgaagtgtccgtacagcgtgccgaaggggccctcgtccgggtccagcagcaacggcagatgactggcgagcaagccctgcgtgccatggctgacaagggtgggcaggcggctgtcgcgcatctgtcgatgcagcgtcgcgagatcgtcctggcgaaaggcggttggggtgtacatcgtctggctcctgggtgatgagccatgctaggcagaccattggtctgctgtaagatccatttctcgtcagtttcatggagccattcgccatgccgatgccgtctgcaccgccgttgtcggtcgatttgtccggcattcgcctcgacccgcagcgcggcctggcgcgtcagctctatcaggcgctgcgcgaacgcatcctcgatgggcgtctgcctggaagcacgcggctgccggcgagccgtgatctggcgggcctgctggggatatcgcgcaatacggtgatgcgggcgttcgatcagctgtacgccgaaggctacgtcgagggccgcgtcggcgcgggcacctttgtcgccggcttgggtgcgacggccgccccgctaccgatagcgcaggccggcagcgcgcagacgaacgcgttacagctgttgcagcagcatcacctgaatcctcccttgaatggtccgccgcgggcgttccgggtcggcgtaccggccttcgacctgtttcccttcgaaacctgggcgcggttgacggcacgtttctggcgcaagccgtcgcctgcgcggctgggctatggcgacccggccggcgacctgcggctgcgcgaactgatcgccgcctacctgcgtaacagccgcggcctgcactgcgatccggcgcaggtggtggtcaccagcggcgcacagcaggccatcagcctgtgcgcacagttgctggtcagccccggtgcgcaagtggcggtggagaatcccggctaccgcgccgccggccacgccctggcggtcgctggggcgcagttgcgtggcgtggcggtagacagcgacggcctggacaccgccgggctggcgcggatcgccggctgcaagctggtttacgtgacgccatcgcatcagtacccgaccggggtaaccctgtcgctggcgcggcggctggagttgctggagtgggcgcagcgcaatgacggcctgatcatcgaggacgactacgacggcgagtaccgctatagcggtacgccactggccccgcttgccgccctcgatcggcaaggccgcgtgctgtatgtcggtaccttctgcaaaatcgcctttccggcgctgcgcctgggctatctggtgttgccaccggcgctggccgaggctttcgcccgccgccgcgcgctggacatgcgccactcggagatcggcacccaggcggtgatggccgaattcatcgcggccggccatttccagcggcacattcggcgcatgcgggctgcggcccgggctcggcgcgatgccttgctggccggctggccgagcgcgatcgagggctgcacgacgctaccgccggtgcatgccgggctgcacctgtgcgtgagggtcgatagcctggctcgcgagcgcgagctgatcgctgcggcggaccgggttggcgtggaaatgtcggcgctgagccgctactggctgcccgacagcgccaccccggaggatgaacgagcggggctggtgctgggcttcgctgccgtgcccgagacagcgatcgagcaggcgctggaggcgctgcggcgcgcctggcggctctgaggtgacaggccgccgcgctcgggcgaggcggcctgcttacgatcactgacgcaacggcaccagtcgcggcgcgatcatgttttccgggcgcaggatgtcatccagggtggcgtcgtccagcaactgctcctcgcgcaccagctccagcacgccgcgaccgctgagcagcgcctggccggcgatgcgggtggcgttctcgtagccgatgtagggattcagcgcggtgatcaggccgatggagttttccatcaggcgtcggcagtggtcttcgttcgcggtgatgcccacgatgcagtgctcgcgcagcatgtccatggcgcgttgcagcaggcggatcgaatcgaacagcttgaaggcgatcagcggctccatgacgttgagctgcagctgcccggcttcggccgccatggtcagcgccaggtcgttgccgatgacctcgaacgccacctggttgaccgcttcagggataaccgggttgaccttgcccggcatgatcgagcttccgggttgacgcgcgggcaggttgatctcgttgatgccggtgcgcgggccgctggagagcaggcgcaggtcgttgcagatcttcgacagcttgaccgccaggcgtttgagcatgctggagaaggtgacgaaggcgcccatgtcggaggtggcttcgatcaggtcggccgccggtttcagcggatggccgctgatggtcgccaggcgctgcacggccaaagcctggtagctggggtcggcgttgatgccggtgccgatggcggtgccgccgaggttgacctcgaccaacagctgcggggcgatcaggcgcaggtgctccaggtcttcgccaagggtggtggcgaaggcgcggaattcctggccgagggtcatcggcaccgcgtcctgcagctgggtgcggcccatcttgaggatgtgcgcgaactcggtcgatttgccggcgaacgcctgcaccaggctatcgaggctggccagcagggtgtcgtggccgagcagcaggccgaggcggatggcggtggggtaggcgtcgttggtcgactgcgccatgttcacgtcgttgttcgggtgcaggtagcggtattcgcctttggcgtggcccatgtattccagcgccaggttggcgatcacctcgttggcgttcatgttggtcgaggtgccggcgccgccctggatcatgtcgacgacgaactggtcgtgatgctcgccgcggatcaggtgcgcacaggcctggctgatggcggtgtgcttggcgtcactgaggtggccgagctcgcggttggcgtcggccgccgcctgcttgaccatcgccagtgcgaccaccagcttgggaaagtgcgacagcggtacgccggaaaggtgaaagttgcgcaccgcgcgcagcgtctggataccgtagtaggcgtcggcgggtacttcgagggagccaagcaggtctttttcgaggcggaacgatgcagcggaggacatgagggttctcatccgagagaaaagcggcatatgccgcgaaggccgctaccataggccttgaggcccgatctcggccaatgccgttaaaagctgggtcatgcatgatcggcatacgaagcatgtgacgccgcttcgctggcgagcgttattgccgcatacgatcgcccctacctcggctgcccggagcgcccatgaacatcgaaaccaagtggctggaagatctggtcgccctggccgcaacgcgaagcttctcccaagccgccgagcggcgtttcgtcacccagccagcgttcagccggcgcatccgcagcctggaaaatacgctgggcctgaccctggtgaaccgcgcccggacgccgatcgagctgaccgaggcggggcagctgttcctggtcacggcacgcaacatggtcgagcagctgggcgaagtggtgcactacctgcacaacctcgaagggcagcgcggcgaggtgctgcagatcgccgccgcgcattcgctggcgctggggttctttcccggatggctggctcgcctgcgtcaggacggcgtgccggtcaacagccggctggtggccaccaacgtcggcgaggcggtgcattcgctacgggaaggcgcctgcgacctgattctcgcctactacgatccggatgccacgctgcagatggatcctgagctgtttccgtcgctggcgctggggcgcaccgagatcgtgccggtctgcgcggtcgatgaggcaggccggccgctgttcgatccggatagcggccagagcgtgccgctgctggcctacagcgccggcgcctcgctggggcgctcggtgaatctgctgctgcgccaacgggggctacgctcatcgaccgtgtacgaaacggcgatggccgacagcctgaaaagcatggccatgcaacggctggggctggcctgggtgccacggctttcggtgaccgcagagctggagcgcggcgaactggtgatctgcggcggcgagcactggcgggtgccgttggagatacgcctgtatcgctgcgcattggtgcgcaaggcgccggtacggctgctctggcgcaagctggaaagcggcgcggggcagtgggcggaggctgtaaccgccggctgagacccggacgcgcgttcgcgcgtccgggcgtggcgtcacatgcccagcacgatgcgtccttcgatggccccggcgcgcatctggtcgaatatccggttgatgtcgtccagcttgccgtggtggatggttgccttgaccagcccttcggcggcgaagtccaacgcctcctgcaggtccgcgcgggtgccgacgatggagccggtgatgctgatggctttgagcaccacatcgaagatcggcgtcgggaagtcgcctggcggcaggccgaccagggcgacggtgccgtgccgccgggccatgccgatggcctgaccgaaggcgctgttggacacggcggtcaccagcacgccgtgggcaccgccaatgtcgcgctggatcacggcgaccgggtcctcatggcgcgcgttgaccgtcaggctggcgccgagcgtgcgggccagctccagcttggcgtcgtcgacgtccacggcggctacgtgcaggcccatggccttggcgtattgcacggccacgtgaccgagcccgccgatgccggaaatcaccacccactggcccggacgggcgttggtgatcttcaggcccttgtacacggtgacgccggcgcagaggatcggcgcgatttcatcgaacgccacctgcttgggcaggatgccgacatagtcgggatcggccagcacgtactcggcgtagccgccgttgaccgagtaaccagtgttctgctgctcggtgcagagcgtttcccagccggtcaggcagtgctcgcaacagccgcaggccgtatacagccagggcacgccgacccgatcgccttccttgacgcgggtgacgccgctgccaacggcggccacatagccgacgccctcatgaccgggaatgaacggcagcgacgggcgcaccggccagtcgccctcgacggcgtgcaggtcggtgtgacacacaccgcaggcctcgatcttgactaggatctgccctgggccgggcagtggcaccttgacttcctcgatgcgcaacggctcgccgaaggcatgtgccacggcggctttcatggtctggttcatggggaatctcctttgcctcgggagccgccagtctgcgccgcggccgtgctcccacaattgacgccgagcaattcccgctgcgatcgacaagggggccggacacacggtcgcgggtgccggcggacgggggcttgcgctatactgcgcggccttcggtcggaccggttccggccatgtacctgcacggccgcgctgttttcagcgcggccgttgttcctgatgcgccggcaggcgccgaagagaggcacgacgatgaccgcactggtaggcgtgatcatgggctccaagtccgactggtccaccttgagccacaccgcagacatgctggagaagctcggcattccgcacgaagtcaccgtggtgtccgcgcaccgcacacccgatctgttgttccagtacgccgaacaggccgaagcgcgcggcttgcgcgtgatcatcgccggcgctggcggcgccgctcacctgccgggcatgtgcgcggccaagacgcacctgccggtactcggcgtgccggtgcagtcgtcgatgctctcgggtgtggattcgctgttgtcgatcgtgcagatgccggccggtgtgccggtcgccaccctggccatcggcaaggcgggcgcggtcaacgcggcgctgctctcggccagcatcctcggccatgaattccccgaatatcacgccgcgctgaaggcattccgcgacgaacagacccagaccgtgctcgacaacccggacccgagggacgcgtaaatgaagatcggcgtaatcggtggcggccagctgggccgcatgctcgccttggcggggaccccgctggggatgaacttcgccttcctcgatcctgccccggacgcctgcgccgccgccctcggcgaacacctgcgggcggactacagcgatcaggatcacctgcgccagctggccgacgaggtcgacctggtgaccttcgagttcgaaagcgtgccggccgagaccgtcgccttcctgtcgcagttcgtgccggtctacccgagcgccgaggcgctgcgtatcgcccgcgaccgctggttcgaaaagtccatgttcaaggacctcggtatccccacgccggagtttgccgatatccagtcccaggccgacctcgacgccgccgcggccagcatcggcctgccggccgtactcaagacgcgtaccctgggctacgacggcaaggggcagaaggtcctgcgcaaaccggccgatgtcgccaatgccttcgccgagctgggcagcgtgccctgcatcctggaaggcttcgtgcccttcagtggcgaggtctcgctgatcgccgttcggggccgtgacggcgagacctgcttctacccgctggtccacaacacccatgaagccggcatcctgcggttgtcggtggccagcagcaatcatccactgcaggcgctggccgaggactatgtcggtcgcgtgctcaagcagctcgactacgtcggcgtgctggccttcgagttcttcgaagtcgacggtggcctgaaggccaacgagatcgcgccgcgggtgcacaactccggtcactggaccatcgaaggcgccgaatgcagccagttcgaaaaccatctgcgcgccgtaaccggcctgccgctgggctcgacggccaagctgggcgagagcgcgatgatcaatttcattggtgaagtgcccgcggtcgagaaggtgatcgccatcgaggactgccacctgcaccactacggcaaggcgttcaaggccggtcgcaaggtcggccacgccacgctgcgctgcccggatcgggccacgctggaccggcagatcacggctgtcgagtcactgatcggccgcgattgatcctccgatcgtctggcttgatcgaatcgctggcgaactggctagctcgcctcctgtccgagaatacgtaacgcatattttcggacttgaggagatcgccaatgggcatcatcggaaccatcatcatcggcctgatcgtaggcctcatcgcacgcttcctgaagcccggcaacgacagcatgggctggatcatgaccatcctgctgggtatcggcggctcgctgctggccacttacggcggccaggctctgggcctctacgaggcgggcgagggtgcaggctttatcggtgcggtggtcggtgcgatcatcctgctggtgatctacggcatggtgaccagccgtaagcactgacccgtacggggccgcgccctgttgcggccccgttccctcagcacttggttctcatgcgcccgctatttctattcctgttgctgtctttcaccccgttgcttcacgccgccccggctgaactcgactggctcgagctgatgcccgcggaggatcgcaaggcgctggaggagatgccggaaatcgagcacgactctccagaatcccgtggtttcagtgaccagggagggctcaaacaggacgcggggctgcccgcggtgatgtattcggccaagaccgtcccgtcgctggcgggcaagcaggttcgcctcggcggctatccggtcccgcttgagaccgacgcacaggggcgtagtaccgaattcttcctggtgccctatcccggcgcctgtatccacgtgccgccgccaccgcccaatcagatcgtgatggtccgctatccgcaggggatcacccttgacgatatctatgctccgctctgggtggacggcaggttgcagatcgagtcggtcagcaacgacatggctgacgccgcctatgtgatcgcggcggaccaggtggcagtggtcgatgaaagcgacctctgagcggcggccggcctcggctaagctcgatcaggccgagcgtgaggctttccgcgcgctggcggccaggaccgacggcatcgacgtcgaggtctaccggaaattcgacaaggatccgctggagcccatcgttggccttggccgcgtcgatgcgcccatcgccttcttcgggcgcgaccccggccgcgaggaagttcgccacggtgagccgttcatcggcgcgggcgggcaattggtgcgccgcgtgctctaccggcatctgcatggcgaagacatgccggatttcgaggctggccgcgcgcttggccacgaattcttctgggtcaacacggtgccctacaagccgctgggcaatcgtgcctggtcgatggcggtcaaacggcgcttccagccactcatgcaacagctgctgatcgacaactggcagggccgcgacatcgtcacgcttggccgcgaggccttcctctggttcggcctggcgcaggagcgcgaggtgcgccagcggctcgaggcgttctggcgtcgggacgagcgcttcaccgagtacttcgagatcgagctggcgacggaacagggcgctgcgcgggcgtttcgtctgtatccgttgccgcatccctcgccgcgtaatcgcacctggttcgaccggtttccggcccttctcgaggcgcgtttgcagcagctgctgggttgagcggttcaggcatcggtacccagttggcgtatgaagccgcggtcgatacggtccttccagtaccccagccacctgccatcggccgccagggaggcccagctcagcagggcgccgcggtgcccatccgccagcagtgcgaggcagtgggactgaggatgataatggcgcagcgactggccgatcgctgccctgccgaggttggtggcgagcaccgccgcctgacgtaccgcatgcacgccgttgcgctcggcgcccggcagactggcgcaatcgccactggcgaacacgtgcggatgcgagcggctttgcagcgccggggtgacttcgatgaagccacgagcatccaggcgcagaccggaatcgcgcagccagtcgatggggttgggccccgtggcgacgaccagccgccggcctcgccagcggatctggccgtcaccgatcagggtattgccgtgcaccgcctggatcggcgtctgttcgtgtacctggactctggccgcttgcagatgtcgcagcgccaggcggcgcaggcgcggcgggtgtccggcaagcaggtcgctcgcggtgaacaggtggactgccggtagccgttcggccatcgccaaggccagttctacgccggctgcaccgccaccgaggatggccaccgcctccggcgtttcctgccattgctgccagcggcgaatgaaatcggcaaagggcttgaccgagagcagctccatgccgtcacccgattgctcgggcagccagggcaacgagcccaggttgagcgacatccaggtgctgcgcagggtctcgccggtagccaggagcaactcgggcgcttcgggcagcagcgcgaccatcgtgccctggatgaattccacttccgcggcggcgcacagcttgggcagtgcgacgcggcattggcggagctgatagtgctcagcgatcagcccgggcatcatgcccgaataccaggcgtgtggctcggccgagaccaggccgatgcgacctaccgggcgttcgcggctggcccactggcgcagtgcgccgaggtggctgtggccggcgccggccagcagcagatcgaagtcattgttcatgacgcatcagtgcggtgctgatgcaggcagggggcgggttggctgggggcgtcagcgtggcttccatgacaagagtcctccagagcaatgcaaccggcaggcagggcagcaccgcttgccaccggctggccgcgcggcgaggagtgcccgtgttgcagtatagattcgatacgcctggacgcctgactctcttcgctcggcgggagcgacacggaggggcgctacagggcttcgacgccgatcgccacgctcaggctgtggcgggctcccgcttccagtacgaccatatcctccatcacgttggccgtttcgatgcagagcatgcgctgccaggcgtcgtcggcgaattgcgacagacgtcgggacttgtcgatccaggggttccacagcacggccgagcgcgaaccccgggtttccaggatgattcggcggccaaggcccgtatcgcgcaggcatagcactggcggcaggtcgaggtagatgcggtcggtttcactgtcgaagcgcaaatcgccgtcttgctggcgtcgctgccaagcttccagggtctcgatataggggcggccgtcgaggccttctaccgcgacctgttgaatgtcgctgatggcgaagtagctgtgcagcgcctggctcagcgcgacagccgtcgggccctggttatggctgctcaacgtcaggtgcagacgctcgtccaggcggatctgcaggctcagttcgaccgcatgcggccagccgggaagactgccggtgtcacaggtgaattccagtgtggcgctgtcgctgtcgctacgcgtgtcccgcagctgccagtcgatgttgcgtaccagcccgtgcgccggcgcgggggcgctgccctggtaggcattgcgcaccggctccgggttgcgcgccaggtcgccgaaccagggccagcacaccggcactccgccgcgcaccgcctgaccgcgctcgaaggcggcgtcttcgctgagccagatgatcggtgcatcgccgtggcggtagctgagcacttgcgcgccctgttcggcgacgagcacttcggccgctccattgcggatgcgccagcaggcgagttgatccagttctatgcgttggatgtcgacggacatggctgttctcgtaggcaagggagatcgggcgttctgactcggctggcgctgcaggatcccgccgccggggcgaaatcgtgtcacgggtggtttcgctagagcggacgatgcccggcgcctgcgcggcccgggctcggctcgttgcggcgcttagcgcccctggcaggcgtccacgcgcagccagcgctccagcagtttgaagccctgcatgagcacgaaggcgatgaccagatagatcaggcccgcggtgaggaacatttcttcgtgcatgtaggtgcgcgccgcgatcttgcgcgccatgccggtcagctccagcagcgtgatggtactggccagcgcactggccttgagcatcaggatcacttcgttgctgtaggcgggcaggccgatgcgcgccgcccgtggcaggatgatgtgccacagcgcctggcgcctggacatgccgagcgcacgcgccgcttcgatttccccggctggcacgttctgaatcgcgccacgcagaatctcggctatgtacgctgcggtatgcagggtcatggtgatgatcgcgcaccagtaggggtcacgcaggtacggccagagcgcactctggcgcaccacctcgaactgcgccatgccgtaatagacgaggaacagctgcaccagcagcggcgtgccgcgaaagaagaagatgtatccgtaaggcagtgcgcgtatcgccagaatacgcgacgagcgcgcgatgcccagcggcagcgccaggatcaatccggcaacgaccgaaacgccgaccagctgcagtgtcagccaggcaccttccataaagctcggtagccacttgatgaacaggtcccagctcatgcggcactcctggcgaagccgcggccggcgcgtttttcgagaaagtacatggcggtcatggcgatgacggtcaggcccaggtagatgaaggccgcgacgaggaagaaggtgaagggctccttgctggcggtcacggcgatctgcgagctgcgcatgatctcctcgagaccgatcaccgataccagcgcggtgtccttcatcaggatcatgaacaggttgcccaggccgggcagggccaggcgccacatctgcggcaggatcagccgcagaaagatccgccgcttgcccaggccgagcgccaggccggcttcccgatgccccttgggaatcgccagcagcgcgccgcggaagacttccgtggcataggcgccgaagcacaggccgagggcgatggtgccggccgcgaacgggttgagggccagattggctatgccgaaaatctcaccgatgccccgcaccaggccaatggtgccgaaatagatcagcagtacccagagcagttcgggtacgccacgaacgatggtcgaataggtgccgccgagccagcgcagggcgacatagggtgaggtcttggcaagcgcgccgagcaggccgagcaccagccccagcgtgagggatgcaagggccagctgaatggtcatccaggtgccggcggccagcgccggaccgaatccatgaaggtcgggaatcatatgggctcaaacaccaaagcccgacctgccagattggcggccgggctttgattcagacaaatcaataaatgtcgaaagggaagtacttggcgttcagtttctcgtaggtgccatcggcccggatttccgccagcgccttgttcagcttctggcgcagctcgtcgttgcccttgcgcaccgcgatggcgatcttgtcgttgtcgaacaccggcttgcccttgaattcgaagttcttgccggcatcgctcttgagccattcccactgcacgaacgagtcggccaggatgccgtcgacgcggcccgaggccagatcgaggtaggcgttttcctgggtgtcgtagagcttgatgtcgacgacgccgtccatgttgtcttccagccaggtgccggcgatggtggcccgctgggcaccgatcgtcttgcctttgaggtagctctcgtcggtcttgaagtcgacggacttgggtgccacgaactgcagcttgttcgtgtagtagtggtcggtgaagtcgacggcctgcttgcgctcttcggtgaccgacatggaggcggcgaggaaatcgaacttgccggcgttcagggcgggaatgatgccgtcccagtcggaggtcaccacttcgcactcaacttccatcttggcgcagagggcgtgggcgatatccaggtcgaagccgactacctggccgctggcgtcgatcaggttgaacggagggtaggcgccctcggtgccgatgcgcagcttgtcggcggcaaaggcgttggcgccgagcatcagggtggcggcggcggtcagcagaatcttcttatagcttttcattcggtgttgctccattagcggtggctggacatgaactgtttacagcgtgccgattgggggttgtcgaacacctgctccggcgttccttgctcttcgatcaggccctgatggaggaaaaccacctcactggaaacctgtttggcgaagttcatttcatgggtgaccagcaacatggtccgaccctcatcggccaatgacctgatcacggcaagcacttcttgtaccatttccgggtcgagcgccgaagtcggctcgtcgaacaggatgacctgaggctgcatcgccagggtgcgggcgatggcggcgcgttgctgctggccgccggagagctggttgggatagacatgccgcttgtcggcgatgccgaccttggccagcagcgcttcggcggtttcgacggcttcggccttgctctggcccagcacgcggcgaggcgcttcgatgatgttgtcgagcacgctcatgtgcggccagaggttgaaattctggaacacgaaaccgagcttgctgcgcatcaggttgatctgcttgccatcggccgccaccagatcgccgtctttggcgcgcttgagacgtagcgattcgccggcgacgagaatttcgccttcgttggggttttccagcagattgatgcagcgcaggaaggtcgattttccggagccggacgaaccgagtatggaaatcacatcgccgtcgcgcgctgtcagcgagatgcccttgagtacttccagatcgccgtagcgcttgtgcaggttgcggatttccagtgctgggatggcctcggccattgagcttcctcttctcggaccagggcgttgcgtggtccttctctgtgtaaattgcgctccggccgactgctcgccttcctggcgaggcgcaaacctagcatgggctggggcatgcgccaagccgaggtttgtgaccggtcggtcaccggcggcgagccgatggctttgcccttctatgtatagatgaatttgccgacctcggtcgaaatccctgcacgaagccgcagccgggctccgcgcagaatgcgcttatggttgctcgggttttggcaggtccggatcgctgcccagcatctcgtcgtgctcctgcatccgccacggcaggctgccgggagagatgtgcaggaaatgcaggtatttctcgaactggtcgaggatgtcgctgatgatgtcctgctggccgtagccatagatatcgtaatgctgcccgccgcggcgcaggaatacctcggcgcggtagtactgctcatcggcgtccggcccctccgagagggcgaaggcgggcatcgcgtagccgaccatgcgaatctcgtagatgaagtccagctggtcctccttgacgacttccaggtagacccgggcgttggcctcgtcgctgtgcacctcggcgttccagccctgcccgccgagctcacgctgcacccggcgcatggccttgagcacggtgctgcccatgaagtcctcgacctgttcgtggtccgggaagctgaccagcccggcgaggcgcttcttccacagcccgggccctgcattgctggccaggcgcgtgctctgcatatggttctgcaggctggtttcgtggtgcccttcgatcaccagcgcgcgccacatgcccagcgccgcgatcagcatgatgatggcgaacggcagggcgctggcgatggtcatggtctgcaatgcgcttagaccaccggcgagcaacagcgtcgccgccaccacgccctcggcggaggcccagaacacgcgctgccagaccggcgtatggctcgcgccgcctgcggccagggaatcgatgaccagggaaccggaatccgaagaggtgacgaagaaggtgatgatcagcagcaccgccaggaacgaggcgatggaggtcatgggtagcagttcgaacagcttgaacagtgcgatcgcattgtccgcctggacgtcggcgatcaatgaggtgtagccctcgaccatgatcaggtgcagagcggtatcgccgaataccgagaaccagagaaaggtgaagatggtcggcacgaacatcacaccgaagacgaactggcgaatcgtccggccgcggctgatcttggcgatgaacagcccgacgaagggcgaccaggcgatggtccaaccgaagatgaacagcgtccagttgccgatccagtcgctgcgcgaataggcctgcagattgaaggtgcgctcgatgatgttgttcaggtagctgccggtgttctgcagaaaggtttcgaggatgaaaatgctcggtccgaccaggaacacgaacagcatcagaccgatcgccaggatcatgttcagcagcgacaggttcttcacgcccttgtccagcccggccaccaccgagcagatggccagcgcggtgatgatggcgatcgcgatgatctgcacgccgatactcacgggaatgtcaggccacaggtagttgatgccggcattgatctgagtgaccgacaggcccagcgtggtcgcgatgccgaacagtgtgccgagaatggcgaagacgtccaccacatggccgatcggcccgtggatgcgctcgccgatgatcggatacagcgccgagcgcatggacaggggcaggccatggcggaacgagaagtaggccagcaccaggccggtcaggccgtagatcgcccagatgtggaagccccagtgaaagaaggcgatctgcatcgcctgcttggccgagtccacggtctgtgcggcgccagcgggtggcgaggcgtaatgcaataccggctcggcgacgccgaagaacagcagcgcgatgccgtagccggccgagaacagcatggcgaaccaggcgggaaagctgtattgcggctccgcgtggtcggggccgagcttgatgctgccccagggcgtcatcgcgatgccgacgatgaataccaggaagaacgccaccgacagcatgtagaaccagccgaagttggtggtgatgaaggccagcgtcgcgctgaaaacctcgccggcaaggtccgggttgctgatcgtgccgaccaccagcagcagcgtgacgaccactgcagggatgaacaccggaaacaggatgatggctcgtggcagcttcttgtcggcttccatgtgtcgttctggcctctgttttgcgagtggggcggacgcgcggtggctcccgaaggcgtggcggcgaataagggatagacgaccgtttgcggcgaaatgctcacgccgctttgaatcgtcacgagaaaaacaacgctcgccatgaccgcgcaggcggatcgacctgcaggcagcggtgctggcaaatgcttgccggaccgagcgcttcgtcgccagccaaccgcttcagtacgccggttccatctgatgctggcgcaggatggcgggcaccgtgccgtcggctatcgcctcgtccagggcacgttcgaatgcgctgaactcatcctcgctcacggtcttgcgcgacagcccgatgccgtaggtgatcggtcccagctcgcccgcctcgcgcaagccatcgagctgctcgtcttcgatcaggtgccaggccacgtcctcgttgagcaccgccaggccttccggtccgaagcgcccggactgcagcatgcgtaacaggcggcggttgtcggcggtcagatgcaggcgcacgtcgggcaccgccttgaggcgttcggaaagggtataggacgtcccggagggaccgtagacaccgatcagccgtccggccaggtcgcttggctggtgatagacgaaggcactgtcctcgtgggcgaagacgctgtaacgagaggtcaccagcatgcggctgatatgaaacagctgttcgcgcttgggtgatcgcaccagggtgaagatgccgtcggcctgaccttgctcggccaatagcagcgcgcgtcgccaggggtacagcgtaatcgtgcagtcctgctgcaagcgcagacaaaccgcctgcacgatctcaaccagggggccctcggctccgtcgctggaagagcgtttggccggataggtgaacggtgggaagtcctctgtcacgaagtgccagggcgctgcactggccgtgacggtggcgagcgatagccagatcacgaggatcgagagagtcttctgcactgcatggctccttgcgtcttgttcggccgtccctggcggtcgcggcgcggtcatctggcatccacgccatcacgcagctatcagcctagccgagaattaagtcaaagcggccagagcgggccgagacttaaccagcagatctaccagaacgctttgagcaacaggcgcagcgccgcgggagcccagctcagggtcagcgccaggctgaccgccgcggcgctgaccagaagcagccagaggagcgtgccgaagccaccgccctgtgcagcgagcagcattgccagggctagcgacaggcacagcgtcgtgcagagtcttcgggtccattggccggtcgcattggccgggcatgcctgtggatcgacccgcttgcgttgcgccgcctggcaaagagctaacagcgcgaaggccagatagcacagcccaaatgcgcaaagggtaccgagccactcaggcacgctggcgctcctcgcgggccggttgccggtccggttcggctgtcggatcggcctgccgaatgcggtgtgccgccagcaggcagaagccggcgagcgccagcagcatcaggtccatgccggcgatggcggtatggcctgcggtcaggctgcgcagcagatgttcaccagtgctgagggcgttcagcagcacggcgctcaccgccagcacggcggcgaattgcagctgcctgcgccaggcgtgttgcgggtgtagcgccgcatgtatcagcgcaagcagccagctcaggtagaacgcccagccctcgagcgccgcacgccggttgccgtctgccaggccgtccattggtagcagacgattgacgacgaagaaggtcagcgtcgcgatgatcagcccggcgccagcggttacgctcagggcatgcaccagccgcgcgccgagccgtccttggcgtgcgtgtctggcctgccgcgagccggtccagaacagcaggccggtgccgatcagtacgcagccactcatgccgccagcaaagtacagccagcgcagcgtccagtgctcgaactgaacgaaatgcagtcccgtcaggaagcgctggatcccggcgaccggggctgtcgagtgctgattcaacagcgcgccggtggtgccgtcgaaggtctgccgatcggcattcatcgtcacctcgtcggcgaaggcgcggcgtacctcgacgtaggcgttgcggtcaccggggtgccagacacggaccagatacgcctcacctggcctgccatctgcactccagcgcgccctggcagctgccagcatggcatccagcgacgcgagcccggcgttcgagccggttgccggacgcgagtagttgcccagcgcttcgatctggtgctgggccttgccctcgggatagagcgcctgggtgatccccgggaagtagatcagatagaagatgatcagcccggacagactgatgatgaaatgaaacggcagcaccagcacaccggtcaggttgtgcagatccagcaggctgcgctgcagtcgcttgtgtgggcgaaaggtgaagaactcggcgaacagcttgcggtgcgccaccacgccggagaccagcagcaccagcatccccatcccggccatgccgaccagccagtagccgatgttgcgccagcccaggtgcaggctgaagtgaaaggggaagatgaaccgggtcgcgccccagctgccctgctcggcgatcagttcgccagtacgcggatcgatgtagcggcgcacggcaccttgctgcggatcttgataatcgaactgcagcgtcggtgcgcgcggcgtcggcaggctgaacgtccagaccggtgcgtcggccgccagacgttgggcgtggggcagggcgagccggtcgagcgatacctgcgcgggtggtgtcgccaggcgtgtaccgggctgcatccagcggtcgatttcccgatcgaacaccgacagcgaaccggtccagaagatggccagcagcagcccgccgagcagcaccccggcccaggtgtgcagccagctcatcgattggcgaaagcctttgccgggtgccatctcagccctcgaccagtgacggagccagtccgtatcgcaacgcaagacctatcgcgataccggcgatcagcgtcgtccagacccgccagaccctgggctcggaaaagctccataacagcaacgtgaggtacaggatgaaccccagcatggcggtcaatatcaccgcctcgctacgcgccatgccgccggccagcaccagcaggtgggcgccggccgaggccagcgccaccgtacaggcataaccaccgccaatggccgcgacgacgcgcagcacaaggctgcttcgccggatccaggggcggttgggtagaacgtcgcgcttcattgcggctgcgtacctttagaaactgacctggtagccgagcgtaagggtgcgcccgcgaccgttgaacacccgtccatcacgggtgactttcgagccggtgttggcggcctgcgagtagtaggtcaggtaatcctcattcatcaggttctcgaccccgacgctgacctctccgagcggcaggcggtagcccaagtaggcatccaccagggtgtagccctcgaactccagtccgggcgtgtcgaagtcacggctggcatagtgattggcctgtagcaggctgtgcagcctgtcggtccagttggcttgccagctggcgccgtagcggtcgggcgatatgttcgcgccattgaggtcggtatcgaccttgccgtcgccatcggtatcggaacggccatcgacctgggcgtacatcagcttcaggcgatgcgcgtcattgacctgccagccaccggtgaattcgataccgtcgatttcggtacgctcgcgacggatctggtagaccccacccacgctgtccaggcgagaaccgagatcggcgtcggattcgtaatagctgatctccgcgtcgaacgggccgtggttcaggcgaaagccgatctcgcggttttcggtgaccaccggttgcaggtcgaggaaattgtcgacgctggtgtttggttcgccgatcccgcgcagcacacgaccgacatccggcatgccgaatccttcggaatagttggcgaacagttgcacccaatcggtcatctgccagacaacgccggcgttgtagagggtttcctcgaaggtcggattgccgccttcgacgtccacgccgccgagcgccggattggtcgatgcgatggtcctgaaactctcgacgtccagatcggcgaactcatgacgcacgccggcaaagaaggtcaggtcttcgatcgcgcgaatctcggcctgcagaaagggcgcgtaattgcggaacaccgtctccggcacccattcacgatcggtgagaatcagctgctggctggtggtgtcctgcagcacgtcgaggccgccggtgagcatcagatggttgtcgagcaaaccgtcacggctgagcgtcagcttgccgccaatcttgtccgactcgttctgcgactggtcgaacagcgtgccgaccggtgcgatgttggcatcctggaaagtgccattcgttcccccgccgaagcgaccgcgaaagcgctgggtatagagttgcagacccagttcattgccgtacagatcggcatgcttgtaggacaggctggtggccagcacttcgttctgcggcgccttgccctgcggatcgcccttgcgtgaggtcgccggtatatcggcatcggcgtcaccgggtacgttgacgtactcatgctcgccctcgacctggtagcgattgaccatcaggccgatgttctggttgtcgtcgagccagtagccgagcttgagcagcagatcggtgctggtcgagtccattacgtcgccctgggtatcgtcgacgccgatcaggtcgccgttggcgtcgtagaacatgccctgggtctgccagctggtaccgacgaggtagtcgaagttgccttgggtgccctcgacgcgatagtcgagcttgtagccgaacccttcggactcgtaatcggtgggggcggtaacgctgaccccggcgtgctggcgcagggtcccgctctcgggacggcgggtcacgtagttgatgatgccgccggtcgcgcccagtccatgctcggcgctggcaccgtggatgacctcgatgcgctcgaccatggagagatcgatggtgtagccgtcgcgctggctgtcacgcaacggtgtcgattgcggcacgccatcgatgaggatcagcgccgagcggccgcgaaacgtctcgccggcactgctcatcttctgccgactcggtgagtaggacggaatcaggttgctcagcaccgcgccgtggtccgaggtgatcgccagttgctgttcgatctgctcgcgactgatcaccgtgatcttttgcggcgttttgccggcctcgctcctggcgcgagttgcgctgatggttaccgcttctagctccgttgtctcctcagccagggctggcatggatgacaaggataaggatgcaagcgaaatggacaggcacagacaggatttgcgaaacacgaggcgctcccgatgttggtgttgttgggaaatcggggcgggaatgtaaactaaatgaaaacaatttgcatttcatttgtgtttcatggtgctgcgcagctattgctgcagttttgcggtgctctgggctgggcctggcggaggcgggcggggtacgacggcagcagaggatgcgagctttcgctcggagtcaggcgagcacgcgcacacagccgtgccggcgcgtagcaattgatatgagcgagtcgttcgatgtgcaggagcgcgagctggcaggctgcagcgagccatgaagtgcggcgatgcgccatcgcgacgatggcttcgatgagcaacgagcagaaagcaaaaaggcccaccacttgggtgagcctttttcggtattagtggtgcccagggacggaatcgaaccgccgacacggggattttcaatcccctgctctaccgactgagctacctgggcaacggggcgctattagacggatttggcttttgcctgtcaagcgcggtcgggaaaaatatttagtcagaacgggcgtttagcgttgtgacgtatcgtttgcgagcgtttccgtgtcgatgacacatggtggaagcgagccttgcgcagggcgggacccgcttcgatggcagatcactcgctcggcgggacgtagccttcggcctgcgcgtaatcctcgcctgagaaaaacttgtccatctcggcctggaggaacttgcggtcctcggcgttcatcatgttcagccggcgttcgttgatcagcatggtctgatgcttctgccagtcgtcccaggccttcttcgatacgttgttatagatgtcttcgcccttcgggcccggatagggtgggcggtccaggcctggcagtggctctttgtacttgcggcagttcacggtgcgggtcatgacatctctcctgcgttcagttcgacggcggcgcgcttgagcagcgtcttcaccggggcggcgagccccagtcgcggcggggtggcgaggttataccagagccagtctggctcggccacggcgtcgcgcgtggacttgactctgatcagccagggctcgatggccagctggaagtggctgaaggtgtgggtcaggcccggtagctgccggtgttgttgcagctccagggcgtggcgttcggcgagtgggtcgagtgcggccagatcttccagttccggcaggctccagaggccgccccacagtccggtggaagggcggcgataaagcaggatggcgccttcgtgattggccagcagcggcatcagcgtgcgcttctggggtaacgccttgcgcggcttgggcgctgggtaatccgtttcgcgaccgagtagatgcgcccggcagccagccttcagcgggcagagaaggcagctgggtttgctgcgcgtgcaaagcgtcgcaccgagatccatcattgcctgggtgtaatgattgacgcgtgtttgcggagtcagacgctcggccacgtcccagagttgtctggccactttcggttcgcctggatagccatcctgggcgacatagcgggccagtacgcgcttgacgttgccgtcgaggatcggtgcacgcagccccatgctgaggctggcgatggcgccggcagtggagcggccgatacccggcagttcggcgaggcgctcgacgcaccgtgggaattcgccgccgtgctcggcgacgaccagcttggcggtcttgtgcagattacgcgcgcggctgtagtagccgaggccggtccacagatgcagcacttcgtcttcggccgcaccggccagggcttcgaccgtcggcagggcatccatgaaacggtcgaagtagccgagcacggtgctgacctgggtctgttgcagcatgatctccgagacccagacccggtatggcgtaatggcctgctgccagggcagatccttgcggccgtgtcggtcgtaccaatcgagaacggctacgccgaactgttcgtcgctcatggctggccggttcatcgcttgaacaggcccttgagtgcgtctttcaattcagggctgaccttatcgcccagtttctcctcgatcttctcgttgagcttttcgcctgcgagcctggcggcgatcttgccgaggccgtccttgtcgaagcgacaggccttggcgcccagctccagcggaccgcggcagcgcagcggccattcaatgccgacgtagcgctcgttgaccgagcaggccggatcgggcatgtcgcccttgtcgccttcgatgacgatgccgacgcggtagtccatgccgagtacccgcaaatcgagatcaccgttgccgttcaccgtcaggccgggaatgctggccttcagatccgggttgctggcgaccccgtcgcgcagggtcagattgcccttgagctcgcggaacggtgtgtccttgctgcgtggttcaccggccagcggcttacggttgagtgtggcaatggcatggcagagctgctgctcgagattggcgtcgaccagcacgccgttgtcgacgatgaagccgatcttgccgttgaggttatcgatccacgccttctcgctgttgccctggctgcgcagatcggcatcgaggttcatcaggcccttgatcaccaccttttcgccctggctttgcagcaggcgttcgaccgggacgcgcgcgaggcgagtctgactggtcagcagcggcaccggcggtcggacgtcgaggctggccgaggcttccaggcgtccgttgtacaggcctgcgcgcagctcctccagtgtcaggaggccgccagcgctgcgtgccctcagcgcgaagctgtcgagtggtagtttcatcgccgtgaggctgccgatgtccagtttgatctgcgtgtcgaggctgcgcagcgcattgaccggcagcatttgcgcgtcgctccaggcgtgctgggtcggcttgtctggcagcggcgtggtgccactgccgaccgccgcggcttcggtggtttcgacttcgctcttgcgtgccgtgtcggcggaggcctgcttggccgggggcggcaggtagcgatcgagattcagctggtcgcccttgagttcggctcgcagggcctgcttggcgaagtcgctgaccgcgatgcgcccggtgaaggcgctgtcgtccagtttcaggttgaggtcttcaaggctcaggctggtcgagctgccgtcgattcgggtgaccagttctaccttgctcagcgcggtgctatcagccatgggtgggagctgctggccgaggttgtcgaggaactcacgcaggttgaacgcggcgatggtcagggtgccggcgagctttggttggtcctgcacgtcgcgcactttcagctcgcccagcccacgcagttgattggcggtgaacttgaggctggtccattcggcgatgtcggccgccagatcggccagcaattgcccttgggcgctgaacgagagggtctttccttgcagcggctcgccggaagcctcgccgctcaggcgcaggtcctcgagctggtagcgctgcagtttgctgtcgaagcgcagcgaaccctgcaattcggtccgtgcgcgcatcactggcttattgctgccgaagaaggcgttgagtttgaccggaatcgaggtggcttcacgaatggcacccgtggtcagctcgatgccctcggcgctgaactgctggccgctttgcacatcgtgataagccacccgggcatcgctaatggtcaggctgtcgatatccagctgcagtgggcgccgagggctggcgtccggggtttcggtggcgggtttgctcggctcggctgccgtcgtgtcgtcgggctgcgcctgtttgtcgctgggccggccgacaccttcccagttgcctcggcccttttcgtcgcgggtcagggtcaggttgaggccgttgagggtgatgtcgctcatctgcacttcacggctgaacagtggcagcacgcggacggagaggccgagcatgcgcaggtcggcgaatggctgttcgggcgtccgcacgctggccagcgtggtgtcgtgcagttccaggcctagccaggggaacaggctccagccgatgtcaccgccgatatccagctcgagaccggctttgtcgcgggcaagctcgcggatttcgtccttatagtcgttggggtcgaacaggtgtgtcagggcaaagcccaatgcgacgatgaggagcagcaacccgaggattaccaggcccagaatcttgccgagcgctttcatggacaggtcctttgttttggtatttcaaaagcagcgagtatagcgtcacgaaccgcggcttcgccgcggtgggcgttggagtggcggctggcgtcggggttcctgccgcccgccccgtcgcgtcggacaggcatcgccgaacgaggtgctagatcgggtccagcggcaggtgcgtccgtgcggccagggcctgcgcctcgagctgttcgagcggtgctgccaggtgcagcttcgtccccgcttcgccagccaggcgctggctttcctcgaggattcgtctgcccacaccgcggcggcgggtgacctgacgcacgcaaaggtgcgacagccgccagtggttcgcgccgcgttgcagcagggcggcaccgagcaggcgatcgttgaagcggccggcgatcagactgcgctcggtcaatcccgcctcgatcagggcggtggcatcggcgtaaggtgccagtagccaggctggggcatcggcaaagattttcgccagatcgatacggtcctgctggctcggctcggttatgtgttcgatagatacgggcatgctgacctgatgcgctgtgtgttcgccggcaagcataaccgtgccggcgtgtcggcgcacgaggctgcaccgccgctcggccaccattcgcttgtacgtcggcgggcgtgccgggcagatatccccctggcagggtttgcgcctataatgtccgcctttttcgccccacgatcagcggagctgttgatgtccgaacgtacggcttgcgtagagcgcaacaccctggaaacccaggtcaaggccaccatcaacctggacggcactggcaagagccgcttcgccatcggcgtgccttttctcgagcacatgctcgaccagatcgcccgtcacggtctgatcgatctcgacatcgagtgtcagggtgatctgcatatcgacgaccaccatacggtggaagacgtcggcatcaccctcggccaggccttcgccaaggctgtcggcgacaagaagggcatgactcgctacgggcattcctatgtgccgctggacgaagcgttgtcgcgcgtggtgatcgatttctccgggcggcctggactgcagatgcacgtcccctacacccgcgccaccgtcggcggcttcgatgtcgatctgttccaggaattcttccagggcttcgtcaaccacgccctggtcaccctgcacatcgacaacctgcgcgggcacaacactcatcaccagatcgaaaccgtgttcaaggcgttcggccgcgcgctgcgcatggccgtgacgctggacgagcgcatggccggtcagatgccttcgaccaagggttgcctctaatgcagaccgttgcagtcatcgattacggcatgggcaacctgcattcggttgccaaggcgctggagcacgtaggcgccggccgggtgttgatcaccagcgatgcgcaaatcattcgcgaggccgatcgcgtggtgtttcccggcgtcggcgcgattcgcgactgcatggccgaaattcgtcggctgggtttcgacgaactggtccgagaggtaagcgtcgatcggccgttcctcggtatctgcgtcggcatgcaggcgctgatggagcgcagcgaagagaatggcggtgtcgattgcatcggcctgtttcccggccaggtacgcttctttggcaaggatctgaccgaggacggcgagcggctgaaggtgccgcatatggggtggaacgaggtggagcaggtggtcagccatccgctgtggcacaacattcccgccgacggccgcttctatttcgtgcacagctactacgtcgaggcggctcagccgcggcaggtcgtcggccgtggtcggtacggcaagcctttcgccgcagcactggccgacggctcgcgcttcgccgtgcagttccaccccgaaaagagccatacccacggcctgcagctgctgcagaatttcgccgcctgggatgggcgctggtaatgagccgggccaagccaaaggcaccggtcctgacgctggattccgctcaggagcaggcggcgcaacagatcatcaagcgctttctggaagaccgtttcgagctagagcttggctcgttcgaggcgcaggaggtgcttgatctgttcgcgcgggaaatcgctccgctgtattacaacaaggcgatttccgatgtgcagacgcacctgaaggaaaggttcgagagcatcgaaagcgacttgtgggcgctcgagaagagctgacctttaaccgatacccgatttgaacaggttctagccatgctgattattcccgccatcgatctcaaggacggcgcctgcgtgcgtctgcgacagggactgatggacgacgcgacggtgttttccgatgatccggtggcgatggctgccaagtgggtcgaggccggttgccgtcgcctgcatctggtcgacctcaacggtgccttcgaagggcagccggtcaatggcgaggttgtcacggccatcgccaagcgctacccgaatctgccaatccagatcggcggtggcatccgttcgctggacaccatcgagcactatgttcgcgctggcgtcagctacgtgatcatcggcaccaaggcggtcaagcagccggagttcgtcggcgaagcgtgccgcgccttccccggcaaggtaatcgttggcctggacgcgaaggacggcttcgtcgccaccgacggctgggccgaagtcagcagcgtgcaggccgtcgatctggcgcgtcgtttcgaggctgacggcgtctcggcgatcgtctacacagacatcgccaaggacggcatgatgcagggctgtaacgtcgaggccaccgtagccctggccaatgccagccgcatcccggtgatcgcctctggcggcatccacaacatcggcgatatccagaagctgctcgataccaacgcacgcgggatcgtcggtgccataaccggccgtgcgatctacgagggcacgctcgatgtcgccgaagcgcaggcgctctgcgatctcaagtttaaagacgagtaggctgcaggctgcaggccgcaggcgacaggctgcttagcttttcgcctgtagcctgcagcttgcggcctgtagccctttcggagaaagtccaatggccctggccaaacgcatcatcccctgcctcgacgtggacaacggccgcgtggtcaagggcgtccagttcgaaaacatccgcgatgccggtgatccggtggaaatcgctcgacgctatgacgagcagggcgccgacgaaatcaccttcctcgacatcacggccagcgtcgacaaccgcgacaccacgctacataccgttgagcgcatggccagccaggtgtttatcccgctgaccgtaggcggcggtgtgcgcagcgtgcaggacatccgtaatctgctcaatgccggcgccgataaggtctcgattaacaccgccgcggtgttcaccccggagttcgtcggcgaggccgccgatcgtttcggctcgcaatgcatcgtcgtcgccatcgacgccaagcgcgtgtcgaggcccggcgagcccggccgctgggagattttcacccatggcggacgcaagccgaccggcctcgatgccgtgctctgggcgcagaagatggaggctttgggggccggcgagattctgctcaccagcatggatcaggacggcgtcaaaagcggctacgacctcggcgtgacgcgtgcgatcagcgaggccgtgcacatcccggtcatcgcttcgggtggagtcggcaatctgcagcacctggccgacggcatcctcgaaggcaaggccgatgcggtgctcgcggcgagcatctttcacttcggcgaatacaccgtgccggaagccaaggcctacatggccagctgcggcatcgtgatgcgctgaccgcacccggcaaagcgctcaatattcatcaggaacacagccgtggacacaccgcggctgccgcttcatcagggagtcaccatgctcaagaccacgctagtcgcgctggctgccagcctgtcgttgggggccggtgcagcacaggctgcttcggagccgatcaatctgctgacggagaacttcccgccttacaacatggcggtcgatggcaagaacttcgcccgggacgagcacatcaccgggatcgcggctgatatcgtccgggaaatgttcaagcgcgcccgggtcgactacacgttgacgctgcgcttcccgtgggagcggatctacaagatggcgctggagatgcccggctacggcgtattcgtcaccgcccggctacccgagcgggaagcgctattcaactgggtggggccgatcgggccggatgactgggtactgctggcgcgtgccgacagcggtatcgagctcagcagcctggagcaggccaggcagtaccgaatcggcgcctacaagggcgatgccatcggtgagcacctcgtggcgcaggggcttgagccctcgctggctttgcgcgatcagacaaacgtcgaaaagctgcaaaacgggtccatcgatctttgggcgacaggtgatcccgcagggcgctttctggctaagcagcagggcgtgaccgggctcaagcgagtgctgcgcttcgatagcgccgagctttatctggcgctgaacaagcaggtctccgacgagacggccaagaagcttcaggccgcgctggagcagatgcgcgcagacggcacgctggacagcattaccgggcgctatctctaagactggcgtcagcttggcaatggcagctggaacgcctgtggattgggggcgtttccagcaggcttgccgaccttcctctgcggtccaaatcgcccgctcgccacgcgaaggctcatgacgggctccgctcgcgcctgtaatggcgaaatactggctttgaaatgtgcgccccgtctcatttcgcggctggtcacgcggctttctcgctaccgattgctacacctaatgaagcgactgcgctcgacatctgtcggcgaacgtcgctctgagggtttttgcgcagttgggggtgtgatgagacggattctaatggccgggttgctgatgctgatggcagcgtcagtcagggcagctttgccggacgactacaaggtggtgctgctgaccgagaactttccgccgttcaatatggcagccgacggcaagaactatgcggccgagcgcaacatcagcggcatcaatgcggacatcgttcgcgagatgttcaagcgcgccggaatcgcctacagcatgacgctgcgtttcccttgggagcgcatctataaccaggtgctggagcagccggaccagggattgttttccaccacgtacacaccggagcgtgagccgctgttcaaatgggtcggaccgctcgccagcaccggctgggtgttgctggcaccgcccggcagttcgctgcgtttgagctcgctcgagcaggcgcagccctatcggatcggggcatacaagaacgacgcggtgagtcagcacctggaaagcaaaggcctggatccgatcaattcgctgcgtgaccaggaaaacatcggcaagctcctcaagggacgaatcgacctttgggcgacgaccgatccggtcggaccctacctggccaagcaggaaggggtgagtggactgacgacggttctgcgcttcaacgacgcgcagctattcctcgcgctgaacaagcagacaccggacgaagttgttacgcggctacaaaaagcgttgaacgagatgaagggcgacggcgccatcgacgccattatgcgtcgttatctctgatcgactgccttagcgatagatgccgtgctcgccgtgggcacccgtggcccggttgccgcgcgtcgcgatcatctggccgatatccacccagtcgatgccttgagcctgcaggtgcggtagctcccgttccagcagcgccagcgtactcgggtgcgggtgcccgatgatcaccaccgaaccctgcttgcgtgccagctcgagagccgcgtggtactgcgcggcgaccgcagcggggctgggatcgtcgtcgaggaagatatcgcgcgacaggctggccaggccgatgcgctgcgcggcggccgcagcaaccgtcgcgctgctggtgcggctgtcgacaaagaaaagatgacggcgctgcagttcgcccatcagggtcgacatcgccgcgcgcagaccagtcatctggctacccatgtgattgttgatgccgctggcgccaggaaccttctgcagcgcactgttgaggcggccgatcagctccgcctccggcaacggcggctgccaggcgtaggggccgccggcaggcgccatcggcaaatgcagcatgacggtctttccagcggttcgggcctgcttcgccagcgtcgtcgcgtggcgggtatcgggcaggatcgccatggcgacggggccgggcagggccagaacccgccggtcctgacgcaagctctggcccaggtcgtcgataatcagcgtcagcttgggcatctgcgcgatgctggccaggcgctgctcgtcgctggccgaaggcttgtacggcgccccgatcaccaacagcggcgtgagaatccccaatagtgccgccagggcatatcggagcatccgttactggccgcgggtgaggttcaaccccttgagcagattcagtgcctggccgagctggtagtcctcatcctgagggcgtgccgagtcgctggcgatcggtgcgctgctggggcgctccggaccgccgttgccgttgcccagatgcccggtcaagtccgcttcgcgaatgccttcgacggcctgctcgcgggtgagcttggcgcgggcgacctcgatatccggctggataccctgcgcctggatggagcgcccgttcggcgtgtagtagagcgcggtggttagcttcagagcacgatcgttgttcaatggcagcacggtttgtaccgagcccttgccgaaactgtccgttcccatcagcaccgcgcgcttgtggtcctgtagggcgccggcgacgatctccgacgccgatgcacttccgccattgatcagcaccaccagggcgacgccctcgctggcatcggccgggtcagcgctgaagcgcaactcggagttggcgatgcggcctttggtgtagacgatcaggccgtcagtgaggaagtggtcggatacctcgaccgccgcctgcaggacgccgcccgggttgttgcgcaggtccagcaccagcccgttgagcttcttgccgttttccttgcgcaggcgtgccagggccttgccgacctcttcgccggtattgatctggaactgggtgacccgcaggtagccataaccgggctcgagcatctggctcttgacgctgttgaccttgatcactgcgcgcgtgagcttgaccgtgaagggcttgccgccctcgcgcaccagtgacagcgagatggcgctgccgggcttgccgcgcatcatgccgaccgcatcgatcatcgacatgcccttggtgggcttgccgtctatcttgacgatcaggtcgccggcctcgatgccggccttcgaagcgggggtgtcgtcgattggcgagacgaccttgatgaagccatcttctacgccgacctcgatgccgaggccgccaaactcgccgctggtgctttcctggagctccgcgaaggcctcgggttcgaggtaggcagagtgcgggtcgaggttgctgagcatgcccttgatggcattttccagcagagtcttgtcgtcgaccggttcgacgtatgccgccttgatccggtccagcacctcggcgaaggtgcgcagctcgtccagcggcaacggtgccttcctgctcggcttgtccaatgtgactggcgctggcgccagctctgcaggaggctgctgggcccaggcgttagcgcacatccccagcaaaatggacagggccagggtagagggttgggcgaaacggcacaggtgcagcatgtttgactccaattgtgaggggtgcgccgaggacactaaccttgcgcacgacaccattgtgccggatcgctcgggcgaccctgctggcgaatggcgaaatacagggcggcggactcttgcccaccactggtaccaacagttgcaatcggctcgcccgccttgacgatttctccggcgttgcgcagcagactctggttatggccgtacaggctcaggtagccattgccgtggtcgaggatcaccagcagtccggcaccgcgcagccaatcggcgaataccacccgaccgccatgcaccgcgcgtacctgggtgccgacagcggcaccgatcagcacgccgtcccacttggttcgagcgtcgccgccacgaggagtgccgtagcgggcgaccaggcgtccatccaccggccagggcagcttgcccttggcgctggcgaacgggccgccgtaactggtgccggcgcttgaaacgagcgggccggctggcgctggtcggccggcctgccgctggcgcgcctcttcttcgcgggcctgggccagtgcgcgctggcgctcctgttcggcctcgcgcgcttggcgtgcaagggtttgctcgatggtctgcagaacgcgttcgagctgcgcctgttcctgcttgcgcgcctttagtttctggtcgcggctggaaaagtcctgatcgagcttggccagcgccagctggcgctccttgcgaacttcggcgagctgggcgcggcgttgttgcaggccgtcctgctgttcggcgagcgtcgcttgctgcgcctcgatgccggcttcgaccttggtcagttggcgaagggtttcgttgaactccgccagttgctcgaaacgggccttgctgaggtagtcgtagtaggtaagggtgcggctgaatttttccgggttctgctggttgagcagcagcttgaggtattcctggcgaccgctttggtaggccgcccgcgcctggataccgatcagccgctgttgctccgtgcgagcgccctcgagcgtggtcttttcctcattgaggcgttcgagttccgcttcgctgcggtcgatttcctgctgcagtgagtcgacctgcttttccagctcgcccatttcgctctcggtgctttgcaactgcttctggaccgtggatttctcctgctcgatctgcttgagcagcttctggagctcggccacgtccttgcgtgccgcttcgatctgtttgcgggcgtcggcgcgctcgtccgctgtggctgagccaagcagacagaacagcgcgagggcgagaatcatgcgagacatagaggggcgtaaccgagcgtttgacgaccgccgtagtatgcctaaaaaagcagctggaagcttgaagccctgggcgggaacagaagcttgcttccagctatcgcctatcagcccagttcgacgatcgagcgaccggtcatctcggtgggtaccggcagaccgagcagcgtcagcatggtcggcgccacgtcggcgagcacaccgccttcgcgaaccttcagcttgcgcttgccgtaatagatgaacggtaccggctcgcaggtatgagcggtgtgagcctggccggtcatggcatcttccatctgttcgacgttgccgtgatccgccgtgatcaacgcctcgccgccgaccttgtccagtgcctcgacgatgcggcccatgcacttgtccaggcattcgacggcctttaccgcggcttcgaacacgccggtatggccgaccatgtcgccgttggcgtagttgacgatgatcacgtcgtagcgctgttgctcgatggcctcgacgatgcggtcggtcacctcgggtgcgctcatttccggttgcatgtcgtaggtggcgacctgcggtgatgggatcaggatccgctcttcgccctcgaaaggctcctcacggccgccggaaaagaaaaaggtgacgtgggcatatttttcggtttcggcgatgcgcaactgggtcttgccgttgttggccaggtattcaccgagcacgttggtcagcggctcgggagcgaaggccgacggcgtcgggatgctggccgcgtactgggtgagcatgacgaagccggccagttgcggcacgcgggtgcgctgaaacgcatcgaagccgggctcgacgaagcagcgcgtcagctcgcgtgcgcggtcggcgcggaagttcatgaacaccacggcatcgccatcctccacgcgcaccggctcgccgatggtggtggctttgacgaactcgtcggtttcgccgcgttcgtaggcggctatcaggccgtcgaccgcatagtcggcatgatgctccgccttgccctcgacgatcaggtgataagcctgttcgacgcgatcccagcgattgtcccggtccatcgcgaagtagcggccgatcaggctggcgacccggcccttgccaaggcgggtgaaggtggcctgcatcagttcgatggaatgctgagcgcttttcggcggtgtgtcgcggccatcgaggaaggcgtgcaggtagatctgttccgcaccacgtttggccgccagctcggccatggcgaccagatgatcctggtggctatgaacgccgccgtccgacagcaggcccaggatatgtaccgccttgccagcggcgacggccttgtcgactgccgcgcaaatatttgggttctcgaagaattcgccgtcgcgaatggctttcgtcacgcgggtgaagtcctgatacaccactcgaccggcacccagattcatatggccgacttcggagttgcccatctgcccgtccggcaagccaacgtccatgccgctgccggaaatcaggccgtgcggctggctggcgagcagccggtcatagaccggcttgttggctgcgtggatggcgttgaattccgggctgtcgctatgtccgaagccgtcgagaatcatcaataccaagggtttgggcgcggcaggcatatcacgggctccttgcacggggggcgaaaaaatggcggccagtctactggctgggcggtttggcgtcacgattggcagggttcagcccggttgtgcggctgtgtatactggcccgcattttatcccccgggtacccaattgatggtcgctaacctgattgaattcgtctccaaccactacgttctagttggcatctttctggtgctgctggcgcttctcgccatcaccgaagcgcgcaagggcggcaagagtctgagcaaccgcgagctgaccggcctggtcaatcgcgacgaaggcgtggtcttggacgtgcgcgcgaagaaggagttcgatgccggccacatcgtcgattcattgaacattccctacgagaagctggtcagccgtctgggcgagctggaaaagcacaagggcaagacgatcgtggtcgtcgacgccatgggccagcatgccggaacagcctgccgtgagctgcagaaggcgggcttcaatgccgccaagctgtctggagggatttccagctggcgcggcgaaaacctgccagtggtcaagtaactatgcctaaggtcgtcatctataccaccgcctggtgcccgtattgcatccgtgccaagaacctgctcgaacacaagggtgtcgactacgaggagattcccgtggatggcaagcctgcgttgcgatcggaaatggcggccaaggccgggcgtacctcggtgccgcagatctggatcggtgacgcacacgtcggtggctgcgatgagctgcacgcgctggagcgtgccggtcggctggatgcgctgctgcaggcctgatcggtttcaaggcctgccagtcagctgacgcgcgtcggcgctggcgaggcgatttccataacgacatgcacaacaagaaggcttcacatgactgaacaagcaaacaacggcgcggcggcaggtcagcaagagcagggcgcacagttctcgctgcagcggatctatgtccgtgatctttctttcgaggcgccgaaaagcccggagatcttccgccaggaatggaacccgagcgttgcgctggacctgaacaccaagcagaagtcacttgaaaacgatttccacgaagtggtgctgacgctgtcggtcacggtcaagaccggtgaggaagtggccttcatcgctgaagtccagcaggctggcatcttcctgatcaagggcctcgaggcgcaagccatgagccataccctgggtgcgttctgccccaacatcctgtttccgtacgcgcgcgagacgctggacagcctggtcacccgcggttcgttcccggcactgatgctggctccggtgaacttcgatgcgctttacgcgcaagaaatggcgcgcatgcagcagggcggtgaagcgccggccactgctcactgatagtcgctcgctgcaaacggcagaagcgcagggtgatgtcgaagttcacggcaccctgggcttccccgcttccccgcttcccgcgttagcgtaccttcacgaccagcttgcccacggccttgcgctgggccagcgtattgatcgcctcggcagcctgctccaaggcgaaggtctgcgaaaccagcggcttgagcttgccttcggcgtgccaggcgaacagctgcttgaagttggccgcgttatcctgcggttggcgccgcgcgaaggtcccccagaacacgccgaccagcgaagcacccttgagcaaaggtagattggcggggagcgaagggatgtcgcccgcagcgaacccgaccaccagcatgcggccgttccaggcgatgctgcggaatgcttcttcgaacagctggccgcctaccgggtcgtagatcacatccacaccctggccgccggtcagctctttgaggcgctccttgaggctggtgttggaatagtcgatcagctcatcggcgccggcacgctttgcgacttccagcttttcggcggtagaggcggcggcgatgaccttggcccccatcgccttgccgatctccacggccgcgaggccgacgccgcccgaagcgccgagcaccagcagggtttcacccggctgcaggttggcacgctgcttcaaggcgtgcatcgaggtcccgtaggtcatgctgaacgcggcggccgtttcgaaatccatcgttggtggtaccgggagcacgttgtcagccggtacggcgacctgctcggcgaagctgccccagcccgtcaggcccattacgcgatcgcctactttcaggtggctgaccccatcgcctacggcggcgaccacaccggccgcttcaccgcctggcgagaacggcagtggcggtttgaattggtacttgccctcgatgatcagggtgtccggaaagttgacgccggcggcatgcacgtcgagcagtacctcgcccttcttggcctgggggctgtcggtctgatctatgacgagattttcggccgggccgaaggctttgcacaggacggctttcatcggagttccttttgtgattagagatgaggctattggcccttttctgaatgcgttcagtctagaagcctgcccattcggcgcaatgagcatggtccgctctgatggcggtacataaggccgggcttgggtccgcgctcggcactggttatgctggtggccgatctccgtggagttgtcctgtgaagcgcatccttctagtttttttcgctctttgtatggcattgccggccctggcggagacgtccgaggccgatgaggctgcgccgaaagtcatttattacgcgctggtgccggcattggtcggcaactacggctcggacggcaagctcaggtattacaaggccgatatcgcgctgcgtgtcggcaatagccaggcggaggagaaggtcaagcaccacgagccgctgattcgcaatcagctggtgacgctgttttcgcagcagaccgatgccagccttgggacggtcgaggccaaggaagcgctgcgccaggaggcgctcaaacaggtgcaggcggtacttacgcaggaggagggcaagcccctggtcgaggacctcctgttcaacaacctgatcatccagtaagcaggggcgcccgagacctcagcgtatggccagaatggcgcgccactcgctgtcgctgacgggcattaccgatagccggctgcccttgtgcacgagcggcatctgttcgagcgccggttctgctttcaatcgaggcagtgtcagggtgctgtcgaatcgctcgacaaaggcgacatccacagcgctccaagggttcttggcagcgctggcgcgagcgtcgaaataatcgctcccagagtcgagagcggtcggatcgggataggcgctgcgttcgatcgaaccgattccagcgatcccgggggtcgcgcaactcgagtgatagaagaagaaccggtcaccctcggccatctgccgcaggaagttgcgcgcctggtagttgcgcacgccatcccaacggccaacaccgattttttccaggtcctggatggaaaattcgtccggttcggacttcatcagccagtacggcatggtctttgctcacagctggttgcttggaagggttctcaaacgcaaaaatccccgacaatcggtggtggcgcgtatttgcgctgcaccgaggcatgacggagaatgccgcgcttgaggttggcattgtcgagtctaaaaaacgaaaacgatactgactcgactacagactgttcgcctggcagggggaggcgaaaaattatgaaacgcaaaccagatattctttgggtcctggtgctgatctttggtcttggcgttgtgacgacaggttatacgcaggggctttgggagcgtaccgacaatacaccgtcggccgttccgatcagtcattcccagcaactgcagcgctaagctgacttgccgcatggacgcggcgtgcctccctgattcccgccttgacttgcataccagccgttatccgtgacggtcgcttgcagcgccacatcccagcttgccaacggcaatcgatctaccttctggcattcatgcgcaagacctaaaagtgtcggcttgtgaccatttttgcgccttttacgataggccaggctgcgatcataaaagccgccgcccatgcccagacgtccgccctgctcgtcgaaccctaccagcggcatcaggaccagatcgagtgcccagatggggcgctgtcgagccggtcgatacatcggctcgtcgataccgaatcgattcgacctcaggcgttcattcggcatgatgcgttgaaacaccatgcgtgtgcgtggccaagcgttgagcacgggcaagtaggttgccttgccacgtcgttgcgcttctagcagcaaggcgcggggatcgatctcgccgtcgttcggcaggtacaaggcaatatggcgagcgcgccgaaacagtgggtgctgggccagctgccggtagagcgacttggcggcccgccgctgttgcgcggcggtgagctggcggcgagcttgccgcaattggcgtcgcagcgccgggcgtgaaaggccttcggctacgatcatgaaatgaggctccccagcatgccgctgcccgcgtaggcccttgaacccgagagttcaaggtggcgactacagagtaccttaaggctttccgtcaggcggacatgcacaccggcactacgtgtagcctccatggtgttgcttatcgggagagggtcatcgccgactggcgaacatgccagggagtgggcgggattataacgcaatctgtttgccgttcatcagttgccggatgggtttggatcggtggccagtgcagtgtcgacccgctcgagcagcacgcggacgtgttcgcgggcgctgttggcttcggcgtccagtcggtcatgcttgtgcagcagttcgtgagtgatgttcagtgcagccatcaccgcgacacgatcggcaccgatgactttgccgctgctgcggatttcacgcatcttgcgatccagatagtgggcggcgccttcgaggttgctgcgttcttcgggcgggcaggaaatgcaatattccttgtccatgatgtgcacggtaacggtattcggctgggtcatgagtcctgctccagggctttcaggcgcgaaatcattgattcgaccttcactcgtgccatttcgttcttctcgatcagatgagcgcgctcctcgcgccatgcccgctcgctgtgaagcagcagatggttctgcgccttgagttgctcgatacgctgaatcagctgttccagcttggcggtcagcaattgcagatcggcgtcttccatgggatttccgggtaaatggcgcgagcgtcgggcatccggcttcgatggtcttggctcgtatgccggtgctaggatacgaagcctcattctagacattagcgcctccgcgcgcctagctgccaatgcccattcagaattctccgtacgccgctttttccaccttgctgaccagcagtgcccaacccgtcacacccgccgagctgcatggcctgttgctggggcgcagctgtgccggcgccggtttcgatgtcgatgcctggctggtcgatgcggccgagctgctcggtgccgagccggaggaaccggtgcgtcaggcactgatcggcttgcaggaaatggtcaagggtgagctcgccggcgaggacatcgccatcgttttgctgctgccgtccgacgacgcgccgctcgccgaacgcacgctcgccctgggccaatggtgccaaagtttcctggcgggcttcggcctgatcgccggtgaccgtgcgctgagccgcgaggccatggaggtgctgcaggacatggcggcgatcgcgcagattcaggattcgctggacgaatccgaagacggcgagagcgactacatggaagtcatggagtatctgcgcgttgcgccattgctcttgttcaccgagtgcgccaagccagtaccgccgacgcccaagccctccctgcattgaggattcgcctgccatgacccgtatcccgaaagcggaatatgcccgtcggcgcaaggcgctgatggcagagatggaacccaatagcatcgcgatcctgccggctgcgccgatgtatatccgcaatcgtgacgtcgaacatgtctaccgtcaggacagcgacttccaatacctgtccggctttcccgagccggaggcggtcattgcgctgattcctggtcgcgagcacggcgagtacgtgctgttctgtcgtgagcgcgatcctgcgcgggaattgtgggacggcttgcgggcgggccaggatggtgccgtcgcggagtacggcgctgatgatgcgttccccatcggcgatatcgacgacattcttcccggcctgatcgaggggcgttcgcgtgtctattacgccatcggcagcaatcaggagttcgatcaccgtctgatggagtggatcaacaccattcgctccaaggcccgccagggtgcccagccgcctaacgagttcgtcgccctcgatcatctgttgcatgacctgcgcctgtataagtcggcgaacgaggtcaaggtgatgcgggcggcggctgagatttccgcccgggcccacgtgcgtgccatgcaggccagccgcgccggactctacgaataccatctcgaagccgagctggattacgagttccgcaagggcggggcgaagatgccggcctatggctccatcgtcgcggctggcaagaatgcctgtatcctgcattaccgtgagaacgacgccgtgctcaaggacggtgatctggtcctgatcgatgccggctgcgagatcgattgctacgccagcgacatcacccgcacctttccggtcagcggtcgcttctcggcggaacagaaggccatctacgagctggtgctggcggccaacgaggaggccttcaagcacatcgcgccaggcaagcactggaacgaagcacacgaggcgacggttcgcgtcatcacggcggggctggtcgatctgggcctgctccagggcgatgtcgaggatctgatcgcatccgaagcctacaagcccttctatatgcatcgcgccggccactggctgggcatggatgtgcatgacgtcggcgactacaaggttggcggcgaatggcgcgtgctggagcccggcatggcgatgaccgtcgagccgggcatctatatcgccgccgacaaccaggacgtggccaagaaatggcgtggtatcggcgtgcgcatcgaagatgacgtggtagtgacccgcactggctgtgaaatcctgactggcggcgtgccgaagacagttgccgaaatcgaggccctgatgtcggctgcggccgaggtggcctagcatgggcaccttggccatagtgggaggcgggctggttggtgccagcctggcgctggccttgcagcaaggcgcgaaagcgcgtggctggaacatcgcgctgatcgagccgttcgagcccggcagcgaatatcagcccagctatgatgcgcgctccacggcgctttcttacggcacccggctgatctaccagcgcctgggcgtctgggagcggattgccgagcgcgccgagccgatcacccagattcacgtgtccgaccgcggtcgcgcgggggcgacccgcctcgacgccagcgaccagcaggtgccggcgctgggctacgtggtcgagaacgcctggattggccattgcctgtggcaggcgctggatgacgaggtggtgacccgtcattgcccggcggaggtcgagcagatgcaggcggtcgcggccggctatcgactgactttgaccactgggcaagtgctggactgcgatctggcggtgctcgccgatggcgggcggtcggctttgcgcgagcagctcggtatagcaatcaagaccaccccttatgatcagtcggcgctgatcgccaatgtgaccccgggtaaacctcacggcgggcaggcgttcgaacgcttcaccgatgacgggcccatggcgctgctgccgctgcaggacaatcgttgcgctttggtctggacccggcccgaggaaggcgcggcgcgtttggccgcgcttcccgaagcggcgtttctcgacgagttgcagcaggccttcggctatcgtctgggcggctttcagcaggtcggcgcgcggcatctttacccactcatgctgatcgaggccgaggagcaggtgcgctccgggctggtggtgctgggcaacgccgcgcacagtttgcacccgatcgccgggcagggttacaacctgtccctgcgcgacaccgaggcgcttgcggccgcgttgctgagtagctcggcaaagctgggcgatatcggtgtgctacaggcctaccatcggcagcaacgtaccgatcagtggcttaccgtcggtttttccgaccggctgacgcggttgttcgctggctccgcgcttttatccgttgccggacgcaatcttggtctgctggggctcgatctgttgccgccggccaaggcctggttcgctcggcaggcgatggggttgggcgtgcgcgagcgctgagtgcgtgtcttcgccgagctcgagcacgcagatccattagacacgccgctcacgcggcgctcaggagagcagtgatgcaagcggacctcatcatcgtcggcgccgggatggtcggcagcaccctggcactggccctgcgagacgctggtttgaccatcaagctggtcgacgccggtccgcttagggtgcagcccttcgcgcccggcgaccctttcgaaccgcgtgtcagcgcgctatccgcggcaagccagcgaattctcgagcgcgtcggcgcctggtctggcatcgccggtcgccgtgccagtccctataccgacatgcgcgtatgggatggctccggaaccgggcagattcatttttcggcggcatcggtgcatgccgaggtgctcggccatatcgtcgagaatcgtgtcgtgcaggacgccttgctcgacgcgttgacggtcgatggctcggtcgagctggtaccgaatgcgcggctggaacagctgcgccagaacgaaggggattggaccctgacccttgccgacgggcagcagctcagcgcgggcctggtggtggcggctgacggcggcaactcggcggtccgccgtctggctggctgtgagacgcgcgaatgggactatctgcatcacgccatcgtgaccagcgtgcgttgcgccgagcccaaccagcagaccgcctggcagcgcttcaccgatgacggcccgctggccttcctgccgttgcagcgcgagggcgattcgcattggtgctcgatcgtttggtcggtgaccgagcaccaggcgcagcgcctgatgtccctggacgacgaggcgtttcgccaggcgttggggcgggctttcgaataccgcctgggcgacgtcctggaggtcgacccgagactctgcattccgttgcgccagcgccacgccaagcgttatgtgcagccggggctggcactgatcggcgatgccgcgcacaccatccatcccctggccggccagggggtcaatctcggtctgctcgacgcggcggtgctggccgaggttctgctggcggccctgaaccgtggcgcatccctgtccgatccccgggtgctggcgcgtttcgagcgtcggcggatgccccacaacctggcgatgatggctgcgatggagggcttcgagcgcttgttccaggccgatgcgctcccgctgcgctggttgcgtaacgccggtttgaaaggcgtccaggcgctgcccgaagccaaggcgttgttcgtacggcaggcgttgggcctgagcggcgatctgccggagctggcgcgacactgaagcgcgcgcgaccacgcgccttgcaacatttgtcgcgttgagaaagtaaatgacattcactactatttagcctctttcatcaaagcaagaggctaaatccatgcaggcaagcaaaggtttactcgccgccgcggcgctcatggcgctgtcgaacgtggcacaagctgccgatgaagtagtggtttactcctcgcgaatcgacgaattgatcaagccggttttcgacgcctacaccgctaagaccggcaccaaggtcaagttcatcaccgacaaggaagcgccgctgatggcccggatcaaggccgagggcgagaatacgccggcggatctgctactgacggtggacggcggcaacctctggcaagccgaacagatgggcatcctccaaccgctgaactccgaggtggtcaaaaccaacatccccgcccagtaccgctcctcgagcgacgcctggaccggtctttcattgcgcgcacggaccatcgtctactcgcccgagcgggtccaacagagcgagctgagcacctacgaagcccttgcagacgagaactgggaaggccggctttgcctgcgcaccagcaagaaggtctacaaccagtcgctgaccgcgaccctgatcgagacccacggtgccgagaaaaccgaagagatcgtcaagggctgggtcaataatcttgcgaccgatgtgttcgccgacgacacggcgctgatccaggccgtcgacgctggccagtgcgacgttggtatcgtcaacacctactactacgggcgcctgcacgcccagcagccggatctgaaagcccggctgttctggccgaaccagcaggaccgcggcgtacacgtcaacctttccggcatcggcctgaccaagcatgcaccgcatccagaggcggcgcgcaagctggtggaatggatgaccacgcccgaggcgcagagtatcttcgccgatatcaacatggagtttccggccaacccggacgtgaaaccctcggctgaggtcgccgcatggggtgatttcaaagcggacaccatcccggtggaagttgccggcaggcggcaggccgaagccatcatgctgatggatcgtgccggctggaactaatccgtagcggcaagcgccagtatccgcccagccgggcttggcgcggtggggctgagttgaaaggctcgcggtcaagaccgctctcacaggcctagggcgtcaacagatccctgggcggatttatcagcggtgaactgcgccagccggccggataaggcaggtagcgcgccagcggcttcggccgccgctcactggccctggcagcgggcgctgccgttatactcgacgccccggtccgccggggcgttgtcttttctaggttcgaggcttgtgtgtcccaccccgtcgagcaccgttggtatcccatttcctttgctgtcgctgcgctggtgctattgccgctgagtgtgctgctgttcagctggagcgacatcgacaccagtatctgggcgcacctatggcaaacccagatgcccagattgctcggcaacaccttgacgctggtgctgggggtcgggtttggcgtcaccctgctgggggtcagcctggcctggctgacctcgctgtgcgagtttcccggacggcgctggctggactgggcgctgatgctgcctttcgcgattcccgcctatgtgctggcgttcgtcttcatcggcctgctggatttcgctgggccggtgcagacgctggcgcgcgagtggttcggcagcggggtgcgctttcccagggtccgctccacaggcggggtcatcgtcgtgttggtgctggtgttctacccctacgtctatctgcttgcccgttcggcgttcatcgcgcaaggcaaggggctgatggaggcggcgcgggtgctcgggcagtcgccctggaaggcgttctggacggtcgcgttgccgatggcgagaccggcgatcggagccggcctggcgcttgccctgatggagacgctggccgacttcggggcggtggcagtattcaactacgacacctttaccaccgccatctacaagacctggtacggcttcttcagcctgaccagcgccacccagttggccagcctgctgttgctcgcggtcatgttggtgctctatggcgagcggcgcgcgcgcggggctgccaggccggccaatgacagggcgcgatcggcggtcctgtatcgcttgcgcggcttcaaagcgctggcagccagcggttggtgcgtcctggtgtttctctgtgcgttcgtcgtacccatgctgcagttgctggtctggctctggcagcgcgggcgcttcgatctcgacgaacgctacaccgggctgatcctgcatacgctctatctgggcctgatggcggcatcgattacggtggcggtggcgttgctgctggccttcgcccgtcgccaggcaccgctgcgctcggtcaaggccgcggtagggctgtcgaatctggggtatgcgctgccgggctcggtgctggccgtgtcgatcatgctcgcgttcagctacctggatcgcgagatggtcataccgctgtcggcgtggctcggtggcgaaggcaagccgatcctgctcggcagtctcggggcattgctgctggcctacctgattcgcttcatggccgtggcgttcggcccgctggaaagcgcattggcccggattcgcccgtcgctgcctcaggcgtcgcgtagtcttggcgtcggcgggccggcgcttttcttccggatctacctgccgttgctgttgcccggcacgctgagcgccgcgctgctggtgttcgtcgacgtactgaaggaaatgccggctacgctgctgatgcgcccattcggctgggacacgttgtcggtacgaatcttcgaaatgaccagcgagggcgaatgggcacgtgccgccttgccagcgctcacgttggtgctggtcgggctcctgccggtcattcttctgatccgccgctcggcccggcgggtcggttgacgctcagtcgatcgcctcgtcgtgacctgcctcgaccttggggctacaatgcgcgccattcaaaaaacgtcgggctttcgtccgacctctaatagcttcagccacgccgcttcggcgacctgcccggaaggagaaacccatgggtcagcgtactcccctctatgatcagcatctcgcacttggcgccaagatggtcgatttcggcggctgggacatgcccctgcactacggctcccaagtggaagagcatcaccaggtgcggcgcgattgtggcgtgttcgacgtgtcccacatgaccgtggtcgacgtcgccggcccagacgccaaagcctatctgcaacgtctgctggccaatgatgtgaatcgcctcggtcaggtgggcaaggcgctgtacaccgcgatgctcaacgagcgtggcggggttatcgatgacctgatcgtctacctcaccgactggggctaccggctggtcgtcaatgccagtacgcgcgacaaggacctggcctggatgcaggcgcaggccgagggtttcgcggtcgaggtgaacgagcgctccgagctggcgatgctggccatccaggggccgcaggcgcgagcccgtacggccgaactggtcgatcaaccgcgagcggcactgatccatgagctcaagcccttcaacggccgcgctgccggcgactggttcatcggtcgcaccggctataccggtgaagatggcctggaaatcatcctgccggccgagcaggcgccggacttcctcagtgagctggtcggcgccggtatatcgccgatcggtctgggcgcccgcgacaccttgcgcctggaggccggcttgaatctttacggccaggacatgaccgaggatgtctcgcccctgcaggccaacatgggctggaccgtggcctgggagccggccgagcgtgacttcatcggccgtgcggccctggaggccgagaaggccatgagcgaccggccgaaactggtcggtctggtgcttgaggagcgtggcgtattgcgcgcgcatcagatcgtccgcgtcaatggcgctggcgagggcgaaatcaccagcggcagtttttcgcctacgcttggcaaatcaatcgccttggcgcgggttccggccgccgccggcgatcgtgccgaagtcgaaatccgtggtaagtggtatcccgtgcgcgtcgtgcagccgactttcgtgcgtcacggcaaagtactggtgtaaattcggccgactgcttccttgcagcgggtcgccaagcctgcttcgtgcccgcaaataccgacagcttttttgaggacatacgaatgagcgacattcccagcgatctgcgttacgccgccagccacgagtgggcccgtctcgaagcggacggcagcgtgaccgtcggcatttccgatcacgcccaggaagccctgggtgacgtggtttacgttgaactgcccgaggtcggccagcaactggcggccgggcagcaggcgggcgtggtggagtcggtcaaggccgcttcggacatctatgcaccgatctccggggaggtgatcgccatcaacgagcagctcaccgactcgcccgaaatggtcaacagcgaaccctacggcagctggttcttccgcctccagccgagtgatgcctcggcactggacaagctgctcgatgcagagggttacaaggcctcctgcgacgccgaagcctaagcgttccattcaagagccccgcgttgcaggcgtgaaaaaccgagcgaagtcgtttttcattccgcctgcatgacggggctttttactttttcgagagaagccgtgatgtcccaagtgccgcgcctttcccagctccagcaacccgacgccttcctgcgtcgtcacctcggccccgatgcggctgaacagcaagccatgctcaatgcgctgggtctgtccagtcgcgacgagctggtgcagcagaccgtgccgccggcgattcgcttgcagggcgagctggcactgccgccggcgctggacgagcaaggcgcgctggcgaagctgcgtggctatgccgagcagaaccagctgtggaccagcctgatcggtatgggctatcacggcaccatcacaccgccggtgatcctgcgcaacgtgctggagaacccgggctggtacaccgcctacacgccctatcagccggaaatcgcccagggtcgcctggaggcgctgctgaatttccagcagttgaccatcgatcttaccgggctggatctggccaacgcctcgctgctcgacgaagcgaccgcggcggccgaaggcatgacgctggcgcggcgcatggccaagaacaagagcaaccgcttcttcgtcgatgagaactgccatccgcagacgctttcggtggtgcagacccgtgccgaggccttcggcttcgagctggtcgtaggcccgatcgaggatgtcgccgcgcaggacgtgttcggagcgctgctgcaataccccgatacccatggcgagatccgcgacctgcgtccggtgatcgaagcgctgcatgccaagcaggcgctggcctgtgtcgcggccgacttgctcagcctgctgctgctgacgccgcctggcgagctcggtgccgatgtggtgctcgggtcgacccagcgctttggcgtgccgatgggctacggcggcccgcatgcggcctatttcgccacgcgtgacgcgttcaagcgcgccatgcccggccgcatcatcggagtgtccaaggatgcccgcggcaacacggcgctacgcatggcgctgcagacgcgcgagcagcacatccgtcgtgagaaggccaactccaacatctgcaccgcccaggtgctgctggccaatatcgccagctgctacgcggtctaccacggccccgaggggctcaagcgcatcgcccagcgcacccatcgactgacggcaattctggccagcgcgctggagcggcacggcatcaagcgcctcaaccagcatttcttcgacacgctgaccctcgatgtgggcggcgcccagaccgctattctcgaaagcgcccgggctgcccggatcaacctgcgcatcctcggccgcggcaagctgggcgtcagcctcgacgagacgtgcgacgagcagaccgtggagcagttgctggcggtattcctcggtgccgatcatggcctggacatcgccacgctggacgccggtgacgttgccagcggcatcccggccgagctgcagcgcagcagcggctacctgagccatccggtattcaacagccaccacagcgaaaccgagatgctgcgctatctcaagcagctggaaaacaaggacctggcgctgaaccaggcgatgattccgctcggctcatgcaccatgaagctcaacgccaccagcgagatgatccccatcacctggccggaattcgccaacctgcatcccttcgcaccgcaggagcaggcccagggctacaagctgatgatcgacgagctggaagcctggctttgcgcaatcaccggcttcgacgcgatctcgatgcagcccaactccggcgcccagggcgagtacgccgggctggtcgccatccgcaagtatcacgagagccgtggcgaagggcagcgcgacatttgcctgattccgtcctcggcgcacggcaccaacccggcgtcggcgcagatggtcagcatgcgcgtggtcatcgtcgagtgcgacaaggcgggcaacgtcgatctggaggacctcaaacgcaaggccgcggaggccggtgacaagctgtcctgcctgatgatcacctacccctcgacccatggggtctacgaagagggcattcgcgagatctgcgaggcgattcatgcccagggcggccaggtctacatggacggtgccaacctcaacgcccaggtcggcctggcgcgaccggccgacatcggcgcggacgtctcgcacatgaacctgcacaagaccttctgcataccccacggtggcggcggtcctggcatgggcccgatcggcatcaaggcgcacctgcaacccttcgtgtccaaccacccggtgatcgagctgcaaggccctaaccccgagaacggtgcggtgagcgccgcgccttggggcagcgcgagcatcctgccgatcagctggatgtatatcgcgatgatgggccctcagctgcgcgatgccaccgaagtcgcgattctcagcgcgaactacctggcgatgcgtctgggtgatgccttcccggtgctctacagcggtcgcaacggccgtgtggcgcatgagtgcatcatcgatctgcggccgttgaaggcgcagaccggcattaccgaagaggacgtcgccaagcgcctgatcgactacggcttccatgcgccgaccatgtccttcccggtgccgggcacgctgatgatcgagccgaccgagagcgagtcgaaggcggagctggatcgtttcgtcgaggcgatgctgagcatccgcgccgaaatcgccaaggtcgaggatggtgcctggacggcggaagacaatccgctggtgcatgccccgcacaccctggccgatgtgacccatgcctgggagcgcccgtacagtattgccgagggcgtaacgcccagcgcgcacacccaggtgcacaagtactggccagcggtgaatcgggtcgataacgtgttcggcgaccgcaacctgttctgcgcctgcgtaccgatcgaggactatcggagttaaagcgcaaagccgataaaagcgcttgaggctggaggctggacgagccggctccagcttccagccctaagcgctatgggtgatggatgcctatacgccgtgttggcttcggttggggtctggcccgcgaactatcgagcgcgacgttcctcgagtccaagccacgctgtccagcctccagcctccagcctccagcctccagcctctagccttcggcctgctcctcacccatcagtccaagtaactgagccagcatcagctgcgcctcctcgaccccctgacgcttcggcgcggagaacagctgcacgctgacaccatctccccagcccttgcgaacatcacgctggatcgccagtagtgcgttcttcgccgcaccgaaggcgagcttgtcggatttggtcagcaggatgtgcagcggcatctcgctggcgctcgaccagtcgagcatcatccggtcgaactcggtcagcgggtggcggatgtccatcatcaggaataccccggccaggctctcgcgactgctcagataagcctcgaggtggcgctgccaatgctgcttcaacggaatcggcaccttggcgtagccgtatccgggcaagtcgaccaagcgcagatgatcgtcgaggcggaagaagttgagcagctgggtgcgcccaggagtcttcgaggtgcgcgcgaggctggcgtgggtcagggtgttcagcgcgctggacttgcccgcgttcgatcggccggcgaaggcgacttcaaggccctcgtcagccgggcactggtcgaccttggcggcgctagtcatgaaggtggcttgctggcagaggccgaggatcgggtttttcgggggcatgggcattccggtaggtgcgcgaagggtgcggcaatggttcatttccgtttcaagaacgccagtatataatgccgcagattttgtgtgcgctttggtcttgaacgagcccggaattgcggttgcgccggcatcgacagacgccggcgattgcaccgccgggaagccggatcagttgccacctctaacgagcaattgccatggcccacgcggtcggcttgccgaataagattgtcttttaacccttagccgtagttggatgagctgatgaacaaagtactcgtgagtctgctgttgacccttggcatcaccggtatcgcccatgcggctggtaatgccgaagccggtcaggagaaggttgcagtctgtggcgcttgccatggtgccgacggcaacagcgccgcaccgaacttcccgaaactggcaggccagggtgagcgttacctgttcaagcagctgcaggacatcaaggcgggatccagcccgacagccgagcccggcgttggccgcaaggtgctggaaatgaccggtatcctcgagccgtacagtgaccaggacctgcaagacatcgccgcgtatttctcgagccagaagatgaccgtcggcatggccgatccggctctggtcgcgcaaggcgagaagctgttccgcggtggcaaggtagaagagggcatgccggcctgcaccggttgccattcgcccagcggtgtgggtaacaacctggccggattccctcatctgggtggccagcatgcggcctacactgccaagcagctgacggctttccgtgaaggcgagcgcaccaacgacggcgacgccatgatcatgcgcaccatcgcgtcgaagctgagcaacaaggacatcgaagccctgtcgagctacatccagggtctgcactgacagcttcggctgcggccggctgaagaaggcgttcaggtcgagtacctgaacgccttttttttgttttgccaccgctacaatgattgtcaagatattgaaaagcgtcgaaaagcgctggcgagagggcaccatatgttgcagcctgtggcgctatcggtcagttgttcacgtcaaggagtcaacatgcgcaaatttgttctcagtgccattctcgttaccgccagcctgttcggttttgccgccaacgcggcagagtttcaggccgggaaggaatacgtcgagctgaagaacccggtcccggtgtccgagcccggcaagatcgaagtcgtcgagctgttctggtatggctgcccgcactgctaccagttcgagccaacgatcaatccctggatcaagcaattgccggatgatgtcgacttcaaacgtatcccggcgatgttcggcggcgtttggaatgcccacgggcagatgttcctggcgctggaatcgatggatgtcgagcagaaagtgcacgatgcgatattcaacgcctatcaccgcgagggcaacaagctggacacgccggaaaaaatggccgagttcctggccgggcagggcgtcgatgccgacgcgttcctgaaggcgtacaactcgttcggggtcaagagccgtgccgagcaggccaagaagctggccatggcctatcagatcactggtgtcccggtgatgatcgtcaacggcaagtatcgcttcgacatcggttccgccggtggcccggagcgcgccctggaagtggccgactacctgatcgaaaaagaacgcgcagcgcggtaagcccatgttacggcgttggagctcaccgcgcctggccgggccccgccaggcgcgggtcaacccgctctgcctcgacgccagcgggcttccctgcgacggccgtttacggctgttgagcttcaacatccaggtcggcatcagtaccgagcgttaccatcattacctgacccgcagctggcagcatctgctgccgcatgccgggcgcgccagcaatctgcagcgcatcggcgatctgctcggcaactacgatctggtggccttgcaggaagccgatggcggcagcttgcgttccggctatgtcaaccaggtcgagcagctcgcccagctcggcgcattcccttactggtatcagcaactgaaccgtaatctcggccgcttcgcccagcacagtaacggcgtgctcagccgcctcgagccgcagggcctggaggatcacccgctgcccggtccttccgggcgcggcgccatcctgctgcggtttggcgagggcgagaatgcgctggttgtggtggtcatgcatcttgcgctgggtggcggggtacggacgcgccagctggcctatattcgcgagctgatcggcggctatcggcatcaggtgctgatgggggatatgaacacccatgccagcgatctgctggagcattcgccgttacgcgacctgggcctgcaagccccgcagatccaggcgacctttcccagctggcgcccgcagcgctgtctcgatcacatactgctgagccccacgttgacgctggagcgcgtcgacgtgctggcgcaggccagttccgaccacctgccggtggcggtggagattcgcctgcctgaggccctgcacactgacgcattgccggtacctacggacaggatttgatgagcgacgacgcgcaacgctggaaagaaaaatacctgcactcactggaacagcaggagcagctcgaaaaccgttggaatacgcggttggacctgcttcggcgcagcctggtacgcagcagtttcgcggtcgacggtgccgatcccgccgtagaccaatgcatgcgcgagctgcgcgatgtgctgcgcgacgaggtgcaggacgagcgcctgggcgctctggtgccccggctcgagcgtgcagtcctggcgaccgagcgcagcaagcaagaccgtctgaaacggctgaccgaggcgcttgatcggctggcttcacaattgctcgatctgccgctgcccagcgagattcgcaagccactgaaaaccttttcgcgtgggctcggcgagcgtgcggctcaatcgcatgagttgcctggcctcctggaagaccttggcagattccagcaacaggcactaaccgcgcagaaggggagcgcgccggcatcggtagggttgctcggccgccttttcgggcaacgtgaacgtaccgccgaaacggcggcaacgccggcaagcgagccgctgccgccgctgccagtcgatgaaacgtcgcttccgcagacggtgacggaggcgcaacccaacatcgcacagcaggcggaggctcagcctgacacgcctgccaacaccgcggcatccgacgcccctgcagatgtcgcagccctggctgcagcgcagcccgaagcaacggctgccgcgatagagcaagaagctgcaacgcacgagcagcaggccgacccgtatctgctgccccactcgccggagcaggcctacagcgccattgccgagcgggtggagtcgaccctgatcgggcttctcgaagaccttcagcttcccgagcaccataagctacaggctgctggcttgcgtgagcggatcgagaagggcttgaactggtatgagctggtgccggtcctggacgatctggcgcagttgatgatcgcggtggccgatcagggccagcgggagttcgagagctatctgacgctgctgaacgagcgtctggcgaccatgcagcacagcctcagcgcggcccgagaagggcatgtgcagagcaaggaagccgcgcaggcgctggatgaggagttgcgccagcaagtggatggcctgcagagcagcatgctcgaagccaaggatctgcccagtctgaagcaagcggttcaggcccggctcgatggactgctggaaaccgtcgatacctacgagcgccagcgcggcgagcacgagcagcagttggccgagcggctcaccaccctggtcggccgcgttgccagcctggagcaggcggccaccggcatgcgcgagcatcttgaggagcagcggcagaaggcgttgcacgatccgctcaccgcattgcccaatcggagcgcctggaacgagcgcctggagctggaggtggcgcgtcagcagcgctacggcggcctgctgctgctcgcggtgctggacatcgatcatttcaagcgcatcaacgacagttttggccacctggcaggcgatcgagtgctcaagatcatcgccaacgagctgagcaagcggttgcgcaaaaccgatttcatcgcgcgtttcggtggggaggagttcgtcctgctgttgcccgagacaccgctcgaggccggccagcggctgcttgatagcctgagagccggggtggagagctgcccgttccacttcaagggcgcccggattcaggtcacgctctcggccggaattgccagcttcgctgcgcaggacaccgccgagcaggtgttcgagcgtgccgaccgtgcgctctattgcgcgaaagaaggcgggcgtaaccgcatcgagataggctgaccaaacggtctgggaccgtccgcaccgtctcgctatactttccagccattccgtccagcgccatctgcgggcctgtgcaagcgtgcgccgcacgagagcaggccgcagtctgcgtcatttcgctgtcgacacagaggtgccaaatgagagctttgatcctgatcgcgatgatcgtcctggccggctgtgccagtggtccgcgtatcgatacccgttatacctcactgggccaggacagccgggcgcagtacatcgtcattcactacacctccagcgacttgcagcgctcgctggacatcctcaagggtcacgatgtcagcagccattacctgattggcgaggcgccggcgaccatctaccgactggtggacgagaaccgacgtgcctggcatgccggtgaaagcgaatgggacgggcggacctggctcaattcgagctccatcggtatcgagctggtcaatcgcggctatgtcgagagtgagcgcgggcggctctggtacccctattcagacgagcagatcgatgccctgatcgtgctgctgaaagacatcatgcagcggcatggattgaagcccggcgccatcgttggacatagcgatatcgcgccgcagcgcaaggtcgatcccggtccgctgttcccctggaaacggctggcggatgccggcctgatccgttggccggacgccgccaccgttgcgcatcagcgaagcctgttcgcgacgaaccttccagacgtcgcctggtttcaggcgcagctcgccaagcaggggtacaaggtgcctggccacggccatctggacctggaaacccgcaacgtgatcgcggcgtttcagatgaaataccgtccgacgcgcttcgacggcgagccggacgctgaaaccgcggcgattctcgcagcgctcgcggtgcagccctgacgcatcctcaggcgcggggagaacaggcgatcagccgcgagtcggccagcgcagcggtgcgatggagggttgccgcccggtattcctcgtccgccagcatcgccaggaaggcctccggcgagggatagcgcaccagcagcatttcgtcccagtgttcctcctccggcccgatcaatgccatctgagcggaggccgccacctgaacatcgcctcccgccgcccgcaccttgcgtatggccgtgcggctatagcgtgcgtaggcctcctggccgctgcatgaggcttggtcgctgtctgccggataagccgcttgctggttgaagcgcagcaggttgagcatgaggatcggttcgccggctggcatccgctgggcgaagcgtttcagttgttcggcgctggggttgagactgggcatcggggctccttgttattcttccagccccgcaggttcagatcggcagggcgatatagaagatggtgccgtgaccgattcgcgaatgcacgccgatgcgaccaccatgcagctgcgcaatctctttgcataaggccaggcccagtccggcaccgcctcgccggcggccgatctgtacgaagggctcgaaaatgcgcgcctgctggctgtagggaatgccttcgccattgtcttcgacgctgaggatcacccgttcgccgtgatgcctcgccagcaggcggatctcgccgccatccggcgtatggcgcagcgcattgctgagcaggttgtcgagcatccgctccatctgctgccggtcgagcagcagactgggcaggggtgtctgcaattccagcttgatgtcgatgtcgttctgcgccgcggtgggctggaagcgctgccgcgcttgctccaggagctctgccggttcgcagggaacccgttcgagcttctgctggccactctggtagcgcgagaagttcagcaggtcattgatcagcgtgaccaggcgctgcatctcctcgtataccgtgctgaacaggtcggcttcacggctgctttccgggtagtgagtccgttcgcgtagcaggctgaacgccatctgcatgccggttaccggcgtgcgcagttcatgcgaggcacgcaagacgaactcgttgcgcacgcgctcgaaggttcgctggtcggtgacgtcgtggagcaccatgaccgcgccgctgatccgcccgtcgtggtgattgaccgggctcatgcgccacgacagcagccggcgctcgccgtcggcctcgatcaccagatcctccggtggcccggacagcggcttgtcatccagaacctgccgggcggcttcgtccagttccggatagccgagcgcctgcccgagggtcgagcccaggtgctcgctttcccacgccagctgacgttgcgcgaccgggttcgcatgctccaggcggccctggcggtcgatgatcagcaagccgtcgtcgatgctgtccagcagtgcctgcaagcgctgctggccgttgaccagcgcctcgacattggtctgcttgaagtcgtgcagagcttgcgccatcaggccgaagcggcggatcagggacgacagttcggcgatcggggaggcgggcaagctgatgttgaaatcgccgcgcccgatctggtcggccacgctggacagctgctcgatgggatcgccaaagcgacgggcgaagctgtgcgcggtgacgaagccgatcagcagcaccgccatgccggtcaggccgagcaggccggcgagcagctgcgcccgctcccggctgcgtatctcggtatcgcggatctggtcataggcgctttgctgcatgtcgaccatcagttcgcgcacatggttgaaggcctggctgagcgcattgtcttcgagtagcgatgcctgcggcgcggacggtgcgtccagctcatcggtaaagcgagcataggcctcgccgatggcttgataggcgtggcgatcatcgggtcgcgccgcctgcgacaggccttgggcaagcgccgcctgaaacgaggtacgggcttcggtcagtgcatcatcgtcgcgttgtccgcgcaccagcagcagcagatggttgctcaacgactgacgcagttgctggttgatctctatgatgccgaagttttcgcggatgagcttttcctggctcttggccatctgcacgacgctgaccagcgccagcagcaatcccagcagcgctaccgtcatcagcgccgagaatcccagaaaaagacgggttctcagcttcatctgaagtttcataggccgtattgcttgcgctttcggtacagcgtcgaggcgtcgatgcccagaattcgtgcggcctgttcaagggtgtcgctggtactcaggacgcccgagatatgcgctttctccagctcttccaggctgagcgcctcgccgatacgcggtgcgttgttgatgttctgatcggccaggccgagatggctgacttcgatcatgggctgggggcagatgatgctggcgcgctcgaccacgttgcgcagttcgcgcacgttgccgggccagcgataggacctcaacgctgcgatggcagcatcgctgaagccccgcgccggccggccgtagcttttgacgaagaaggccaggaagcgctcggcgagggccacgacgtcttcgggtcgctcgcgcatgggtggcaggttcagcgtgatgacgttcaggcgatacagcaggtcttcgcgaaaacgcccttcacggaccatttcctcgaggttcaggttggtggccgcgaggatgcgcacgtcggcccgtcgcgtaacgggatcaccgacgcgctcgtattccttgtcctggatgaatcgcagcagtttcggctgcaacgccagaggaaagtcgccgatctcgtcgaggaagagggttccgccgtcggcctggttgacgcgccccagggtgctttccgtggcgccggtaaaggcaccgcggttgtgtccgaagagctcgctttccatcagatccgccgacagggacgggcaattgatggtgatgaacgccttctttgcccgccgactccagttgtggatggcgcgcgccagctctcccttgccggtacctgattcgccgaggatcaggatgttggcgtcggtgtcggccacctgccgggcggtctccagcacgctcatcatcgccgggctataggagccaagcgcgtcgctgcgcttctgcacctcgccttccagggcttccaggcgcgccgccatctgccggacttccagttgcttggctgccgacaaccgtagctgttccgggctgcacggcttgaccagataatccgctgcgcctgcctgcatggcgtccacggcagtgtcgaccgccgaatgcgcggtcacgatcaccacccgcatccagggcgccagcacgcgcatctgctgcagcacatcgagaccgttgtcctcgcccagacgcaggtcgagaaagcagaggtcgaaaacctggcgttgcagtatcgcctcagcctgggaggcgctggcagccgttaccaccgtatagccgcgatcctcgaggcagtaacgaaaagtacgcagtatcgcggcctcgtcatccaccaggagaatgcggccaccagcgtcggtcgtttggtccatgaaagctccataggtaaaggctgtgttggcgagttccgtgcgtgagccgaacggtagcccggaatgccgagtcgagttggcgattgctttagtctacggaaagtcttgcaagttgcacggtggcgatggccatttcctgcaccctgcaatctcccgctagccgaagcgggtattcaaggtgctgattataaagggactttacaatcatgaaggctggcacgtggcttgcggcaatgttctggaacgcgcttgaccggctatcagccgggcgcattgcagccgtaccggaggacccatgagccagaacatgacccaactcaacgagctgatcgaaatcacccgtgacggtcagcacttctaccagcatgcgctcgatgtcgtgcaggacgtcgaattgcagcaccttttccgggatatggcgcaagccaagacccacgtcatccaggccctatcagtgaaggttgccgcccaccaggagcgaccggccagcggcggcaccacggcgggcaagcttcgcgaagtgtatgccgacgccaaggcgcggctaggtcacgccgatgcggtttacatcgaccagcttgaccagacggaggagcgaattctcgccgcgttcgaagatgccctgaaaaccgccgagcccgacgtcagggccttgctcgccatcgaactgcccaagctacgggcctgccatgagcgcatccatgcgctcaatcatggcgcggccaagcgtgaggattaggtcgtcgtgcaaatcgcccggtgccacttgcaggcatcgtgcaatataaactggcacctctagagttatcgtccgtaagtcgttgtttataaaagggaaattttttaatgaaggctggcatgaggcctgcaacataaccctcaagaacagacatgcaccgcatgcttagaaggagttgaggatgaatcgtcaagcacgcttctcactggtaggcaaaggtttccttaccgccgctgtggtcactctgatcgttggtgcggagcggccgatgtcgcaaccgctcagccagacgcagcatgaatcagcggaacgaatccacatgtatgacgctcaaccagtagggatcgtgcagaccggccctgcgccgaagacgattgattacgtgcaggtgcggtcggagcaacgctgggttttctagtggtagagccgcgagctgattgttgcagatatcggtcccgctgaagatgtcctgaaccgaagaggagttacaccatgctgagttgggctattacgttcctgatcattgccatcatcgctgcggtcttgggcttcggtggtatcgcgggtactgcgacgggcatcgccaagatcctgttcgtggtgttcctggtgctgttcgtcgcttcgctgattttcgggcgaggccgcggtccgcgcgtctgatgcaataaacgccgcccgagagggcggcggcaacctacggaggcgacacgggcgggatgccagcttttcatgagtcttcgcaagagaacagcgtggacttgcagcagaattgggtaggcactggttgactgcccatcagcccgcgcagcgggagaaccaaggggtcgggacgctctgtttcatggagcgacctaggggtacaaggagtacctccttcgaggaccaggttcggcgaaggcaaccaaaggtggcgctgccacctttggcttgtgattctggtgtgcgacgtccccggccggggacgtcgacctgaagcatcaaagccaaatcatctcgcgcgtgcgaatgcctattcgcgtgccgctcagccgtgcgcgtcttgcgcacctaaacgcttcgatccgttgcatggccgttctcctgctgcaccgctatcatcgcgcgcagtcattacgttggagaaccacatgctcaacggcctctggctgggcttttttctggttgccgcggtagccgcgctggggcgctggctgctcggtggcgatgcaacggtgttcgctgcactggtggaaagtctgttcgccatggccaagctggccgtggagatcatgatcgtgctgttcggcaccctgacgctctggctcggttttctccgtatcgccgaaaaagccggtctgatcgagctgctggcgcgtctgttgggcccgctgtttcgccgcctgatgcccgaggtgccgtccggacatccggcgctggggctgatcaccctgaacttcgccgccaacggcctgggactggataacgccgccacgccgatcggtttgcgcgccatgcgcgcgttgcaggagcttaatcccagcaagaccgtggcgagcaacgcgcaaatcctgtttctggtgctcaacacctcgtcgctgacgctgctgccggtatcgatcttcatgtaccgcgtgcagcagggcgccgaggatccgacgctggtgttcctgccgatcctgctcgccaccaccgcgtcgtccctggcgggcttgctggccgtggcgctggtgcaacggctgcgaatctgggatccggtggtgctggcctatttcatacccggcgcgctgttgcttggcggcttcatggcgctgctcgccgggctctcggccactgcgctggcttccttgtcgtcgctgctgggcaacctgaccctgttcggtctgatcatcaccttcatcgtagtgggtgcgctgcgcaaggtgccggtctacgaaagcttcgtcgaaggtgcgcaggagggcttcgacgtcgccaagagcctgctgccgtatctgattgccatgctttgcgcgatcggggtgttgcgggcatccggcgcgctggatttcggattggacggcattcgctggttggtcgaaatggtgggttgggacacccgcttcgtcgatgcgctgccgaccgcgctggtcaaacccttctccggcagcgccgcgcgggcgttgctgatcgagaccatgcagagccaaggcgtcgacagcttcccggcgctggtggctgcgacggtacagggcagcaccgagacgaccttctatgtgctcgcggtgtatttcggtgccgtcggcatccagcgggcgcggcatgcggtgggatgtgcgctggcggcggatttcgccggtatcgtggcggcgatcctggtctgctactggttcttcggttgaatcgggtcgctaagcggtcagcgcagcgctttgcttctaagagcgcttagaaagaacccgccaatcggcgggtcaatgcgtggcccgttgccaaagccggaagatcggctcggccaggaacatgacgagaaacaaccgcaacacctgcagcgccgtgaccagcgcaacggacagttgcagcgcctcggcggtcaggcacagctcggtgatgccgcctggcatcattcccagcataagcgacgtctggttcagcgtggcggcccaacccagcgcttcggccaggcctgccgcggcgagcatcgccagcagcgtgaacagcaggattcgcagcatgaagcgaggggctgtgcggaaaaacggtcgatcgaagtgacaacccagggagcagccgatcagccattgaccgaactggccgacgccttgcggcatacccagatgcaggtcgaagacggcgctggcgacggcacacaccgtcagcggtccgagcatccagggattgggttgatcgagcttcctccacagcaacgccagcagcccgccagccggtagcagaacggccagccagggccaactgaccggtgccggcggcggggcgtccaccggcggcaggctccaggtgaacacggcggggatgaccaacaccaccagcaacagccgcatgctgtgggccgcggccaccatggccggctgcgcggcgtgccgtgacgccaggttgaccatctcgctggcgccgcccggcatgctggagaagaacgccgtggcgcggtccatgccgctgcgcagcagaatgaagataccgatcaggctcagcaacagagtgcccagcgcgccggcgaggatcacgccgaaatgctcgaccacctgctgcatcacgtcgctggtgaaatgcaggccgatggcgctggcgatcaaccattgcccggtctgccggccacgaggcacttcggcgatcagccagccactgcaacgcaccgcgatgactgccagcagcgagccgaccatccagggcagcggccagttcgccagacttgccagccagccgccgagggcgccgaccagcggcgtcgcccaccaccccggaagccagcgcggcatctcagacgtgcgcctcgttcagcttggtacggcggcgctggcgccaccagcgcaggcccggcatggccagcatcagagcggccagcgcccagaggatcagggtgatcgggctgccccagaggatgcccaggtcaccggccgagatagacagggcgcggcgcaggttgtcttccatcatctcgccgagcacgaagccgagaatcagcgacgacagcggaaactccaacttgcgcagcaggtagccgaacacgccgagaccgaccatcagcaccaggtcgaacgtggtgctgtgcaccgaatagacgccgaccaggctgatcgccgtgatggccggcaccagcacccagttgggcacgctgagcatcttggagaacaggccgaccagcggaatgttcatcaccagcagaatcacgttgccgatgaacagcgaggcgatcaggccccagaccacgtcgggttgctgttcgaacaacagcgggccgggcgtgatgttgtacagcgtcagcgcgccgatcatcaccgcggtggtgcccgagcccggcacgccgagggtcagcatcgggatcagcgaaccgcaggcggaggcattgttggccgcttctggtgcggccaggccgcgcaggtcgccctcgccgaacttgcccgtgtcgccggccatgcgcttttcgctcatgtaggtcatggcgctggcgatggtggcgccggcacccggcaaggtgccgatgacgaagccggccagggcgctgcgcaccatggtccagaacgtcatgcagaactctttgaagttgaacagcagacgcccgctggccttgaccgctttctgcccgctgtgggtcttttccagcatcagcagcacttcgctgacgctgaagaagccgatcaccacgatgacgaactggatgccgtccgacaggctgacgctgccgaaggtgaagcggtagacaccggtggtggcgtcaacaccgacggtcgccaggcccaggccgatcagcgccgccatcagggttttcaccggcttgtcgccgaccatcccgccgaggcaggcgatggcgaagatcatcagcacgaaatattccgccgggccgaaggccaccgcccatttcgccagcagcggggcgaacagcaccacgccgcaggtggcgatgatgctaccgatgaaagagctgaccgccgacagcgacagggcgatgccagccttaccctggcgcgccagcggataaccgtcgagggtggtcatcaccgccgcggcgtcgccgggaacgttgagcaggatggccgaaatacgcccgccatactcgcagcccaggtatacggcggccagcaggatcagcgcggtttccggtggcaggcccagggcgaaggccagcggcagcagcagggccacgccgttgatcgggcccagccctggcagcaggccgacgatggtgccgacaaaggcgccgaacagtgccaccagcaggttcatcggtcgcgtggcgacatcgaagccctgcatcaagaaattcaaggtttccattttcagctctccagcaagcgcagcacgccgagcggcagcggcacatcaagcaacaggtcgaacaggccgtagagcagcacgcccatcagcacgccactgagcaggctgggccacaggcgaccgttgaacagcaggcccagggcaaaggcggccagcgccgtggtaatgacgaagccaagcggctcgaacagcagcgcataggccaccaggaccagtacgcaaagcgtcgctcgtcgagccttcgcccaatcgaacgggggcgtaggatcgccgtgtggtttgcagagcagccagagcgcgccgcaggccatcaggaacaacagcaggagcgggtaggcgcgcgggccgaccgggtcgtaggcgaacggcgcctcgaagccccaggcgagcagcgcaaggccggcgcaggcgagaagccaggccgccgcaaaaacacgaacgtacatggtggttacctcgagaggggagcgggcctggggttccatccggaaccccaggcccgtggggtgttacttgaccagaccgaactcggcggcgagttccttgtagtcggcgacctgcttgttgacgaaggcggtgagctcgtcaccagtcatcgatagcgggaacaggtcacgctgctcgcgcagcttggcgaaatcctcatcggcgagcagggtgtcgaactgggtcttccaccagttgaagtcctcgtcgctgacttccgggcccatatagaagccgcggatcaccggccagctgatgtcgtagccctgctccttggcggtcggcaggttcgacagcttgccgggcaggcgatcgtcggacagcaccgcgagcacgcggatcttgcccgcttcgagctgtggcgcgacttcacccaggccgctgctggtgacctgcacgtggccaccgagcatggcggtcaaggtctcgccgccgccctcgaaggcgacatagcgcagtttcttcggatcgacgccagcggcgcgggcgatcagtgcggtctgcatccagtcctggccaccgatggtggcgccggcgccgaagaccacgctgccggggtccttcttcaccgcggcgatcaggtcgtcgaggttcttgtagggcgcgtcggcgcgtaccgaaatggcgccatagtcggtgccgatgccggccagccagcgcacgttggtctcgtcgtaacggccgaacttgccttgagccaggttcagcagggagccgctggagaacgcggtaatggtcgacgggtcatcggcacgctgggcaatcacggcgttgtaggccaccgcgccgacaccgcccggcatgtaggtgacgcgcatcggcgccttgagcagcccttcgtccttcaggccgctctgggccagcttgcaagtcaggtcgaagccgccgccgggcttggctggggcgatgcattcggggcgcttgggttcggcgaacaactggctggacaggaccaggcaggacgagagcagcgcgatgcggcggatagcagttttcatggggtgtctccttttcattcttattgtgggcggctttaccagatcggcaggctgtagctgacgatcaggcggttttcatcggcgtcgcgggcgaaatcggagcggaacatggcgttacgcatgcgcacggcgacgtttttcaacggccccgtctgcaccacgtatttgagttcgatgtcgcgttcccattcgctgccgttgctgccgccggtgtactcggcgttgtcgccggaaatgtagcgagtcaggaaggttaggccaggcacgccgatggaggcgaagttgtagtcgtaacgggcctgccaggagcgctcgtcggcgttggcgaagtcgttgatctgcacgaagttgaccaggtacgggtcgccgccatcgatgtaggcgtagccggtatcgccgttcatctgctggtaggcgaggctgaccttgtggccaccgaggctgtagccgagcacgccgttccaggcctggttgtcgatcttgccggcattcgcggcgccggtgtcatcgctgatcatcaggcgcaggtcggcggtcagcgccgagtccttgcccagcggctgtacggcctgcaggttgaagaagtgctggcgatagatgtcatcgagctcggcggcatagtaggtgccggtgaagcgttcgctgaaatcgtatttcgcacccacgtaggtcagatgatcggcttcggcggcgctgtcgaagcgacgattcttgttgttcagctgcagatcctgggaattggtcgaggcgcggtcgattaccttgtccaggcgcccgccggtgagggtcaggccggccagctcgcgggattccaacgtggcgccctcgaacacctggggcagggtgcggctgtcgctggccttgaccaccggagtttcggggatgtggctgccgtagcgcagctcggtttcggagattttcgctttggcggtcaggcccagccggctgaactcgtccggggtgctgccgtcgtcatgcaccgggagcagatcggtacccgtgcggccgccgcccgaatcaagcttgatgcccaacatgcccatggcatcgaggccgaagccaacggtgccttcggtgaagcccgattcgatgttgagcagaaagccctgcgaccattcttcgcgtttggactggccggtgccttcgcggaagtcgcgattgaggtagatgttctgggtttgcagggtcgcatggctgtcttcgatgaaatcggcctgggccaggggcgccaacgaggcggctgcaatggcgagggcgagacgagcctgtacggggttggttctgacggcagtcagcatcctgtatctccactattgtttttgttgtggcggcgttgtgccgcaccaggtggttcgagccacctgatggcgatcctaggcggcgaaactttcgccaggctttcaggcgtgaaagcagcgtgcggcgtgccgtgtcgctacactggcggcccgttccgtgtgtggcagaggacaggcaatgcggatacttctggtcgaggatcatccccaactcgctgaaagcgtggcgcaggcgctgcgcgcggccggctggacgctggatctgctgaatgacggggtggcggccgatctggctctggcgaccgaggattacgccctagcgattctcgacgtcgggctgccccggatggacggcttccaggtgctggcgcgcctgcgcgagcgcggcaagacgctgccggtgctcatgctcaccgcgcgcggcgaagtgaccgaccgcgtgcatgggctcaacctcggcgcggacgattatctggccaagccgttcgagctgtcggagctcgaagcgcgcgtcaaggccctgctgcggcgcagcgtggccggcggcgaacgccagcagagctgcggtgcgctggtgtatgacctggacgcccgccgtttcagcctcgatcgtcagcccttgaccctgacctcgcgcgagcaggcggtgctggaagcgctgatcgcccggcccgggcgagtcatgagcaaggaccagttggcggcgcaggtcttcggtctggacgaggatgcaagcgccgacgccatcgaaatctacatccatcgcctgcgcaagaagctcgagggcagcgcggtgcgcatcgtcaccttccgtggcctgggctacctgctggaggccgccgatgcctgaagcggcgccttcgcgcgccgggagcctgcgcaccgggctgctgcgtcgcctggcggtgctgctggcgctgctgttggtcttcagcggttggagtgcctactggaacggccgcgcggcagccgactcggcttacgaccgcaccctgctggcctcggcgcgggcgatcgccgaggggctggtggccagcgacggtaagctgcgcgccaacgtgccttatgtggcgctcgataccttcgcctacgacagtgccgggcgcatctattaccaggtgctcgacaccgccggccggctggtcagcggctacgaggacctgccggccccgggagcgggcgtgcctcgcaccgacgactacccggcgctggcgcgcttctacgacggcgagttccgcggtgagggcgtgcgcctggtcagcctgctgcagccggtcagcgagccggagctgaacggcatcgccgaaattcgcgtcgccgaaaccctcggcgcccgcgagcgcatggcacgcagcctgctcaccgatacgctctggcgggtggggctgctggctatcaccgcgctgctgctggtctggctggcggtgagcgccgcgttgcggccactgggcaaactcagcgaagcggtggagctgcgccagccggacgatttgcgtccgttgccgctggtcgccgttcagcatgagttcaggccattggtggccgcgctcaaccatttcaccgagcgcctgcgtggccagttcgagcgacaggcgcaattcatcgccgatgccgcccacgaattgcgcactccgctggccgcactcaaggcgcgcatcgagctgggcctgcgcgagcagcaaccgcaacgctggcaggaaacgctggaagaagccggggcgcataccgatcgggtcatccatctggccaaccagctgctgtcgctggcgcgcatcgagagcggcgcgcaggcgatcgccgagggcggcgcacagcgcctcgatctgagccggctggcccgtgagctggggttggcgatggcggcgctggcgcataaacgaggcgtctcattggcgctcgaagctgaccgtccggtatggatccatggcgagccgacactgctcagcgaactgctcagcaacctgctggacaatgctttggcacatacgccgaacggcggcaacgtggtgttgcgcgtaggtgatgaaggtgtgctggaagtcgaagacgacggacccggcatcgccccggaggaacgcgagaaggtcttcgctcggttctaccgcgtgcaacaacaggggcagggcgccgggctggggttggcgatcgtcggtgaaatcagccgggcccatcgcgccaccatcgaactgggcgagggggccttgggcgggttgctagtcaggctgcgtttcccgccgagcactgactgaatcagctcacctcgtccgccaccaccacctggttgcgtccgttgcgcttggcgcgatagagcgcggcgtcggcggcggcaagcagctgggccggtgtacgcgccgtcggcggttgcagcgtggccacgccaatgctgatggtcagatcgagacggcggtcgccatgggttgggtgcagctcggcgatcgccgcccggatccgttcggcctgttgctgggcccggtgaccgtcgatgccgggcagcgcgatgacgaattcctccccgccgtagcgcgccaccatgtcgccggcacgctggccgtgctgtttgagcgtggcggacacctgccgcaggcactcgtcgccgaacggatgtccgtaggtgtcattgatctgcttgaaatggtcgatatcgagcagcagtaccgacagcggctgctcgatgcgctgcgcacgacggatctcttcgtcgagggtcaggtcgaaatggccgcggttggccaattgggtcagcgcgtcggtggtgctcatccgcttgagttgcgtgttgaccgcttccagcccgcgcttggcttcttccagcgcgcgggtccgttcgaacactcgtgcctcgagcacttcgttggcgcgcatctgcaactgcagcgcctcctgctgtgcccgcaggcgcgactcccgttcctgagccagcgcctcggaagtacgcagggcgctgttctgggcctcgatgcggcgctcacgctcgtgattgatgcgctcggccagtgccatggacaacagcacgaattcgacgaacatgcccatcaactgaccgttgagggtccagatattcagcggcagcagcccttccagggccagcagatgggcgacggtgaacatcagcagtgtcgcccaggcaatggtgaatcggcgcgctgaagcattgccgcggatccacaaggtgacggtcaccgcgatggtcaggccgcagtggaccagtgccatcgtctcgatcgccaggtagcgcgtcagcgccggtgcgaacaggatcgccagcaacaccgtgccccagtagccgatcaacagcagcgtgacctgccagacccagccaccgtagcggcggatattcaggaagcggctggcgaacaccagcggcgtgaagaaacacagcgtcgccgacaggccgtagaaccgatgggagaacttcggcgcctcaggccagagaaacagctggccgaagccggtgatggtcagcacgtagaacagcgcactgagcaggtaggtgacatacagcagatagctgaggtcgcgggtgaacacgaacaggctgcagttgtagagcaggatcaccagcatgccgccgaagaacaggttgatcatcgccacatcggcgattttcccggcgaggaaccccgtttcgtcggcaatcgtcatcggcagcgcgatcaactcgcgcgaccgtacgtgcacgtagaccacggcgtcttcttcggcatgcagcgacagcgggtagacgaagttgtgatcggtccgtggccgctcccgcatcggcaaggtatccccggcgcgcatcggcgggccccattggtcgcgttccgggtaatacagctgcacgcgtacctcgtccagaaccggccatttcaggctgaaataccaagtgcccgcccgggcggaggggttgcgcagggcgaagcgcagccacacgccgtcgagttgccgctgcaggttgggccgctcgagtggctgccagccccaggccgcgccacggacgctttcgaagtcggcgtccggatgcccgggcaggtactcgatggcgcccgcctggagcccatgaaggttctggcttgccatcgtcggcttgagctgcgccgccgccaggccacaaaagcccatcagcagaacgaagaacgcaacgagcgacgagggatggcaacgcattcgctgaaccttatgcagtttcgcggacgcccaggaggtcgcccgtcgttgagatgtcgcgcttctgacgtcaaaaacgatacggcgaatgtcgtctcgatgccagcgccaggcccctgcgacggacgaaccgcttgatcgaaatcatcaccggcgttgacgcatgcggcatgctgcctgccggaacgctcgacgggcgggcgagtcagatagcaggcagcaacggtatgaccggccggaggcgctttttcgccagcgaatgcagctgccgtgactcgcgaaatccgatggcctgctagactccccacttctcgcccctggctcacgaggccgtgcgagacaatccaaaacaaccaataaggagtgaatccatgaaaggcaaatccttggcatggatattttccgccgctttggcgggaactgggctgggcggtgtggctcaggcacaagagcaattcgtgaccatcggtaccggtggccagacgggcgtctactacgtcgctggtcagtcgatctgccgtttcgtcaaccgtaacgccgaggatctgaagtgcaatgcgcccgccagcggtggcggcgtggccaacgtcaacggtctgcgcagcggcgaattcaacttcggcatcatgcagtcggaccaccagtacaaggcgatgaaaggcctggagccgttcaagaacgaaggcgcgatggatgacatccgtgcggtcttctcgctgcagagcgaagtcttcaccgtgctggcgcgccgcgacgccaacatcaagggcctggacgacctgaagggcaagcgcgtcaacatcggcaaccccggttccggtcagcgtgacaccctagaagaaatcatggccgagaagggctgggacaagtcggtctttgccctcgccgccgagctcaagccggccgagcaggccagcgcactgggtgacaacaacatcgatgcgatgacctacttcgtcgggcaccccaacggtgcgattcaggaagccaccaccaccgtcgacgccgttctggtgcccatcaccggcccggaaatcgacaagctgttgtccgagaagagctactacaccaaggcggaaatcccgggtggcatgtacaagggcaacgacagcgccacgccttcgatcggtggcaaagccgttctgtcgaccacctccaaggtggacgctgacgtggtctacaagctggtcaagtcggtgttcgagaacctcgagcgcttccagcgcctgcatccggcattcaaagacctgaaagccgaagacatgatcaaggtcggcctgtccgcacccttgcatgaaggtgccgtgcgttactacaaggaacgtggctggatgtaacggccttctaggcttgctgcaccgatgcggcaagtctgccgtacgcggctttcgcctgagaacccgtgagcgcatgccacgggttctcgcggtttccgttacctgaaaaacaggcctcatttcatgcaagacaaatcactttccacggaagagctgatcgccaaagacgtcggcgggcgcatccccgaaggcgccatggccaagctgattgcagcgctggcgctgctctggtcgctgttccagctgtggatcgcttcgccgctgcccttcatgctgcgcgtcggtgtgttcaacaacaccgaggcccgggcgatccacctggcgttcgcgctgctcctggcctttctcgcctacccggcgttcaagcgttcgccacgcgatcgcgttcctctggtcgacatcgcactggggctgatcgccgctgccagtgccagctatctctacttcgcctacgagcaactggcccagcgtcccggcaacctgacgaccctggatctggtcactgcctgcgtcggcattcccctgctgctcgaagcgacccgccgtgcactcggcccggcgctggcggtcatcgccctgatctttctcggctacagtctggccggtccgtacatgcccggcctgctggcgcaccgtggcgtgagcttcacggccctggccaaccaccagtggattaccactgaaggcgtgttcggcatcgccctcggcgtgtccaccagtttcgtctttctgttcgtcctgttcggtgcgctgctcgaacgtgccggcgccggtcactacttcattcagctggctttcagcatgctcggccatttccgtggcggaccggccaaggcggcggtcgtggcttcgggtatgaccggactgatttccggatcctcgattgccaacgtggtgaccaccggcaccttcaccattccgatgatgaagcgcaccggcttctcggccgaaaaggccggcgcggtggaagtggcctcctcggtgaacggccagatcatgccgcccgtcatgggcgccgcggcgttcctgatggtcgagtacgtgggcattccctatgtcgaggtgatcaagcacgccttcctgccggcgctgatctcgtacatcgcgctggtctacatcgttcatctcgagtcgctcaagctgggtctcaccgcgcttccgcgggccaacgtggccaagccatggatgcagcgtctgatcgggttcgtcttcggcgtcgcgttgatttcaggcatttcgctggccgtttactacggcctcggctggttgaagccggccttgggcgacgcggcgatctgggtaatcggagcgctgttggtggcggtgtatctgggcctgttgaaggtcgccgcgagcaacccgccgctgccaccggaggatcccaacgcaccgcttgaaaaactgccggaaacccgtcctgttctgctgtccggcctgcatttcctgctgccggtggtggtcctggtctggtgcctgatggtcgagcggttgtcgcccgggctgtcggcgttctggggctcggtgatcctgatcatcattctgttgacccagcgcccgctgctcagctggatgcgccgtgatggtacccatcagcacggtaccttcatggatggcatggtcgaccttcgcgagggtctgatcgccggcgcacgcaacatgatcggtatcggcattgccacggcggcggcgggcatcatcgtcggtgcggtgtcgcaaaccggtgtcggcctggtgctcgccgatctggtcgagctgctgtcgatgggcaacctgatgctgatgctgctgctcacggcatttctcagcctgatcctcggcatgggcctgccaaccaccgccaactacatcgtggtgtccagcctgctggcgccggtggtggtggcgctggggcagcagagtggcttgatcgtgccgctgatcgcggtgcacctgttcgtcttctacttcggcatcatggccgacgtcacgcctccggtgggcctggcctcgttcgccgctgccgcggtgtccaagggtgatccgatcaagaccggcgtggtggcgttctactacagcctgcgtaccgctgctttgccgttcctgttcattttcaataccgacctgttgctgatcgacgtggacttctggcacggcgtggtgatcttcataatcgcgaccttggcgatgctgatattcgccgccggcacccaggggtacttcctggtccgcagccgctggtatgaaaacatcctgttgctgctgatcgccttcaccctgttccgtccgggcttctggatggatattgtgcacgacccttaccgcgacattccgcccgcgcaactggtgcaggcgctggaaatggtcgatgaggacagccagctacgactgcgtatccgcggtgaggatgccgttggtgacgtgcgtgactttagtctgctggtcgcgatcccggacggcgaaaccggcgaagagaagctggaaaagctcggcctgatgacctacgaacaggacggcaaggtgctgatcgacagcgtgaccttcggcagtcccgccgccgaactgggtctgcagttcgaccaggagattctcgccgtgcgcgcgcccaccgatcgcgtagccaaggaatggatgtggctgccggcgctgctgctgttcgccctggtggtctggatgcaacggcggcgcaagcgcgagtgatcgcacggcaccgctaacccgaccccggccatgcctcgcatcgccggggtttttttcgcatcgacgtgagagctgttcgagccgcgtttggtcgtcggctcgatccgggtcaggccggtttgccgggcggcagttgcggatccgtcagccgagcgtcaagtgtggtctgggagtcgttcgtcacgcgcgcccgcccgctgccggagctctccagcgccgcataggccgcgctgcagaacagggaattcagacgtttcatgtcggcgatcaactccagatgcgcggcgctggtttcgatgctctccaccacttgttgatgcaggcgatgcacgtgggcatgggccagctctcgctcacgcttgcggaactggcgcttctgctgcaacagctggcgggcactgtgcgagtccccagaaacaccgacaggcccaggctcaggttggcgctgagcaacgcatgcagctggctgagttcgtccaggccgcgatcggaaaaggatcggcgcttggaaatcttcaggttctgcactttgccgagcatgtgctcgatgatgtcgccggcctgctccaggttgattgccagctcgatgatctccgcccagcgtcggctttcctgttcggccaggtcctcgcgcggcatgcgcgcgaggtagagcttgaccccgctgtagagggcgtcgacgtcatcgtccaggcggcggatctcttcccccggctccgggcggtcctctcgcagggcctcgagcaggcgcgccagcatggtttccaccagatcgccgatgcgcagggtttcccgggtggcattggccagcgccagggtcggtgtgtccagcgccgtggggtcgaggtgacgtggctgggcgatacccccagcgagcaagcgttccggcagcaggcgctcgcaaagccgagccatcggccccaccgtgggaagcaacagcaggcagcgcagcacgttgtaggtcaggtgaaagacgatgacctgggtctgcccgctgaggccgagcgtcgccatcgcctcgaccagcatcggcaggaacggcaacacggacagcccggcgagcttgtacaacaggttacccagcgccactcggcgcgcgggtaccggttgcggcgtcgcattgagccaggcgagcaggccgctgccgacgttggccccaatgaccacgccgagtgccacgggcaggctgatcaggcctgcgctggccagtgtcgccgtgagcagtacggcggccaggctggaataggagagcaacgcgaagactgcgcccacgaccactgcgagcagggtatcgccagccagggaggagaacagtacgcgcatgccgcgcgcctcggtgatgggctcggcggtggcgacgatcagttgcagcgccagaataatcaggccgagaccgatcagcacacgccccagctgcccggcacgagtctgcttgcgcgacaggaacaggcagaccccgaccagcgtgaacagcggcgacagccatgacagatccaacgtcagcacacgcgccatcagggcggtgccgacgtcggcgccaagcatgatcgccagggcggtgggcagcgccatgagtccctgggcaacgaacgagatcgccagcagcgcagtggcgttgctgctctgcaccagcgcggtgacgccgagccccgcggtgaacgccagcggcgcgttggccatgctgcggcccagcaaccgccgcaagtgcgaaccatagactcgcatgatgccggtgcgcacgatgtgcgtgccccagaccagcagcgcgatggaggacagcaagtgcaacagcgtcagcatcaggcacggcctccgataagtgaatgatccaatgcttacggcacccaccgcgcctggggctatgcagggcggtgggttatataaagtggaccatcttcggcagtcggccgttcacgacgctgtcacatcgatggcatcgctggcgcggtgcgtcgctcagttcgacgagtagtagccgacgccgagcaatacgtcatttacccggcggatcagggtgtgcttcttctcgaccgcgttggtagccgggttgcgccagacgtaatcgaccgtgccggtgcccttgtccttggccagcgcaatcatctgcttgaacagcggcgtaccggcggcatcggtgatttcccgcacatcgacgccgaccaggttgggcgaggcgccgctggcacggtatttaccgtcgtccaggccgatggcgaagacgtactcgtcgttcatcacgaagccaccctgtggatcgttgaacgccttgaacgcagcctcgccgcccgagcgtttgaccagcgcgaccgcttcgtcgagcatcttttgcgcctgctcggcggacgagcgcgggatgtagtagcccaccgcgatgatccggtcgccgaccttccggtacaggctggtcttgttctccaccttgttatcggcgggattgcgccagtggtaattgacctggccactgtcggcggttttggcaccttcgacgatctcgcggatgaagggcgcgccggaggcgtccttgagactcatcacgttgagtccgaccagcgcgcgtgaagcgccgttggccagcatggtgccgtccgtgtccagcacgaagacatagtgctggccatcgacgaagccgccctgatcgtcgttgaacgcggcgagcgcctgatccggccccttggcctgtagatgtgcggcggcgcggtcgagcagagcgctggcctggcgcgcatggctacgttcgaccgagcccttggtcggggctgcatcgctggcggcgtaggtcagcgggctggcgcagagggctgcgcccagtgaaaggatcagcaggttccggttattcagcttcattgatttgctcctggcctgaggcaggcgaaaggctgcagagatacttggggtctgcctgctatggaatatcctatggcgcgtagggggattgatattgatcacaaggaccgttgggttcctgcgaaaggagtaggaaaaaacgccgcaccggcgatcggcggcacgccccgcgagctcgccggaacttgctaccctctgccgctgatccagccgaagttgccgccatgctcaatctctaccacgcccccgacctggaaaccctcggtgaactggccacgcgcctgctcgcccagccgctggccgaccccttcgccccggcgcgggtggtggtgccgagccagggcatggggcgctggctgacgctggagctggcgcgcaagcagggcatcgccatgcagctggacatgcagctgccggcgaaattcgtctgggacctgagccgcaccgtgctgggcagcttgccggagcagtcggcgttctcgcccaccacattgacctggcgggtctacggctggttatgcgagccggccaacctcgagatggcgccgcgcctggcgcaatacctcgataacggcgatgagcgccggcggctgtcgctggcggccaagatcgccgacgtcttcgatcagtacctgctctatcgcgacgactggctggccgcctgggagcgcggcgaaaccctcgatctcggcccggacgaagcctggcaggcgctgctctggcgtgagctgaccaaggacggccatccgcatcgcgcgcggctgctcggcgacctgctgcaacgcctctatagcgacgaacccttgccgggcttgcccgaacgcttgctggtgttcggcatcagcagcctgccgccgcaccacttgcgcgtgctcgacggcctggcacgacatatcgacgtggttgtctgcgcgctcaacccgagccgcgaggcctggggcgagatacgtgatatccgtgagttggcgcggcagcccgagagcggcgccgatgattggtatctggacgtcggccacccgctgctggcgagcctgggcaagcaggggcgcgactttttcgattcgctgttcagcctcaccgccagcgaaggcagcgaggaattcggcctgtattccgaagacgaagacctgcgcgacgacagcctgctgcacgccttgcagaacgacatcctgcgcctgcgcacccggttgcccgacgagcgcatcacgctcgccgaagacgaccgttcgctggaagtgcacatcgcccactcgccgctgcgcgaggtagaaatcctccatgaccagttgctggcgcgcttcgctgccaacccgtcgctgacgccggatcaggtggtggtgctgacccccgacatcgaacgctacgcgcccttcatcgaagccgtattcgccccgcgcgagggccgtccgcggattccctacagcctggccgaccgcagcctgcgcgccgaagtgccgctgatcgaggccttccttgagctgctactgctggcccagagccgcttcgccgccgaagaaatcctcgcctggctggagcagccggccatcgcccgtcgcgccggtatcgaaagcgaagacctgccgctattacgcgactggctgcgcgaagccggtgtgcgctggggccgcgacggcagccagcgtgcccgtctcggtctgccggacgaatcggcctttacctggcgccaggggctggaccggttgctcctgggcttcgccgcaccgccgcaactggccggggacgatgcgccgttgctcggcgaacactggccgctggatgcgctggaaggcgcccgtgggcagttgctcggtcggttggtggggttcgtcgaacgtctcggcgttctggccgaccagctggcccggccgcgtccgctggctgaatgggcggacgatctgcaagtgctgatcgacaccttgttcgacgagcgtgaagcgggcgacacgctgctgctgttatcccaggcctgcgcggcgttgcgcgatcaggcccaggccgctgacctgacgcggcccatcgagctggaactggtgcatcagcaactcagcgccgcgctgcaacagggcggtggcgcctcgggattcctcaccggcgcggtgaccttctgcaccatggtgccgatgcgcagtctgccgtttcgcgtggtctgcctgctcggcctggacgatggggccttcccacggcgcacgccgccgtcgggcttcgacctgatcggccggcatccgcgccgtggtgaccgggcacggcgtctggacgaccgttatctgctgctggaaaccctgctctcggcgcgcgaggcgttgtacctgtcctacgtcggccgcgacccgcgcgacaacgccgtgctaccgccgtcggtgctgctcagcgaagtattggaagccgtcgacctgactgccgtctgcgggagcgggcttgcccgcgatcctgccagcaccgatgcctcacagccgaaacagcccaaggccagcgagaagattctcgtcgcgcatccgttacagcccttctcgccgcgcaacttcggcgacgcgccctgcgccgggttctcactgccctggttccgcgccgcccagcgcttggccgaaccgccgctgacccagccgcagccattcgccagcctgctcgccgagccggacgaagcctggctgaccatcgaaccctcacagcttttgcaatgcttccgccatccgccgcgcttcctgctcgagcagcgcctcggtctgcgcctggccgacgatcaggaatcgctcgccagcgacgagccgttcgatctggaaatgcccgcctggaatgggctgcgacgtctgtcgctgcaagccatggagcacggctggagcgatgaagatgaacgccgaatggcctgtgcgggcggctggttgccgacgggcgaattggggcaggcgctgtggggcaagctgcgcgggccggtgcgggcgttcgcgccgcggctgttcgaactgcgccccgaggcggtgcccgagccgctgccagtggacatcaccctggccggcgtgcgcattcatggttggctcgacggcgtgaccccggccgggctgttcagttggaagctcggcaagctcggcgaatgggacctgccgccgttctggctgcgtcacctgctgctcaacctgtccgcgacgcccggtatcgagcgccacagcctgatgctgtcgccggccggcgactggcagctcgggccgctggccaatgccgccgagctgctcgaaccctggctcgcggcctatcgctgcgccatccgcgagccgctgccgctgttggcgcgcagcagtcatgcctttgcccgcggctatcgcaagccgagccgtggcagtgagccgctcgactgcgcccgcaaacgcgcccgcgaagcctggctcggcgccgaattcagccccatcgccgccgaatccgaggacccctggaatgcattggccttccgcgatcgcgatccgctggacgagcgctttgaaacgctggctcaggaattgatcggcccggcgctggatgcgttggctgaggaagaggaggaagcatgaaactcgacctgctcgactcgcccttcgatggtcgctcgctgatcgaggccagcgccggcaccggcaagacctggacgctcacggcgctctacgcgcgtctgctgctggaacggcagctgtcggtgggacagatcctcgtggtcacctataccaccgccgccaccgccgagctgcgcgaacgcattcgtgcgcggctggccgatctgttggcggtctatgacggcacgccgagcactgatgacttcctcaatcgcctgcatgcgcgctacccggatgaagcctcgcggcggcgcctgctgctggccgtgcacggcttcgacgaggcggcgatcttcaccattcacggcttctgccagcgcgccctgcaggatgcggccttcgaggccggtggcgatttcgacagcgagctgaccgccgacgaccgcgagatcatcgacgcgctgctcgccgacgcctggcgcagcgagctggccgacgccgatccggcctgggcgcgctttctggccaagagccgcatcacgcccgtgtggttgcgccagcgcctgcgtagccacctgggcaagccctacctgcgggtcgagccacagggtgcgccgatcgccgccgatttgcgtccagtcgaagccgcctggcaacgtgccgctgatttatggaaaagcgcgggcaccgcctgggtcggcgaattgctcgcccacggcggcctcagccagagcacccacaagtccatcaagttcgcgccctggcaggcggagctggacgcctatttcgccgacccggcagtaatgttcgacctgcccgagggcgcagccaagttcggcgtgcgggccttgagcaaggcctgcaagaagggccatgacgcgcccgtctgcgagctggcccatgcgctggacgacctggccgatcaggtcgccgaggcgctgccggccggcaagcaacggctgatcgctctgcaggtcgcgctgctggagcggctcaaccgcgagctgcccgagcgcaaggcggcgcagcggctgctggccttcgacgatctgctcaaccgtctggatcaggcgttgcagggcccggtcggtgaggacctggcgacctcgttgcgagccacctatccgctggcgctgatcgacgaattccaggacaccgatccgatccagtacgccatcttcaaccgcatctatgccaaggccagcgaggcgtcgctgtgcttcgtcggcgatcccaaacaggcgatctacgccttccgcggcgcggacctggcgacctatatgacggccaagctgcaggccgatcgcgagcccttcaacctgccgaccaactaccgctctacgcccgagctgatcgccgcactgaaccagctgttcgaccatccgcagccgttcgcgcagggcgatctgcggtacccgccggtgggcgccgcacaaaaaacgcgcgccacgctgcgtctggtggaagagggcgatgccgcgccgctgtcgctggtctggcttggtgacgatccgctgggcaagggcgaggccgagcagttggcggcgagcgacaccgcgcggcggattgccttgcagctggcgggtgccgccgaggggcgtgcgggtttcgaggaggacggcaagctcacggctctcaagggcggcgatatcgctgtgctggtcgccaaccaccggcaggccgggatgatcgccgacgagctggcggcgcgcggcgtgcccagcgtgcgtcggggccgcgacagcgtctggcgcagcgaggaggctggcgaactggctgcggtgctggccgcctacgcagaacccggtcgcgagggcttgctgcgctatgccctggccacacgcctgctgggccgcagcgctgccgatctcgctcgctgccaggatgatcagcaacagtgggacgccgaacgcgaagccgccgagcgctatcaccagctctggcagcagcagggcttcatgcgcgtgtttcgcgcctggctcgacgagcaggcggtggccgagcggctgctggcacgggtggatggcgagcggcggctgaccaacctgctgcatctgggtgaattgctgcaggccgaaagcctgttgcgcccgggactggaacccctgcttgcctggttcaacgcccaacgcggtagcgaaggcgccggcgaagaagcgctgctgcgcctggaaagcgatgccgaacgggtgcagatcgtcaccatccacaccagcaagggcctggaatatccgttggtgttttgcccgttcctgtgggacggcaagctgctcggcaagaaccgcgacagtgctcgttgccacgatgcgagcggccagccgctgctggacctgggcagcgacgctctggaagacaatctcgaacgtgcccgggaagaggtcttcgccgagcagctgcgcctggcctatgtcgccctgacccgcgcccgcgatcggctctggttgcactgggggcctgtgaatctgtgcaagccgaagaaggacggcagcctggcagacgaaggtttgcacaccagcgcgctggcctggctgctgcacggccgcgaactgcctggtgagcaaccgttgagcgagttgggtagtcatctggccgtcctcaacggcggcagcctgcgcctggccatcgaacggctggtgcaggggagcggcggccatatggcgtgcttgccgcttgaatcgcgcgaggccagcgcccagggaccgggacgggcggcgccgcccaagcggttgtcgcagctcaaccgcaacctctatagcgcctggcgcatcggcagcttctcggggctggcggctggcatgcatatggaggcgccggaccgcgacgccctggccatccccgatgccggcgagccgggcaacggtttctttgcctttccccgtggtgcgcgggcgggtacctgcctgcacgccatcctcgaagactgggcgcgtggcaagggcgaactagagtcgctggtcgagcccgcattgcaggcctacggcctgccgctggagtggaaggagatcgccacgagccatttgaaaaaggtgcttgaaaccgatctggacggcgccggactgaccctcgccgcactgcaatcggccaggcggctgcccgagctgggctttacctttccggtgcaggacctggacgtgacgcggctgcgcagcctattgaccgatccggccaacggcctcgccgagcctctgcgcgaggcggcggcgcggttggagttcgacagcctcaagggctttctcaagggctttatcgacctgaccttcgagcatgacggccgctggtacatcgccgactacaagtccaactggctcggcccggacgccagttactacggcggcgagcggctgctgcaggcattggccggcgagcattactacctgcaatacctgatctatctggtcgcactgcggcgcttcctgcgccagcgcctggcggatttcagcgacgagcagctgggcggtgccttctacctgttcctgcgcggcatgcccgaagccggcgtgtatttcgcgcggccggacgatgcgttgctcgatgcactggatcggttgttcgaggaggggcggtgatggcgcttattcgcggtcaagaccgctcccacaggctgggttggctacgggcgattgggctgattgttcgagagcgcggtgatggtgctttttcgcggttgagaccgctcccacagggtgcgtgtggtgggctggctgtgggcgactgggctgattggttgggagcgtggtgatggcgctttttcgcggtcgagaccgctcccacagggtgcgtgtggtgggctggctgcgggcgactgggttgattgtttggggcgggcggtgatggtgctttttcgcggtcgagaccgctcccacgaaaatccctgtctgctatcccagcgtggtcaaggccatccacacagaggtggagccagtctccgtgggagcggtcttgatcgcgaatcggccttgcggacagccgcagcatttatcttcaggagcacccgatgaccttcaccgatgtgccgctcggcccactggaacgcgccttcgtcgccagcctgcaacgcctcgaaccggaggcgtccgaaccggtgctgcttgccgctgcgctgtgctgcgaggcgctggccaatggcgatgtctgccttccgcttgaacggttggcgggcaaacgcccatggccggaacaggatgtgagcctgccgccgctctctacctggcgagcgcagctgggggcctcctcgcttatcggtgcgccaggtgactacgcgccgctcaccctggccggcaatcgactctatctggcccgttatcaggcctatgaacagcaactggccgagcagctattggctcgggcggcggatgcgcctgaggtcgatgaagctcagctgagcgacagcctggcacgcttgttcgccttcaaccagcagagcccggactggcagcgcctggccgccgcgcaggctgttcgccgacgccttgccgtgatctccggcggccccggcaccggcaagaccactaccgtggtgcgcctgctggcggcattgctcgagcagcccggcggcgagcgcctggccatcggccttgccgcacctaccggcaaggccgcggcgcgcatggccgaagcgatccgtaacgccaaggccgagctgccggtcagcgaagcgatcaagcaagccctgccggacgaggcgcgcacgctgcatcgcctgctcggcagtcgcggcgacagcccgcgcgtgcggcacgacgcggccaacccgctggcgctggacgtgctggtggtggacgaagcctcgatggtcgatctggcgttgatggccaagctggtcgccgcgctgccatccaaggcgcgcctgatcctgctgggcgacaaggaccagctggccgccgtggaagccggcgcggtgttcgccgaactctgcgaagggcgcggtttcgatgccgaggcggcggccgatctggagcgcatcaccggtcagcccgtgcccgccgaaatgccgaattcgcggcttggcgacgcggtggtgctgctgacctacagccaccgcttcgccggcgacagcggcatcggcgaactggcgcgtcgaatcaatggtggagacgccaagggcacggtcgcactgctgcaggagaaccgcgccgatcttgcctggaatgcaacgcccagcgccgtggcgctgatcgagcgactggagcagggctacgcgccctatctgcaggccgcacggcagggtgaaccggcggccgctttcgacgccttcaacggctttcgtgcactgaccgcccagcgcgaaggcgcctttggtgtgaccggcatcaacgaggcgctggaagcgcgcttcaaacggcgccttggcgtgccggcgcgggaacgctggtatccagggcgggcggtgatggtcaggcagaacgactacgcgctgggcctgttcaatggcgacatcggcctgtgcctgaaaaccgagcagggcctgcgggtgttcttcgagggcgacgaggggtatcgcggcttcgctccggcgcggttgcccagccacgacagcgccttcgccatgacggtgcacaagagccaggggtcggaattcgccgaggtgttgctggcgctaccggaacagcccagcccgctgctgacgcgctcgctgttctacaccgggatcacccgggccaagcgcaaggtcgagatctgggcattgccggcgcggttggccgaggccgtgaacacccgcgccgagcgcgccgccggccttgccgagcgactaagcttgggcgatgtgaagcgcgcgaccacggcgcctggcacgccggcatccgtcagcgtgccggcaggtgatcagctcagcctgttctgatgaacgcagctgctcgaggccggcaccgccacgtccttcaaacttggcatcggctgtgcagtatggggttgattcgggtagggtgcgtcagccgctcagagggggatcgatcgtgtcgatgacgggacactggagccttggggtgttgctgagcctgacgctcagcgtcggcgcccatggcgcagaggtgcagctggtgactggcgatggctatgctccgctcactggaaggtcgctcgcgggggccggcgtgctgtccgaggtggtgcaggcggccttcgcccagagcggaatgccctcgtcgcttgcctggcaaccttggaagcggggctatctgatgacccgtcgcggcgaatacgacgccaccttcccctatattcgtgccgagcagcgcgagcgtgattttctctactcggcgcccctttatgtatccgagcaacacctgttcagccgggcagacgatgcgctcgagctggagcggctcgcccatagcggtcggttgaggctgtgccatcctctgggttggcaactgcctggagacctgcaggcgcaggtcgagcagggcctgttgatacgccattcgccgcctggcctggccgagtgcgcgcagctgttgctgctcggtcgtgacgacctgttcgtagcggatctgctgttggggcgttacgcgctgttggcgaccggcgcccctctccaacgtttccacatctctcgctcggtcctgggccggcagacgatgcatctcatcgttccgcgcagccgcgcgggtgccgaagccttgatcgagcgattcaatcagggcttggcgaccttgcgggccagcggggactatcagcggctgatcgactccatcctgaccgacgacgcgctggcagaggtaccgccgcccgagaaggtccgctagcagcgaccctgtctgccgagcagctgtcggcataatctggtcgcctggctgccgtgcgggtgcgacgctcagccgtcgagcaacgttaggatcagcggcaggctggcggcggccagcaaggtttgcagggtaatgatgcccgccatcaggtggctgtcgccgcccagctgacgggtcagtacgtaggcggtcggcgcggtgggcagggcgaagaacagcaccaggatggtcgtctccatcccgggcaggccgatgagtcgcgccacgccatacgccagcagcggaacgcccagcaggcgcgcggcgctgttccaacccagtgccgggacttcgccaccgagttccttgggcttcagcgccgcgccgacgcagagcaggcccagcggcaggctggcggccgcgagcagaccgagcaggcggtcggtgccgccaggcaggcccagaccggagaggttgaccagggcgccggccacgcaagccaggatcaatggattcttcacgatcggcagcagcaggccgcgtacgctgacgccacgctcggcggtcagcgcccagaccgacatcacgttcacggtcggcaccatcagcgccagcatcagcgccgccatggccaagccctccttgccgaacaggctgcccaccgccgcgaggcccaaataggtgttgaagcgcagggcgccttgggcgaaagcgccgaagcgcgccgcgggccagccgcgcaggcgccgcaagagcagcaagcccacccacgcgaggcccagcccgagcatgaccgcgccggccaggcgtggcagtgcggggttgcccagcggcgcggtggccaggctgctgaacagcaacgccggaaatagaacgaagtagttgatccgttctgcacccggccagaaggcctcgctcgggaactcccgcaggcgcaggaaatagccggcaatgatcagggcgaacaggggccagagggcgagcaatagagcggtcacgcgatacatccaactgtgtaggtgaaccgatagtggagcctcgcggcggcatcggcaagcgagccgttggctgtggcgccgggatataaaaacgctgcccttcacgttcatcgggaaaacaggtgaaatgatgtccaagtgatatcatggtttgccagtacatgagcgaccacgatgcaaagcctagaacagcaatccgccgaggatttccgcgatacaccctatggcagacagctgctgctggggtttcgccgtctgctgttcgtaccggatctggagcgggaatttcgtcgctatctgcatcgccaggcacggttggcgcagcgactgggcgcctttctgctgattatcgtggtcagcggttatctatatgccgagcggcacctgctggccctgcccgacgcaggctggctgcgcgagctcaccctgctgcgtttgctggagatgctgccgggtatcgccgtactcgccatatcgctgttccacaggcgcttgcgcgtcgtcgccaatcggctgtttccgttgttcctggtcatggtcgggaccgtcgcggcgcgcatcgacatccagtacgagatcatgcagccggccatggcctttcgttatggcgccggcctgctgatcgtctgttcattcttcttcctgggcatcaccttctggcgagcgctggccagtgccagcgccatcgtgctgatcgatgtgctgatggccgcgctgattctcccgtccgacgagatgagggtgcactggatctccgtcagctattacctgctgctgctggcgatcggtgccatcagccgctatgtccatgaatactcgcagcgcgagcagttcctggttcgacaactgctcggctgggtcgcgcagcacgactcgctgaccggcctggccaaccgtcgcagcttcgatgccgcgctcaggcagacgctgttgcaggcgcgccgtgatggtcagccgctggcgttgctgctcctcgacctggacaacttcaaggcctacaacgacagccttggccatccggccggtgatgcgctgatccgcatctttgctgaagtgctgggccgcttctcgcgacggccgatggacctggcggcgcgcgtgggcggggaggagttcgcgctgctgttgctcgattgcgatgcgcaggcggcgcaggccattgccgggcagatcctggcggccctcgccgagcgtgcggtgccgcacccggcatcgccccggagcgcttatgtcaccactagcatcgggattgccatgtggcggtcgggccagaatgccgagcagttgtatcaggccgccgacgcggccctgtacgaagccaagcaggccggcaagaactgctacctgctcgcccggtaaccaggtaggcgcgaggctcagcggcgcggcgtcaccggacgggtgcggccgctgccgtcgatggcgacgaagacgaataccgcttcggtgaccttgcgccattcgctggacagggggtcatcgctccagacctccaccagcatgcgaatcgagctgcgtccgacttccagcgtctgggtatagaacgaaagttgggccccgaccgccaccggcaccatgaaggccatgcggtcgatggacacggtcgcgacgcggccggcggccacgcgactggccatggccgtgccggccagatccatctgcgagaccagccagccaccgaaaatgtcgccgaagccattggtttcgcgcggcagggcggtcagctgcagggccaggtcgccctggggtatcggatcttcctgttcgtattctttcatcgggtcgactcgcggcgcgtttgttgttctagcgcgaaaggtccgcggtagtgcgggccggggcgagtataacggctgtcgagggtggcagcgaccaagctggtctaaagttcagtttcgtcaccagattgtcatattcagttcatagagtgttcacacggcctccagacaatggcctccgttgcaaacactgacacaccccctgctaggagcatggaatgaaactgaatcgtttgatggcggccttgaccttcgttgccgctggtgtaggggctgcgaatgcaatcgccgcggtcgacccggcgctgccgagctacgaaaaaacctctggcgtttccggcaacctgtccagcgtcggttccgactccctggccaacctgatgaccctgtgggccgaagacttcaagcgtaactacccgaacgtcaatatccagatccaggctgccggttcttccactgcgccgccagcgctcaccgaaggcaccgccaacctgggcccgatgagccgtccgatgaaggacaacgagatccaggccttcgaagaaaaatacggctacaagccgactgcggttccggtcgccatcgacgccctggccgtgttcgtgcacaaggacaaccccatcaagagcctcgacatcgagcaggtcgatgccatcttctccagcacgcgtctgtgcggtggcgagaaggacatcaccacctggggcgacctcggcctgaccggcgaatgggcgagcaagccgatccagctgttcggccgcaactcggtatccggcacctacggctacttcaaggaagaagcgctgtgcaagggtgactacaagtccaacgtcaacgagcagccgggttcggcctcggtggtacagtcgatttccagcaccctgaacgccatcggctactcgggcatcggttacaagacctccagcgtccgtgccgtaccgctgtccaagggcggcgaggccttcgaggccaacgaagcgaacgcactggctggcaagttcccgctggctcgcttcttctacgtctacgtcaacaaggcgccgaacaagccgctgagcccgctcgataccgagttcctcaagctggtgctgtccaagcagggtcaggaagtggtggtcaaggacggctacatcccgctgcccaagaaagtcatcgacaagacgctgaaagatctgggtctggaaggctaagacccctttgccggactgacggcgctcaccgtcagcctagcaggacgcccgccacgcaatttgcgctggtgggcgttgttgcgtcacctcgctgtaatttttctgtcacacagcttgattagattaggcgcccgaccgagccctcggcagccagtgaaaacgactcgcgccccgggcgcggcgcagttaagcggccttagcggccagggaccttcgcatgaacgatagtgagaccatgagcgcgaattccgatgtgcaacggctggatttcaataccccggcgctgcaacgcaagcgtcgcatccgtgcgctgaaagacaacctggcgcgttggtacgtctccatcggtgggctcgccgtgctcggagcgatcacgctgatcttcttctatctcgcccaggtggtggcgcccatgttccagggcgccgaactcgaggcccgcaaggcgcaacagcccgcctggctggctacggcgggagagccgctgctgctggcagtggaggaacagaaccaggttgcattgcgcctgggcaacgacggccaggctcgcttcttcagcgtccagaccggtgaactgctgcgcagtgtcgagctgcccgttccagccggcagtcatatcgtttcggcgggtcaagatacgccgggcaatcgccggatcgtgctcggtctggacaatggtcaggtgctggtcgcggaacacaactacaaggtcagctatccgaacggccagaagaccatcacgccgcagctcgactatcccttcggcgaggcgccgctgcagctcgatccgcagggccgcccgatcacccacgcggcgatcagcctgaacggcaagaccttgatcgtcgcaggctccaccgagggtgagctgcaggccctgcggatcgccgccacggagaacctgctgacgggtgaaaccagcctcgagcaacagcgtctgcaattgccgcaattgtccgagccgatcaaggcgctgcgcattgacccgcgccacatgtggctgttcgcgctcagcggcaacgccagcatcgacgtgttcgatctgcgccgtaagcagctcaacggacgctacaaattgctctccggcaagggtgagatcacgaccgtctcgtggctgttgggtggcatttcgctgatggtcggcgattcgtccggcggtatcggccaatggttcatggtgcgcggcgccgacgggcaggccgagctgaagaacgtgcgtaacttccagctcggtgatcagccgatccggcagatcattccggaagaacggcgcaagggctttctcgcgctcgatgccagcggcaagctcggcgtcttccacagcacggcgcatcgcaccctgctgacccagcaggtcgccgagggtgcggcagttgcggcgatgtcaccgcgcgccacacgtttgctggtcgagtccggcaaccagctgcaacgcttcgtgatcgacaacccgcacccggagatttcctggagcgcgttgtggggcaaggtctggtatgagagctatcccgaacccgactacgtctggcagtcgacctcggcgaccggcgatttcgagcccaagctgagcctgtcaccgctggccttcggaaccctcaaggcggccttctacgcgatgctgctggcagcaccgctggcgatctgcgcggccttctacaccgcctacttcatggcaccgacgttgcgccgcaaggtcaagccggtgatcgagctgatggaggcgctgccgacggtcatcctcggcttcttcgccggtctgttcctcgcgccttatctggaaagccacctgcccggcatcttcagcctgctgctgctgacgccggtgggcatcctgctggccggatggttctggagccggctgcccgagcgcatccgcctgagcgtgccggatggctgggaagcggtgttgctgattccggtgatcctgctggtgggctggggttcgctggccatcagcgggcatctggagaactggctgttcgctggcgacatgcgccactggctgtcgcatgagatgggcattcccttcgatcagcgcaatgccctggtgatcgggctggcgatgggcttcgcggtgatcccgacgatctattcgatcgccgaggatgccgtgttcagcgtgccgaaaagcctcacgctgggctccctggcgctcggcgcgacgccctggcagacactcacccgcgtggtgttgctcacggccagcccgggcatcttctcagcgctgatgatcggcatgggccgcgcagtgggcgagacgatgatcgtgctgatggccaccggcaacacgccgatcatggaagccaacatcttcgaaggcatgcgcaccctggcggccaacgtcgcggtggaaatgcccgagtcggaagtgggcagcacccactatcgcgtgctgttcctcgccgccatggtgctgctgatgttcaccttcgtgatgaacacgctggccgagctgatccgccagcgtttgcggcgcaagtacgccagcctctaatgcaagcgcgtccaagggcgcgcagagacgcagccggtgacggctgcgacaagatttcgacaaaggtatcgatccgtgaaaaaggattcgctgaacacctggatcaagagcggcaccccctgggtctggatgaacgccggcgccgtgtccatcgccgtgatcatgaccctcggcctgctggctgtgatcgccgtgcgcggtctggagcacttctggccggctgacgtcatcgtcgccgattaccaagtgcctggcagtgagccgcggctggtcgccggggaagtggtacaggccgaggaggtgccgcgcgcacgtctggccgccagtggcttgccggtgaatgtcgagggcggcgagttcatgacgcgcgaactgctcaaggtcggtaaccgcgatgtctatggcgccgacttttcctgggtgatcggcgagtggctgagccagtcgcgcaaaccggccgatctggtggtgctggagcgccgcgaatggggcaatttctacggcgaactgctgaacatcaaggagagcggccgactgatcgcccagggcgcggatgcctggaacgaactgcagcagcgcatcgaccgcgtcgatgacctctacgctcagatcgcacggctggaaaaggtcgacatcggccacatcaaccatggcctcgagcgtctgcgccttaagactcgcaagctggaactcgatggcgagctcgacgccaatgcccaggccgaactggatgccgagcgggctcgctgggacgccgactaccaggcgctggagggacggctacgcgccctgcatagcgacttcaatcgcgacagcatcaccatgcgcaccatggatggtcagcagcgcgaattcagtctcggcaagatcgtccgtgcctatcgtccgaatgccatgtcgttgccggacaagatcggtttctacttcgccaaggtctgggaattcgtcagcgacgagccacgtgaggcgaataccgaaggcggcatcttcccggcgatcttcggcaccgtgctgatgaccctgatcatggcggtgatcgtgaccccgttcggcgtcatcgccgcggtctatctgcgtgaatatgccaagcaaggcgtgctgacccgcatcatccgcatcgcggtgaacaacctcgccggcgtgccgtcgatcgtctatggcgtgttcggcctgggcttcttcgtctacgtgctgggtggctcgctcgaccgcatcttctatcccgaagcggcgccggcgccggtattcggtacgcctggcctgatgtgggcctcgctgaccctggcaatcctcacgttgccggtggtcatcgtcgccaccgaggaaggcctggcgcggattccgcggatcctgcgcgaaggctcgctggcgctcggtgcgaccaagtccgaaacgctatggaaggtagtgctaccgatggccagcccggccatgatgaccggcctgattctcgcggtggcgcgtgccgccggcgaagtcgctccgctgatgctggtgggcgtggtcaagctggcgccgaccctgccgctcaacggcaactacccctacctgcacctcgatcagaagatcatgcacctgggcttccacatctatgacgtcggcttccagagccccaacgtcgaggcggcgcggccactggtatacgcgacggcgctgctgctggtgctggtcatcgcgacgctgaacctcagtgcggtggtgattcgtaatcacctgcgcgaaaaatacaaagcgcttgatcattaaggcggctatgggccgcaggctgcaggcgtcaggcaagagccggcccgtagcctgcagcttgaagcctaaagcctccgaaggagacaccatgtcacaagcaaagacgcattccatcgacatctcggcgctgggtcgcgacaagcgcgcgctgagcctggccagcgaagccgtggccatcgaagtgcccgacctgagcctctattacggcgaaaaacaggcgctctacaacgtcagcatgaacatcccgcgtcagcgcgtgacggccttcatcggtccgtccggttgcggtaagtccacgctgctgcgctgcttcaaccgcatgaacgacctggtcgacggctgccgcatcgagggcgccatcaacctcgacggccacaacatctaccgcaagggcgaagacgtggccgacctgcgtcgtcgcgtcggcatggtgttccagaagccaaacccgttccccaagagcatctacgagaacgtcgtctacggcctgcgcatccaaggcatcaagcagaagcgcgtgctcgatgaaaccgtcgagtgggcgctcaagggcgcggcactgtgggacgaggtgaaggatcgcctgcacgagtccgcactgggcctttccggcggtcagcagcagcgtctggtcatcgcccggaccatcgccgtgcaacccgaagtgctgctgctcgacgaacccagttcggcgctcgacccgatctcctcgttgaaggtcgaagagctgatctatgagctcaaggccaagtacaccatcgtcatcgtgacccacaacatgcagcaggccgcgcgggtgtccgactacacggcgttcatgtacatgggcaagctgatcgagtacggcgacaccgatacgttgttcaccaatcctgacaagaagcagacggaagactacatcaccggtcgttatggctagccgcgcggagcgcggcggcttcaggccgcgagcttcaggctgcatgccaggagcggtgggttcgattagcgacagacaaacctatacagcctgcagcctgtagcctgcagcctgtggccagcggagcgaaaagatgatcagtaaagacagccacacccagcacatttcccagcagttcaacgccgagctggaagaggtgcgcagccatcttctggccatgggtggcctggtggagaagcaggtcaacgatgcggtcaccgcgctgatcgaagccgattccgggctggcgcagcaggtgcgtgacgtcgatgatcagatcaatcacatggagcgtgacatcgacgaggagtgcattcgcatccttgctcgacgccagccagcggcctcggacctgcgtctgatcatcagcatttccaagtcggtgatcgacctggagcgcatcggcgacgaagcgacaaagatcgcccgccgcgccatcgagctgtgcgaagacggcgaatcgccgcgcggctacgtcgaggtccgccatatcggcgatcaggttcgccgtatggtgcaggaggcgctggatgcgttcgcccgcttcgacgccgatctggcgttgtcggtggcgcagtacgacaagaccgtcgaccgcgaatacaagaccgcgctgcgtgagctggtcacctacatgatggaagatccgcgttcgatctcacgcgtgctcagcgtgatctgggtgctgcgttcgctggagcgaatcggcgaccacgcccgcaacatcgccgagatggtgatctacctggtgcgcggcaccgacgtccgccacctgggcctgacccggatggccgaggaagtcgccaagcgcgactgaccagcgtcgagggctggttctacagctcctggtcagcaggatgccagcgcctcgctcaggtaatcgatcagcacccgttgcttcggcggcaggtgctggttctgccgccacagcagccaggccgcgccctgataggaaccggtgtagcgccagtgcggcagcacctcgcgcaagcgtccgtcggccaaggcctgggccgcagtgaaatgtggcagcaccgtgacgccgatatcggccagcgccgcttccagcctcgcttcgctgtgattgcagacatagcgaccgcgcaccgtcaccatctcttgccgctcgccatcgctgaaatgccagcggttgtcgcccgcgtgctcgcccaggtaaacacaattgtggcggagcaattcctgcggatgctgcggcgtgccctgccggtccaggtaggccggactcgcgcacagcagctgacgcaccgccccgagcggcttgccgaccaggccgtcgggcggttgatcggtcactttcaccagcaggtcgaagccgtcttcgatcaggtccgggctctggtcgctgatctgcaaatgcacgtctacgtcggcatagcggcgcatgaagcccggcatcagcgggctgatcacgaacttgccgtaggccttgggcacgctcaggcgcaccagcccgcgcgggctgctcatcaggcgctcgccgatggccagagcctggtcggcggcatccagcatcgagcggcaatggccgtagaactcgctgccggcttcgttgagccgcaattgccgcgtggtgcgctccatcagtcgtagcgacagctcctgctccaggcgcgccacctggcgactgaccgcggaggcggtcgttcccagctgacgggccgccgcggagaagctcccagcctcgaccacccgcacgaacaccgccataccgggtaacaacgaagccttctcatttgttctcatgccgaacaagtccttttccgtatcgctggattatcgaccgcagcacatcagtagacaatccgcgcattcggataggagttcggcatgagagattggcaagatgcggtacgacgcaagctctggctggccgatgccatgttgctgatggtggcggttatctggggcagcagttatgcggtggccaagcaggcgctgtggttttacccggtgctgggttttctggcgattcgcttcgggctgacgttcgtcctgctgctgccccagttgcgcggggacggccgacgcgcgattcgtccgggcctgccgttgggcctggtgatgctgtgcatctttctctgcgagacctggggcgtgatgctcacgacggccagcaacgcggccttccttatcagcctgtgcgtcgtgttcaccccgttcgtcgaatgggcgatgttgcgccagcggccgagcaacctgctgtttgccgcctgcgcgctatcgctggctggcgtctggctgctgacaggcggggcggcgatagcgctcaatctgggggatggactgatgcttgcggcggcgctgttgcgtgccgtgctggtctgcctgacgcgacgtctgacggccggtctcgaggtgccgccgctggctttgacggcggtacagagcgcagtggtggcgtcgggctgcctgctgctgggcctggcgctaccgggaggcctgccggcactgccgcagagtccggcgttctgggcggcgaccttgtatctggtcggcttcgccacgctgtttgcgctctacgtgcagaacctggcgctgggccgcaccagcgcgacgcgggtgtcgctgctgatgggctcggagccgctgttcggcgccctcattgccgggctctggctgggcgaacggctggacgtgcagggctggatcggcgggctgttgatcatgatcgcgacactggggaccttgctgttcggccgttcggaggcaccggtcgcagccgaaagcgggctgccggcacgcagctgatcgccggctgcgcgcaccgatcaaggcgagttcttgcagtcgccggatgagctacgaacccaccctccaggctgcggttgctggctagctcttctgcaagctgatgaccaactctgccagttgctgctgccgctcggcctgctcgggacgggcgccggggttcagcgacgaccattgcggatgggcgcgacaacgatgcaacgcttcgggcagcctgccctcacgccaggccttgtcgtccggcttttccaggcggatcgcctccatcgcggcatgccctcgggcggcgagggcaatcagcaactgccgctgacgcagggcaagcagccgcagcacggcatcatcgacggtgagttcgcgctggcccttgagcttccctagaaggcggttgccgtaatgcctggcggtctgcgcaccaccgcccgcgagcgccccgagcagcgccgccgcgcccatcgtgatgccgccaaccatcaggtcgaccccggcaccggccgccgcgccggccgccatcccgccgccgatcttcaccccgagctgcttgagcgtctcggggttgaacaggtcgtcaccccagcggccgtcgagcagcggcagatcggcagccgccgcatcttgtgggcggaagccatagagccgcagcaaggattcgacgcagcgttgctcgcgggaccgcacggcgtcgtgcagctcacggatggcgccacgctcgaggtcgggctgcgccgcaacgctacggcggcaggcggcgacgtcgaccagcagctcggcgatcagccggtgaccttcggccagccgcgccgcggtctgggcttcatggtcgtcgatcaaccgctgcagcttgggccgcgattgttccagtagcagcgccaggctttcatacagccggcgttcgccatcgatcggtggtgccacgctgtcgaagcgcaccagcgcatgcaggcccagccgcgccaatgcctcacgccactgttcctctcgatggcccggttgcgcgacgaagttgagcaccggcagcagcggtttgccgcagccggccagcaccgccagctcgtccttgtacttggccagtaccggctcgcgtgcgtcgatcacgtaaagcccggcgtcgctggccagcagctgacgcagtaccttggcttcctgctcgaaacgctggcgcgcctcgctgccatcgagaaaccgcgcggtgcgggccgggccgtcgagccgctcgccgggccgttcgattcgctccagatggtcgagcagggcgatggcgtcttccaggccgggcgtgtcgtagagttcgagcaaaggttcgccgtcgacggacagccgtgcgccttcgacgtgacgggtggtgctcggccggtgggacacctcgccaaagccgacatcccgggtcagggtgcgcagcagcgaggtcttgccgacattggtgtggccgaccagggcgagtttcagcggcgtgctcatggctgcgactccgcttgaacattcgcgaggccgcagatgcgctgagcggcgccttctgcaatcgaaccgagctgatcaatcatggccagtctccagccaggtcatgggtgcgctgcccgaatggggcagcccaacgctgtccagtgcctggtgccagtcttgcagtcgatggctgtccagcgcttcgcccgcgggcggttgcagcagccagacgcgactttgcgccgcgcaacggctcagttcgccgatcagcgccagcgtgccgcggtccggcgaacggcgcggatcacaggcgatggccaggcgctggggcggaaagcgggtgagttgctccagcagtcggcggcgttgttcgcgatcgtccagcacgccggcatcggccacggtcttcggcagcttgggtggccagtggtggctcgggtccagctcgatggccaccagcacggcgccctcgctgccgtccagttgcgcaccggcgctgggtgcgtgcaactgctgcggcgccgcatcgctgaccccgaggcgctcgctgggcggttgcaggcgttcacgcagcaggcgataggccggcaattgcaaatccaggcgcagccgggcacggccgcgccgccagcgccacaggcacagcagtgccagcagcaggcgcggcaacaggccatagaccagcaccacgccgaccagccagccggcccagctttgccgggcggccagggcgccgctgtcgagcgccccactggcgcggatctgttcgatgtccggcacgctgaaacccagcagcgagggcagcgtgccgagcgtctgggtcaggttgataaaggtgctgtcgccgagaatggtggtttcccagacgaagccgtagcgccgcgtggcgagcagtgccagcagcgtcagcagggcgctgcccatggccaccagccacagcccgtggacgccgaggcccagcagccagcggcccaggcggcgctggtcgagcaccgccagcaacgccggcgccagctgcacggcacgggcgtcgcgagcgagcttctggctgagccacagccacaatcggcccagcgcggcgccgctatcgccagcgaggaaaaatcccagcagccagccgagcaaggtcagcagattcagcccgagcaggctgcccagcgcccagaacacgttgaccggccgcacaccgtcgcccagtgccgccagtgccaggccggcaccggtgaacagtgccagcagcaccagcgcgatgcccgccagcttcgccccttgccgccagtgccgcagcgcttcgatcaggccgtcacggcgcgccaaccagagcgcgcgatgttcgatcagttcgggcaggctgccaccttgtgcgcgcgcctggcggttggcttcggcatcgtccagcgggcctgcatgttcttcacgcaggcgcacggcttcggtcagccaaaggcgatcaagaggggcgagtggcggcaagggaggttggggcacgcggtttctcgtaaaggggctcggtcctgagaataaccgctgccggccacaagcgtgaatgaccgagccgctcgcggcccgacagttctgccaggatccgcgccgatcattcgatcgtatcgcggcttgccgcaccatccgccagggacaggccgattcgccacgcagcgtttgcatgctgccctgcgcaacttcaaaaggacattgccatgaaagacgtcttcttcttcgactccatgctgacgccgaagatcattatcttcatctactggctcggcctgatcagcgtggtcatcggtgccatcggcagcatgttcagcagctacggcggcggcttctgatccggcctgggtatcttgctgttcggcctgatcggtacgcgggtctggtgcgagttgctgatcgtgctgttcaagatcaacgaaaacctgcaaaagatcgccaatcgccagtgatcagccggggcggccatgctgccgccccgcttagtccggccgctgttcaggcggtcttgatgcgttcctgccagtagcggcgaatcgcaaagagcaacgacaacgcggtgagagtgatgaaggtccaggtgatcggcccgcggaagaagatcatcgggtcgccgtggccgataagcagggtgcgcctgaggttgtcctcgaacatcgggccgaggatgaagccgaggaggaagggcgcggtggcgaaaccggtgcggttgaagacgtagccgaccaggccgaacagcaacatcaggccgatatcgaaggtactgttgttcaccgcgaacgagccgtagacgcagaacatcagcacgatcggcagcaggattgccttgggaatgtcggcgaccagggagaagtacttgattaccccgtggccgacgaacagcagcaccgccgaactcagcatgatcccgcagaacagcgcgtagaccagcgtcaggttctcctggaacagcaccgggccgggcgtcaggccgtggatcatgaaggcgccgaggatgatcgcggtgatcacgtcgccgggaatgcccagtgacagcagcggaatcagcgtggcgccggccacgccgttgttgcccgattccgacgccgccacgccctccagctcacccttgccgaagttggcgcggttgggcgagcggcgcttggcctcgctgtaggagatgaatgccgcggcggtcgccccggtgccgggcacggcgccgatgatcacgccgatgaacgagccgcgcacgatggtcttcaggctggccttgagttccctgagggtcaggccggcaccgctggaggcagccttgatgtgcggggcggccttcttcaggtagaagtcgatgacttccggcacggcgaacaggccgatcagcaacggcacgaagttcactcggtccatcaggttgtagttgccgaaggtgaggcgctggctgccgtagaccacatccatgccgatggacgccacgatcacgcccagcgcggcggcgatcaaccccttgatcgccgactcgccggcaatcgagatgatgatggtcagcgaaaagcagatcagccagaagaactcaggcgggccgaagttcagggcgatcttcgccaggtaggaggcgaacaggatcagcgcgaggttcgacagcacgtcggcgatgcatgacgagtagagcgccatctgcagcgccttcttcgccttgccctgctgcgccagcgggtagccgtcgagcagggtgcaggccgccgcgggcgaaccgggcgtgtggatcaggatggcggtgatcgagccgccgtacatgccgcccttgtagatgccgaccagcagcaggatggcggtcaccggctcgagcgaaaaggtgaagggcagcgccagggccacggccatggtcgcggtcaacccgggaattgcgccgaccaccacgccgatcagcacaccgatgccgatcgcgatgaagttgtcgacgctgaggaacaggctcaggacttcggaaaagtgttccatgcggtcactcgcgagaggggcggatcagtcccagagcgtgccggagggcagcgggacgttgagcacgtggatgaacagcaggctgaccagccacggcagggcgatggccagcacatacagccagggcttgcgcaccgggtgcgcgatgaacaggagcagggtgccgagggtgccggcagcgatggcgcccagcggctcgaacagcagccagtagacggccagcccggccagcatcagtaccgggcgccaggccggcgcccgttcgctggcctggtctggtgcttgccgtggcggccgcaggcaaccttctacgatcaacgccagcgacagtaccgccaccagccagccggccacgctgggcagccagcggggcgactgcatggggttgtcgaccatcggcgcctcctcgatgaagttcggcaccaggtagaacaggaacaccagcgcggccgcgagccagaatgcgccgagcagggtgttgacgttggcccagcgcgggcggctggcggcggcagcagtcatggtcttctccgccttacttgagttcggcctggctggcgacgcgctgccagcgttcgacgtccttggcgacataatcgcggaaggcgtcgccttcttcgctggctgtctcgccgccgatctgcgcgacgaaatccttgaagctctggtcgtcgagcaccttgtcgagagcggtctgcagcgtcttgaccgcatcatccggcaggctgtcatcgccgatcaggccgaaccaggcggtggtgacgaagtcgccgaggcccatgtcggcgccgagcttcgacagcggctcgacgccgggcaggtagggcgagggctcggccgaggtcaccgccagcgcacgcagcttgccggacttgatgtgcggcagcacggtgggcatgttctcgaaggagacgtcgacatcgccgctgagcagtgccggcagggcttcaccgctgccacggaagggcacgtgggtcatcttagtgccggtcatggtcttgaacagctcgccggacatgtggatcgagctgccgacgccggaggagctgaaggtcatctccttgttcttggcggcatcgatgaactcttttaccgagtgataggggctgtcggccggcaccaccatcacgttggggatctcgatgacgttgcggatgaaggtgaaatccttcaccggatcgtagggcaggttcttgtagatcaccgggccgatggtgtgaccgggcgaggccatgagaatggtgtggtcggagccgcggccgccgcgggccagttgcccggtggccatggtcgagccggcgccggcacggttctcgaccaccacggtgccgatctccttctgcagcaggtcggcgaccttgcgcgacaggatgtcggtggtgccgccgggcgcgtagggcaccaccagacggacgttatcggtcggccagcccgcggcatgggcgagggaggcgagtgggagcgtggcgctcagcgccagcaggcaaacggcgcgcttgaacatcgaggtcatggaaaatccttccgttttgtaattgttttggggccgcgagcggcaaggtgaacggcgggacatcagctccggtcgatcgaccgccggttcggacaccagcaccttaaaggatggcgttgccttggttatcgcagcgcaccaaatcctgtgcggtaatcgaacactaggttgggggccggcggttgtggtttggattggcttgggccaccttcggctgcgtccgatcaacaggaaaaggagacgccggtgagcgttctgcaaggcatcaaggttctcgatctcacgcgtatcctcgccgggccctggtcgaccatggcgctggccgatctcggtgcggaagtctggaagatcgagagcctggacggtggcgacgacacccgcagctggatgccgccagccgtgcagggcatctcgacctattacctcaccgccaaccgcaacaagcagagcctggcgatcgacctgcgcacccccgcgggccggcaattgatcctcgatctcgccgccgaggccgacgtcgtggtggacaacttcctgccggccagcctcaagcggctggggctcgactacgaggcgctgtcggcgatcaacccgcggctgatccactgctcgatcaccggctacggtcagaacaatccgctggagaatcgtccgggctacgacttcatcatccaggccgagagcggcttcatgtccatcaccggtgaaaaggacggcgagccgatgcgcctcggggtggccttcatcgatctggtcaccggcatgaatgcggtgcagggcatcctggccgcgctgtacgagcgggagaaatccggccgcggccaggcggtggacgtggcgctgtccgacagcgcgatgcattttctcgccaacatcgccaccggttacctgaacaccggcaaggtgccgcagcgcttcggcaatgcgcaccccagcatcgtgccctaccagctgttcagcaccgctgacgggcgcatcgccctggcagtgggcaacgacgagcaataccggcggctctgtcaggacgtgctcgaccgtccggagctctatgacgatccccgtttcactcagaaccgaggtcgcaccgagcatcgcgacgcgctgctgccactgttgcaggccgagttcgagagctggaccagcgcgacgctgatcgccgcgctacgcgagcgaggcatcccggtgggggaggtcaagaccgtggcgcaggcgttcgactccgaaccggcgcgctaccgcgatctggtcatcagcgccgagcatccgctggccggcgaggtgcgcatggtgcgcagcccgctgcggctgtcgcgcaccccgacggtggcgccgaccgcaccgccgctgcacggccagcacaccgacagcgtgctcagccgtgtgctcggcaagagcgaagcggaactggccgggctgcgccaggcgggcgtgatcggctgacgggctcggcagcgccaatcattacgaatagcgcccggatgcaacgatgcccggccgtcctggccgggcggataccgctgggtgctattgcccgcgcattttcaccgcgatgtccggctgatcgatgaacagcccgtcgatgccagcgtcgaggaaggcctggatatcggcctcgacattgccgcgtgcggcgggcgagtcgccctggcgcagatcggtcggcaggaacgcgttctcggcgcggaaggtgtacgggtgcactttcaggcctgccgcatgggcgttcggtacgaagtcggtaggctggccgaggttgccgttggcatcacgcgcaatgatgtagcccttttccgggccgacgcccgccgcgtaacgcgagatcgccttgagcccgctggcggtggccatctgcgcataggtcaggtcgctgccgcgcacttgctggtcgtagggctgaccgccgccgaacagctggaccagccgcagttgcgtcatgccgcggagcgtcttgaggttttccacttcgaacgactggatgaacaccggcgcgttgcggccggcgtacccgttgcgatggaggatacgcaccagcggtttttccatcgccaggccgagcttctggaagtgcgtcggatgtttggtttccgggtacagcccgatgcggcggtgctcgctcagctgcagggttttcaccagatcgatgatctcctggagggtcgggatctccaggctgccgtccagccgggcatttccggggcgaatcgcggggatgcgctcgatggcgcgcagcgttttcagttcggccagggtgaagtcttcgctgaaccagccggtgagcgccacgccgtcgaccatctgcgtgcgcttgcgatcggcgaattcgggatgctgcgacacatcggtggtcagccccagttcgttgtcgtgacgggcgaccagctggccgtcgcgggtcatcaccagatcaggttcgatgtagtcggcgccctgcaggatcgcaagcgcgtaggaggcgagcgtgtgctccggcacgtagccgctcgcgccgcggtgggcgatgatcagcggatggggctcgccgcggccgttctgcgctgcgaccgaggcgtcgggcgtggcggcgaaggcggcgatcggcagcagcaggctgcaggcggcgaacaggtggcgcagtgtagtgcggctgtggcgggccattgcgggcgtctccatggaaggggagcggtaagcctgaagcctgacgatgacgaccgattgacgcttcggtaaagcaggtgtgaccgttcgatgatgctgacgtgtatctggcggcgcttacggtcttatagcaccgtctgatatcctcgctcccatgacccagtttcgaattcccctcgctatgatcgccgcgctcgcggagcagcatgtgattggtcgtgacaacatcatgccctggcacctgccggccgatctcaagcatttcaaggccatgaccctcggcaagccgatcatcatgggccgcaagacctgggattcgctcggccgcccgctgccaggtcgactgaacctggtggtcagccgtcagcctgacctgcaactcgagggtgccgaaaccttcaccgatctcgactcggcgctcactcgggccgagcaatgggcgcgcgagcagggcgtcgacgagctgatgttgattggcggcgcgcagctctatgctcaggcgctgccccaggcgcagcggctctacctgacccgcatcgaagccagtcccgagggtgatgctttcttcccggactatgaccaagccgaatggcagtgcatcgacagccaggcccatccggccgagggcgatgcgccggcctaccgcttcgagacctggcagcggcgctgagcccggctcccccacgctgatcttgaccggcgccaagtcttcgcctggcgccagcgcctatgctttccttccgctcgccacgagaccgatcacatgcaggaccccagaaccgacgcgctgccggccgatgccgagcgcgccgaggccgagccagccgagcgcatcgccgcgatcttcgtgcgccacccgctgtgggaggatgcgctggcgatgctgctcggcaccgccatggtggcgctcggcatcgccttctacagccacgccggcctgctcaccggcggcacggtcgggctggcctttctactcaagtatttcgccggctggtccttcgggctggtgttcttcaccctgaacatccccttctatctgctggcgatctggcgcatgggctggggcttcaccctgcgcacggtgatcgccgtggggctggtgtcgctgctggcggagctaaccccgcagtggatccgcttcgccgaactgaacatctactacgccgcgctgttcggcggcttcgccatgggcgtcgggctgctgatgctgttccggcacaaggccagcctcggtggggtgaacatactggcgctctttctgcaggcgcgtatcggcctgcgcgccggcacttttcagatgggcatcgatgcgttgatcgtactcgctgccgtgttcatcgtgccgccggagaaggtcgccctgtcggtgctcggcgccgtggcgctgaacctggtgctggcggtcaaccaccgcgccgaccgctacatgggcgtcagctgacgctcagcccagggtcaccagctgcgcacgcggctggccgtcctcgatgtccagcaaggccaggctgaccggcagcttgaagcgccgacggccagcgctgcctgggttgaggtagatcaccgcatcgacctcttcgatcttcggctggtgcgaatgcccggcgatgacgacgtcgacccgcgctgcaatcgggtcgatgcccatcgccttgacgtcgtgggtgacgtggatgcgcagcccgccgatttccaggtcgaggtgctccggaaccgacgcggcccagtcgccgctgtcgacattgccgcgtatcgcatcgagcggtgccagggcgcgcaacgcatccagcacctcgggtttgccgatatcgccggcgtggatgatgcgctcgcagccgcgcagggccgccagcgcttcgggccgcagcaggccgtgggtgtcggatatcacgccgatgcgcatggagcctccggtgtcgagtggatacctgactataggcaagcgagacttggcggcggttcgatattgcggcaggctggcgaccgccgaacgagaggagcgagtgaatggagcgggtcgattgcgtggttatcggtgccggtgtggtggggctcgcggtggcgcgggcgctggcgcaggccggacgtgaagtggtgattctggaggccgaggccgctattggcacaggcaccagttcgcgcaacagcgaagtgatccacgccggtatctactatccgcaaggctcgctgaaggcgcggctgtgcgtggccggacgcgatgcgctctatgccttctgtgacagccacggcgtgccctatcgccgctgcggaaaactcatcgtcgccacggacgagtcgcagctggccggcctcgagacgctgcaggcccatgcacaggcaaatggtgtggacgatctgcaacgcctcgacggcgcacagctacaggcgctggagccgcagctcaacgccgtcgccgggctgctctcgccgagcaccggtattgtcgacagtcacgcactgatgctggcgctgcagggcgatgccgaggccgccggggcgttgctggcgctgcatgcgccggtcgcggcgatggtcgtgacggaggcggggctgcgcgtcgaggtcggcggcgacgagcccatgacgctgctcgccaccagcgtgatcaactgcgccgggcatgcggcaccggtgatcgctgcccgcaccgaggggctggcggccgattgcgtgccgccgcgctatttcgccaaaggcagctatttcagcctggcggccgccacaccgtttcgccacctggtctacccgttgcccgagcccggcgggctgggcgtgcacctgaccctcgatctcggcggccaggcgcgtttcggcccggatgtcgagtgggtcgacagtctcgattacgcgatggatgagaagcgcgccgaaggtttctacgccgccattcgccgctactggccggggctgccggacggtgcgttgcagccggcctataccggcattcggccgaagatcagcggccccggcgagccggcggcggactttcgcatcgacgggccggcgacgcatggcgtggccggcctggtgaatctgttcggcatcgagtcgccggggctgaccgccgccctggcgattgccgacgaggtctgccagcgcctcgccgaggatgcgcgaagcggttgatcagaccggctcccgctcctcgttcagcggcgattcgggcaggaaccagttcatcagcagcgcgcagataccgccggtggcgacgccggattcgagcacgttgcgcagcgccgccggcaggttcgccaggaattccggcacctgggaaacacccagtcccagcgccagcgaaaccgagatgatcagcagggcacggcgatccagccgcacaccggcgatgatgttgatgccggctgcggccactgcaccgaacatcaccagcgcggcgccgccgagcaccggctcgggcaccgcctgcagcacgccggcgacggcagggaacagcccgagtaccaccagcatggcggcgatccacaggccgacgtagcggctggcaatgccggtcagctggatgatgccgttgttctgcgcgaataccgagctggggaaggtgttgaacaggccggccagcagcgagttggcgccgttgaccagcacgccgcccttgatccgctgcatccataccggcccctcgaccggctggcccgagatcttgctggtcgccgtgatatcaccgatggcttccagcgaggtcaccaagtagatcaccaccatgggaatgaacaggctccaggaaaagccgaggccgaaatgcagcggcatcggcacctggaacaacgcggcctcgtgcatgccggcgaagttcaggcggcccaggtaagcggccagcgcgtagccgatggccagcgcaatgatgatcgcgcagctgcgcatccacaccaccggcacgcggttgagcaccacgatggcagccagcaccacgccggacagcagtaggttttcacggctggcgaaggtgccgtcgcccatggccgcgaagccgccgcccatgctgatcaggccgaccttgatcagcgtcaggccgatcatcaagaccacgatgccggtcaccagcggcgtgatcagccgcttgacgaacggcagcacgcgcgagacgcccatctcgatgaacgagccggcgatcaccacgccgaagatcgccgccatcacaccttcgaccggcgtgccctgcttgaccagcaacacgccgccgccgatcagcgggccgacgaagttgaagctggtgccctgcacgatgagcagcccggcgccgagcgggccgaagcgcttgcattgcagaaaggtggcgatgccggaaatcaccagcgacatggaaacgatgatgttggtgtcgcgcggtgacacgccgatggcctggcagatcagcaggccgggcgtaacgatcggcacgatgatcgccagcaggtgctgcagcgcggcgagaaaggcgatccagggtttgggacgatcatcgagtcggtacagcagatcggtcggggtgccgctggcagggcgcgggtcgagggcgttcatgatcgtccttggcggagaaaacgcgcgagtttactgactgcaacgatgcacggacagtgtccgctgcgtctggagcagcgggatcgccgtgcgttggggttgcggaccgaggtacgcagagagagttgctacggggcgcacaggaaccatcgctgtgcagcaggatgcccgcattgcgcgggcatcctccagatcgttgggcgtggcgatgcggcctggtcagtgacctgccggactcttcacggctccggtgcctggtgcggtggcgtcgccatggttgccggtgcccagtactggcacttcgttgccttgcgcatcgaacagcctgccgtcgcggaagtaatcgccgtcgtggagcttggcgatgtcctggtagcgcagtgtgcgttcgctggcggcgacgaagacggactgctgattcgagttgccggccttcaggtggttgaagatcaggttcagcaagatggccatgatcgccgccgagctgatcccggaatggaagatggtttcgaaccaggccggaaactggtgatagaaggtcggtgcggcaatcggaatcatgccgaaaccgatcgacgtggcgacgatgatcaggttcatgttgttgcgatattccacctgcgccagcgtccggatgccggccgccgcgacggtgccgaacagcacgatgcccgcgccgccgagcactgcggtggggacggcggcgatcagccgacccatcaccggcaacaggcccagcgttaccaggatcagtccggccgtggcgaccacgtagcggctcttcacgccggttaccgccaccaggccgacgttctgtgcgaaggcgctctgggtaaaggagccgaagaagggggccaggctgctggaaatcatgtcggcgcgcaggccgttgcccagccgcttggagtcgaccttggtgccgatgatctcgcccaccgcgagaatgtccgccgaggtttccaccagggtcacgatgatcacgatcagcatcgacaggatcgccgccacgtgaaactccggcatgccgaagtgcagtggttgaggcatcgcgaccatcggccctacgagcacgccggaaaagtccgtcatgccgaggaaggccgccaccagggtgccgatcaccattgccagaaggatcgacagccgggagatgctggcgctgccgagcttggaaagcagcagcacggttgccagcgtgaaggcggccaggccgatgttggccgtgctgccgaattcgggcgactggctgttgccgcccatcgcccagcgcgctgcgactggcatcagcgtcaggccgatgatcgtgatgacgatcccggtgaccagcggtgggaagaatttggtgattctcgagaagatcggggtaatcatcaggccgatcaacgaggcggcgatcacggcaccgagcacggcgggaatcccaccggcgccatcgctgccgatgatagcgatcatggtcgccacgccggcgaaggagacgccttgtaccagcggcagctggcagccgaaaaacggtaggccgagggtttgcagcagagtcgcgagcccgccggcgaacagcgaggcggcgatcagcaggccgatgtccgccggggccagaccggccgcctggccgatgatcaggggcaccgcgacgataccgccatacatggtcagtacatgctgcagaccgtaggccagattggcgccgatacccaggttctcatcttccggacgcttttcaggagatgatggttttgcggatgaggctgtcatgtcgatccctttctcgctgttgttcttgtgcgcctaatgtagacaattgagttaaagattgactaccactttgtatacatttttgcccccggcgttttttcgcaagcgcagccaactccgccaaggcgcgaaccagggcggtcggcgaccttttacgaattcaaaacgagggccacgaaccgacgaccggttgtgacgtggttcgcgtttttgttggctaaggcggggcggtgctgcgtgaaatgctgagcgagtggggcgatcacaagccatgaacgcgcctttattcgcggtcaagaccgctcccacaggtcaggcgttccaccggaagcgtgggagcggttggggacgcctagtctcgaccgcgaataggcacggctcaacggctagcgcgctgttcggccgaccccagccggtggaggcaggcttgtccaggcagagcgcggcgaaccatcgagagcccctcagccatgagcggcccttttcgcggtcaagaccgctcctacaggtcgggcattccaccggataatgtgggagcggtctcgaccgcgaataggcacggctcatcggctagcgtgccgttcgtccgcccccagccggtggaggcaggcttgtccaggcagagcgcggcgaaccatcgagaacaccgcagcgatgagtgggttcttttcgcggtcaagaccgctcccacaggtcaggcgttccaccggaagcgtgggagcggttggggacgcctagtctcgatcgcgaataggcacggctcctcggctggcgcgctgttcggccgcccccagccgaagaggcaggcttgtccaggcagagcgcggcgaactatcaggaactccgcagccatgagcggcccttttcgcggtcaagaccgctcctacaggtcgggcattccaccggaaccgtgggagcggtcttgaccgcgaagggggcacggctcctcggctagcgcgccgttcggccgtccccagcggatgggattcggtttgcgattcgtgtgcgcggcctccgagcggaggccgcgcacatgaagggggacaggtcagccttcgagcatggccttgttgcgtaccgcgcccttgtcggcgctggtggcgagcagggcgtaggccttgagcgccgtggtcaccttgcgcgcgcgcggttgagccggcttccagcccttcttgtcctgctcgatgcggcggtgggacagttcttcatcactgacctgcagctggatgctgcggttggggatgtcgatgaggatcttgtcgccgtcctgcaccagaccaatcgcaccgcccgcagccgcttccggcgaggcatggccgatggacaggcccgaggtgccgccggagaagcggccgtcggtgagcagggcgcaggccttgcccaggcctttggacttcagatacgaggtcgggtagagcatttcctgcatgcccgggccgccttttgggccttcgtagcggatgatgacgatgtcgccggccttcacttcgtcattgaggatgcccttcacggcgctgtcctggctttcgaagatcttcgccgtgccttcgaagacgtggatggattcgtccacgccggcggttttcaccacgcagccatccagggcgatgttgccgtagagcacggcgaggccgccctcctgggaataggcgtgctcgacgctccggatgcagccttcggcacgatcgagatccagggtgtcccagcgggtcgactggctgaacgccgtttgcgtcgggataccggccggaccggctttgaagaaggtgtgcacagcctcgtcgctcgtctgggtgatgtcccactgggcgatggcttcttccatgctgcgactgtgcaccgtgggcacgtcagtgtgcagtagaccgccgcgcgccagttcgccaaggatggagaagataccgccggcgcggtgcacgtcttccatgtggtacttctggatgttcggcgcgaccttgcacagttgcggcaccttgcgcgacagcgcgtcgatggcgcgcaggtcgaaatcgacctcggcttcctgagcggcagccagcaggtgcaggatggtgttggtcgagccgcccatggcgatgtcgagggtcatggcgttctcgaacgcgcggcggctggcgatgttacgcggcagcaccgactcgtcgccttcgccgtagtagcgctggcacagctcgaccgcggtgcggccggcgcgcaggaacagctgctcacggtcgctgtgggtggcgagcgtcgagccgttacccggcagggcaaggcccagggcctcggccaggcagttcatggagttggcggtaaacatgccggagcagctgccgcaggtggggcaggcgctgcgctcgtattccgcgaccttctcgtccgacgcgctttcgtcggcggcgatgaccatggcatcgaccaggtccaggccgtggctggcgagcttggtcttgccggcttccatcgggccgccggagacgaacaccaccgggatgttcaggcgtagcgcggccatcagcatgccgggggtgatcttgtcgcagttggaaatgcagacgatggcgtcggcgcagtgcgcgttgaccatgtactccaccgagtcggcgatgatctcgcgcgagggcagcgaatagagcatgccgtcgtggcccatcgcgatgccgtcgtcgaccgcaatggtgttgaattccttggccacaccgccgtgtttctcgatctcgcgggtgaccagctggcccagatccttcaggtgcacgtggccgggcacgaactgggtgaaggagttggcgatggcgatgatcggcttcttgaagtcttcgtccttcatgccggtggcgcgccacagcgcgcgggcaccggccatgttgcggccgtgcgtggaggttttcgagcggtaatcgggcatgacggttcctgcggctaatcagctggtcgagtagtgcttatggtgagcgtcacctgtgccgcgtgcaacggtaggtgaccgtgcgtgcggaggggccggatcgaggcggggtatcgctcgggcggcctgggctcatgggcccgccgggggatgctggcgaggaatggcccgattctacgcgcggttgcggagtcggggaaggctgatggtcgggcttcggcggttggcggtgtggtggcctcgaccgatgacgcctcgcgatcttccacgggtggccatccaccctacgcatgcacggcgcggcggaaaggtgacgtagggtggatgtcgctgtttacatccaccacttgaggtccgctccgccggtcaactgttcggcagaatccggcaggtgatgctcttgatatagcgcgtctcgggaatcgccgggtggaccgggtgatccggtccctggctgccgcgctccagcagctggatattgcgatccagatgccgtgcgctgccgagcaggatgttttgcaggttgtcttcttccaggtgcatcgagcacgaagcgctgaccaggatgccgtccttgttcagcaggcgcatggcgttttcgttgaggcgacggtacgcggcttcgccattcttgatgtccttcttgcgcttgatgaaggccggcgggtcggtgatcaccacgtcgaaacgctcctcggcgttcttcagctctctcatcgcctcgaaggcgtcgccctcgacgcaggtcattttctccgcgacgccattgagcgcggcattgcgctcgacgccatccagcgcgaaggccgaggcatcgacgcagaacacttcactggcgccgaacgccgcggcttgcacgccccagccgccgatgtagctgaacaggtcgagcacgcgcttgcccttgacgtagggcgccaggcgcgcgcggttcatgcggtggtcgtagaaccagccggtcttctgaccctgcaggacgggggcctcgaacttcacgccgttctcttccagcgcgacccattccgggaccacaccaaaggcggtatcgacgtagcgttccaggccttcggcgtcgcgcgcactggagtcgttcttccacagtacgccgcggggcttgagcacctgcaccagcgcttcgagcacggcatccttgttgcgctccatggtcgccgaggccaactgcaccaccaggtgatcatggaaacggtccaccaccaggcctggtaggaggtccgagtcaccgtagatcaggcggtagcaaggctgatcgaacaggcgatcgcgcagcgacagggccacctggatgcgatgcaccagcagcgacttgtccaggctgtgcttcagatcgcgcgacagcaggcgcgcgcagatcaggttgttcggtgaaaccccgacgatgcccagtggcttgccacccgcggcttcgagggtcgcctggtcgccggcggcgaaaccgctcagcggagtggcggcggtgtccacctcgttgctgtagacccacaggtgaccggcgcgcagtcggcgatcggcgttggctttgaggcgcaggctgggcagggtcattgggagggctccgggtaaaagggcgggattatagggagaaaagccgataaaagcgctggaggcttgaggctggacggggccgtgatgcgtgggttcgtagaatagatgatcgagccagccccgggcgtaagaagcgacctgcgctagcttcgggcttcgggcttgcctggcacctgaagttcacttgtaggagcaggctctgcctgcgaccagcgtgacgcaggagcggtgtccggtcgcaggtagaacctgctcctacacgggcgtgaagcctacggccgcttctacgccgtcaatgccttgatcagcgcctcgctgaaggccgaaatgtcgtccggtttgcggctgctgatcaaatggccgtcgaccaccacctgctcgtcgacccaatcggcaccagcgttcttcaagtcgtcggtcagcgagggccaactggtcatgcgcttgcccttgaccaggtcggcagaggccagcagccaggcgccgtggcagatgacggcgatggtcttgttcgcgcgcgcggcgtcacgcactagctcctgggccatgtcgtcggtgcggatggtatcggagttgaccacgccgccggggagcagcacggcgtcatagtcttccatgtgaacggtgtcgaaggtcttgtcgacgtggaacttggtcgccggcgtcgtatggttccagccggtcacttcgccattcttcgccgacacgatgtggacggtggcgccctttttctccagcgcttccttgggtccggtcaattccacctgctcgaatccgtcggttaccagcgcggcaatgtgcttgcctttgagtgactctgccattttcgtcctcctcgtcgtttcgatagcggtccagattggcgctacttgaaatccgaccatgttatccgccaaagttcgccgcctttggccgtggcgatgtgctcaccgttgccgcctgcttcggccggggccttgcccggccgccgcgcgtaaccgccgctcgaccccgccggataacagacgaacacggcgagccggaagcaggctgacggcgtgttgccagtgctgataaggtcatctccggttcattgtccgatagctcccatgcctgaactccctgaagtcgaaaccacccgccgagggatcgaagcccatctggtcgaccagcgtgtcagccgcgtcatcgtccgcgaacgacgcctgcgctggccgattccggacgatctcgatgcgcgcctgtcggggcagcgcatcgtggccgtggagcggcgcgccaaatacctgctgatcaaagctgaagtgggcaccctgatcgcccatctcggcatgtccgggagcctgcggctggtaccggcggatctgccggcggccaagcacgagcacgtggacatcgtgctcgaatcgggaatggcgctgcgctacaccgatccccgccgtttcggcgcgctgctctggagcgaggacccgctgagccacgtgctgctggccaacctgggcccggagccgctcagtgatgccttcgatggcgaacgcctgtaccagctgtcgcgcgggcggagcatggcgatcaagccgttcatcatggacaacgcagtggtggtcggtgtcggcaacatttatgcgagcgaggcgctgttcgcggcggggatcgatccccgccgggctgccggtgcggtgtcgcgggcgcgttatttgaagctggcggccgagatcaagcgcatcctggcgtatgccatcgagcgcggcggcaccacactgcgtgatttcgtcggtggcgacggcaagcccggttattttcagcaggagctgttcgtctacgggcgggccggcgaattctgcagacagtgcggttcgaccctgcgcgacattcgcctggggcagcgggccagtgtctattgcggccgctgccagcgttgatgcggccactgcgcaggcattgacggcgttcacgatcaataagtggcggccgctgctatagtgaccggcacaacaatcatctgcctcgttccgcccagctgaaggaccacaccatgaatctgtttcgctccaccgctgttgtcttggccctgaccaccggtctgctggcgattcccgctcaggcgcagtcggtgcagcagaatgccagcggcgatccgatgtacaccgtcgaggcgccgaaggcgttttccatcgtcggcgatctgttcatcgcgcgcccgctgctgatcgcggcaacggccatcggcgccggactgttcgtggtcagcctgccgttcagcgccatgggcggcggcatcaaggaaaccggcaaggcgctggtcgtcgagcccggcgccgcggccttcgcccgctgcctgggttgcacccgcgtcggctacaaccgccaggactgatcctggcttcgacgatcgcatcgcgatccgtccacccgcacggctccgccgcgttaccgcgtgcggagccgtgtcgtttctgcggtactagtcggatacgggctagggcgtgacgcgcgccgtcggcggcggctcggacttccaggatctggtgtcaccggcgtgctgcgtatgcgatgggagcgatgccgctctggcgggcatcgggtgcgggcgggtcagtcaggccttgccggtgatgatcaggtacttttgcatcagctcgtccttgctctcgacgttgttcgcgtccagcggaatgcaatcgaccgggcagacctgctggcattgcggctcatcgtagtgaccgacacattcggtgcacaggttgggatcgatgacgtagatttcctcaccctgggaaatcgcgctgttcgggcactcgggctcgcacacgtcgcagttgatgcagtcatcggtgattatcagggacatccagctaactccagccgcggcgttggccgcagcgcaggtaagaacgacgcgccaattttgccgcatccatccggccggtgcacgcgacagtgcatacgctccggccagcggttgccctcggcgctgccgccgaggcgttagcgcgaggcgtagcgctcggtcagcgccttcatcaccgaggggtgaacgaacttggagacatcgccgccaagacgcgcgatctcgcggaccagggtcgaggaaatataggaaaacttttccgagggcgtcaggaacaggctttcgacgttgggcgccagttgccggttcatgttcgccagctggaattcgtattcgaaatcggacactgcgcgcagaccgcgtagcagcacgttggccttctgctcgatgacgaaatgcgccagcagcgtggagaagcccagcaccctcacgttcggcaagtgcgaggtgacttcctgtgccagagccacacgctgctcgagcggaaacaagggattcttgttaggactggcagcgaccgcaatgatgacctcatcgaacaggcgcgacgcgcgctcgaccaagtcggtgtggcccatggtgatcggatcgaaggttcccggatacagcactcgattcatcgcggcgtcctgacgcatgcgtggggggtggatggtagcggctcggtcacggcagcgtcaaagcggatcaccgccggatgccgccgtagcactgccgttcacggatttttcaatcgttcggccagttgacttgagagctttgcggccagtccgtagatggacagctgcgggttggcaccgatgctggtggggaacagcgagccgtcatgaatcgacaggttggtcaactgatggtgccgcccgagactgtcgaccaccgcctggcgcggatcttcacccatggcgcagcctcccatgacgtgggcactgccgagtcgggtgcgatagcgttccagcttcaggccgtcgatcaactggcgcgcctgctccgggcgggtgacgtagtcggcgtcgctgtgcaacggcaggaccgctttggcgccggccgcgaactgaatctcggccatgctgtgataggcacggcggatgccgtcccaggtgtagtcggtcattcgataatcgagcgtcggcgagccgtcgttgcgcagctggacctggccttcggcgctgtccggatgaaagccgtcgcgcatcagggcgatcatcgcgttggtgtgtggcagctgctccatccgcagggcattgtctacgccgaagcgtccgagcagcgtcgccgccagggccggatgcacgggcggcacctcgagtttgtaggacatccgtccgccagcgccgtcgcgccactggaagtgatcggaatagaccgactgtggcgcgccgtagaacgggttgatcaccgtctcgaattgcgccgcagaaaaattcaccaggtgcaggaaggtgcgtttgccgagccgatgatgcgggtcgggcgcatccgagcgcagcaggatggcgggcgtgttgatgccaccgccggccaggatgtagtgccgcgcgcggacccggatccgccgtccgctcggggcgacgcacagcgggtccatggccacgcattccagcgcggtcacgcgatcacgctcgaccaccaggcgttcggcgcgggtcaggtagagcagttcgccgccgctctcgagcatcgcgggaatggtggtcaccagcatcgattgcttggcgttggtcggacagcccatgccgcagtagcccaggttccagcagccgcgcacgttgcgtgggatcaccgcccagctgtagccgagggcttcgcagccgtcgcggatcacctggttgttggcgttgggtggcaactgccagtgctcgacacccaggcggcgctccattcgttcgaaccagggcgccaggtcctgctcggagagcccttggacgtcgtgctcgcgggcccagtgctcgagcgtggccggtggcgtgcggaagctggaggtccagttcaccagggtcgacccgcccactgcgcggccctgaagaatggtgatggcaccgtcgcggctggtgcggccgatggcttcctgatagagcgaggcataggcggtcggttcctgcatgtcgaagtcacggctgctgcgcagcggaccttcttcgatcagcagtacccggtagccagccgcgctgagtatttcggcgctggtgccgccgccggcaccgctgccaacgatggcgatgtcagcttcgagcgtggcgtcgtgctcgagtcgcgaaccgtcatgggtcttccagccgcgggcgataccttcggcgatcgggtcggaaacgggcatctgttctccttgatgcgggcggcgttggcagctgttcgatctagacggtcggcggtccgggataaccgcagcgcgcccaggattccggacggccataccaggccatcaggatcatctgctgaagtgaggcatgtccctgcttgaacaggtcgatcgggctgttctcccagcgccgcagaaacgccaccaccgcggcatcctgcgcctgctcccagccgttccacacgcccgtcagcgggccacgggtgagtggtaacgaaagcagatcgaataactgtcgaacctgctgcgcgacggcgggcgacaggcgcgccaggccttgatcgaggctcgtcagggtgctctgcacggcgccgggcaggttcgccgcggctgttgcgccctcgagcatcaccgctgccacccggcgcagcatcggcaggtcactgtcacgcagcagcacgaagccctgcgccgggcgctcggggctgcagccggagaggctgccgatcaggcctgccccggcaagggcggcgctgccgaacaggccgacacggagcagtgtgcggcgggagacgggactgtcggtatcgatcattctgagggccacggttgcgctgctcagcgtacgaagagcatgtagacgagcttctgcagcgtcttgccatagggcggatagatcagccgggccgcattgaagcgttgtttgacgaagacgcccttggccttgctgaaggtgagaaagccgtcgtgcccatggtaatgacccatgccggacgggccgatgccgccaaatggcaggtcgtcctgcgccacatgcaacagcgtgtcgttgaggcagacaccgccggaatgggtatggcgcagcacccggcgctgctcggtcttgtcgtaaccgaagtagtacagcgccagcggacgcggtcttgcattgacgtaggcgagcgcctggtcgatcccgtcgtagggtacgaccggcagcagcgggccgaagatttcgtcctgcatgacctgcatgtcgtcgttcacctcgagcagcacatgcggtggcatacgccgctgctggccctgctcgtgcagcggtagcacgcgggcacccttcgcccgggcgtcgtccagataagcctgcagtcgggcatgctgcctgcggttgatgatggcggtgtagtccgggttgtcgtcgagctgcggatagaagcctcgcaccgccttgccataggcttcgacgaacgcatcgacgcgcggccgcggcacgagcacgtagtccggcgcgacgcaggtctggcctgcattgagggtcttgccgaaggcgatgcgctcggcggcatcggccagcggcacgtcggccgatacgatcgccggtgacttgccacccagctcgagggtgaccggcgtgagatgctccgctgcggcacgcatcacctggcggcccacgctggtgctgccggtgaacagcaggtgatcgaatggcagctgcgagaacgcgacagcggtatcgacgtcgccgaggatgaccgcgacctggctttcgggaaagatctgcgccagcaggtccctgagcagcgcaccggtcaccggcgtggcctcgctcatcttcagcatgatccggttgccggccgccaatgcgccgatcatcgggccgatcgccagatacagggggtagttccaggggacaatgatgccgaccacccccagcggctggtagaccacgcgggcactggccggctggaaggccaggccgacccgtcgccgggacggcgccatccagcgccgcagatggcgcttggcatgacggatgccgtgcaggctgggcatgatttccgccagccgtgtttcgtctgccgcacggttgccgaagtcctcgctaatggcctcgatgatcggccgctgatggctggcgagcaggtcgtggagtgcctccagccattgcaggcgatcctcggcgctggggctgggagcggcctggaacgcctggcgctgcttttcgaacagcgtttgcaggcgcccggtctcgagactggactgattcgcatggagggcatcggcaagcatggtgcgatatccggaagggtgaccagtcgatgcttttagagtaatgactctaatctgtcaaacccgtgcgcatcccgggcgggcggggtacctttgcggtctccgtttcagcgtgccgaaccacatcccgcatgaccgccagatcaactacccgcgagcgcatcctgcaagccagcctggagctgttcaacgccagcggcgagcgcagcgtgaccaccaaccatatcgccgcacacctggcgatatccccgggcaacctttattaccactttcgcaacaagcaaatgatcatcgccgagctgttcgagcgctacgaggcgaatgtcgacagcttcctgcaactgccggaagggcgcgcgctgaacatcgaggacaaggcccggtatctcgaggcgctgctctcggcgatgtgggattaccgcttcctgcatcgcgatctcgaacacctgctcggcagcgatgcgcagttggcagagcgctaccggctgttcgcccatcgccacctgcgcagtgcgcagcgcatctaccaggggttcgtcgaggccggcatcctcgacatgacgccgccgcaagtggaggcgctggccgtcaatgcctggatcatcatgacgtcctgggtccagttcctttgcagcttgcacggcacgccggaccaggcgctcgacagaggcatgctgcggcgcggcatctttcagttgctggcgctggaggagggcttcgtgacagcgcaggcgcgtccggccgtggcgcgtctgctggctcaactggaggggccgatcgtggccgattgagacggcgccgcagttagcgcgccgacagccactcgggtattcgttgttccaggtagtagcgcggcgccagcggcgagccctcgacgaagccgacatggccgccggtgcggtgcagttccatgcttgtgctggaggacagctctgcgggctcgggcacgctgtggcggtacacgaaagggtcgtcctcggcctggatcagcagcgtccgcacgcggatatccggcagaaaatggcgactcgaggcgcggcgatagtagtcgctggcgtcggcgtagccgtgaagcggcgcggtgaagcgaccgtcgaaatcccagaaggtgcgcatcccatccaggggcccgagctgttccagtgccgacaggcgttcgacatgcccctggctggcgaacagacgccgcttgtcacgcacataggcgaccaattcacgcatgaagtgcgcctggtagacgcgcgagaaaccgcggccgatgcgatcggcacactgatcgagacgaaagggtaccgagacggccacggctcgctgcaacggagcggcggtgcctgcttcgccgaggtacttgagcaacacgttacctcccagcgagtagccgaccgcatggagcggggccagcgggcgagcggcctgcacgtgcgcgatgacttcggccaggtcgtcgctggcgccggagtgataggcgcgtggcagtagattcggctcgccggagcaaccacgccagttgatcgcgacgctggcccagcggcgttcggccaggcgttgttgcaggcccaaaacgtagtgggaactggatgagccggtcagcccatgcagcaccagcaccaggggtgccgacggttcatgcacgccgtgccagtcgagatcgatgaagtcgccgtcggccagccacatccgctcgcgtcggcgtgacagtgtgggtaggcgacggaagaaggcgctccacagcgtctgcagatggccgccgggcagccaccaggcgggagcgaaggcagccccggagtcggattctgcgggggtgccagagatggtcatggacacggggaggccctgcgaatggtggtgtgacaggcggttctgcaggcgaacgaacgaatgttgccgacggcgtcgagtcgatgccgccgggtcaggtttcgccgttgcgctcccagagggcgtagtgcacgttgccggccttcttctcgcggtgcagccgccaattgccgggcaggccgaggctcgagggctgtgcctcgctctcggtgtagatccaggcctgcttggcgagccagcccttgccttccagcagcgcgcacgcgggttgcagcaggttcttgttgaacggcggatcgaggaacaccagatcgaagggcgtcggcgtctgggtctccaggtagcgcagcgcgtcgctttgcagcagctgcccctgaccgcagctcagggtgtccagatgcttgcgcaggctggcgatggcgttggcgttcaggtccagcgccagcgccaggctggcgccgcgcgaaagcgcctcgagatagagcgcgccgctgccggtgaagggatcgaatacccgggcgccggagagatagggcgccagccagttgaacagggtttcgcgtacccggtccggtgtcggacgcaggccttcggcatccggaaagctgaagcgccggctgcgccattcaccgccgatgatacgcaactggccctggccaccatgggcggaagggcggaggggagggttggccatcagtgctccggaacgccgctgggttgttcgaggggcttctcgctcggtgccggcagcggcttctgctcgacttgcggcccgaccgtgacgatcacgaagtcccctgcgctgaggtgcttgttcatcgcggccttgacctcttcgaccgagagcgcctgcacctgttgcatgaagtcttcgaggtaggtcagtggcaggttgtaaaagccgatgctgcccaactggccgacgatgtcggcattgctcgctgtcgacagcgggaagctgccggcgatttcacgtttgctgcgctcaagttcggcctgggtcggtccgttcttgaggaactcgtcgaccagcgtctgtaccagttgcagcgtcccctccgagaggctcgcacgggtctgcagattgatcatgaacggcccgttggtctgcatcgggctgaagccggagtagatgccataggtcagcccgcgtttttcccgaacctcttccatcaggcgggtgccgaagcctccgccgccaaggatctggttacccaggtagagtgccgcatagtccgggtccccacgcgggatgccgagctgcgccaacatcagatgggtctggttggaggggaaatcgatgtgccgtgtgcccgcctcgggagcgctcggggctggtggtggcggcaaggccgggccctgtcccagggctgccgatacctgttcggcgattgcctgggcttcggtccggtcgaggtcgccgaccagggcgatcaccgcgttagcggcggtgtaggccttggcgtggaaggcgcgaagctgatcggcatcgatggccagaatgctatccggcgtaccctcgctggggtgcgcgtagggatgatcctgataaagctgctcgaacagttcgaggctggccagcttgcccgggttctgcttctggaactcgaagccggccagcacctggttcttgatccgttgcagcgaattggcagggaaggtcggatggccaacgacctggctgaacagtttcagggccggctcgcgcttgtccggtgcgctcaggctacgcaggctggcgacggccatgtcgcgataggagccgttgccgaactccgcacccaggctttcgaagccttcggcaatggcggtgacatccttgccttcgataccttcgttgagcatggcgttggtcagcatcgccaggcccggcatgtcgccgtcctggctgctgccggcggcgaacgtcaggcgcagatcgaacatcggcagttggtgggcctcgacgaacagcacccgagcaccgccggtcgtctgccagctctgaatgtccagctcccggcgcgccagcggcttgttgtcgagttcgccgagggattcgattcttgtcttcttctcgtcggccgccttggcaatggcttgccccgactcggccggggtggcgacggtctcttcgttaggcactgggatcgccgaggccgcctcgccggtatcttcgcaggcggcaagccccaggcaggccatcaacagcacaccgagcaggctgcgatgcaacgggttgcgatcactcatcgctggtctcctcgggtagaacatgggccacgctcaggcgggagcgggtgaaataatggcgagcggcttgctgtatgtcgtccgcggtgacggcttccagcgcactgagctcctcgtccatcaggcgccaggacagtccgacgctctccaactggccgatggtggtggcctgctggctgatggagtcgcgctcatagaccagcccggcgatgacctgggcccgtacgcgctcgagttcttcctggctcggcgcgctctgcttgagctgctcgagctgcttccacaggccagcttccacgtcttccaggctacggtccttctgccggttgggcgtggcgctgagcacgaacagcgaatcgccacgtgcgtaggcgtcgtaccaggccgatgcgctggtcaccagttcttcgccgcgctcgagctgttgtggcaggcgcgcgctgtagccgccgtcgagcagcgcgctgatcaggcgcagggcgtggatctctcgcggcgtttcgctggtcgccaggctgggggtgttgaaagccatgatcaggctcggcacctgcgtcttgacgtgcagggtgagccgtcgttcgcccggctcgtccagctccagcggacgcttggcatccggcaccggccggctctcgatagggccgaaataccgttcggccagctcgcgtacctcggtctgggtgacatcgccgaccaccaccagggtggcgttgttggggacgtaccagcgctcgtaccagcgccgcagttcctcgacgctcatacgctcgaggtcggccatccagccgatggtcggcgtgtggtacccgctggcgggataggccatcgccttgaagcgctcgaaggccagggcactcggcttgtcgtcggtgcgcagccggcgctcctccttgatcacctcgatctcccgagcgaactcgtcggctggcagcttcaggctggccaggcggtcggcttcgagttcgaaggcaaccgccagccggtcgcgtgccagcacctggtagtaagcggtgtagtcgtcgctggtaaaggcgttctcctcggcaccgagctcgcgcagtatgcgcgaggcttcgccggcttcgagcttgccgctgcccttgaacatcatatgctcgagcgcatgcgacaagccggtctgcccgggcgattcatagctggagcccaccttgtaccagagctgggacaccacgaccggcgcgcggtgatcttcgcgcacgaccaccttgaggccgttgtccagcatgaattcgtgggtgggctggctgtcggctgcaacgaccaggggcaaatacagggcgccgaacaacagggctgcggcgctgcgtagcatcgggggcatagtcagggctcgttcagggatcggtctcgctgcacggtcaagggcagtcgggcacggtaggccatggtactggggcatcgggatcagggcaaagcggccgaacctcaggccatcatcgccgtgccgctggcggatggccgcgcttagcgccagcggttgcgcagtgctaggataggccccgtctggccggtggcgtgaccgccggcgtttcgccctcttgagaaaatcttctccatgtttggttccaacgacgataagaagacgccggccgcggccagcgaaaagaaaggcttgttcggctggttgcgcaagaagccgcagactcccgccgccgagcctccgcccgccgagccgctggaagacagccaaccgttcgcggacgagcccgataacgtacagcgcgaagaccagcccagcgaagagccgccccgtgctgagcagaccgagcccgccgacctgccggtgatggagccggacaccgtcttgcacgccgagcccgagcctgagcccgagcaggttcagcccaaggaggttccagaggcgcctgcattggccgagatggctatcgagccggcgcccgccgtcgccgaggcaccggccaagctgggctttttcgcgcgcctcaagcaaggcctgtcgaagaccagcgccagcatcggtgaaggcatggccagcctgttcctgggcaagaaggccatcgatgacgacttgctggatgagctggaaacccggctgctgaccgcggacgtcggcgtcgaagccaccacggcgatcatgcagaacctcacccgtcgcgtctctcgcaaggagctggccgacagcggcgccctgtacaaggcgttgcaggaagagctcgccgcgctgctcaaaccggtcgaacaaccgctggtggtcgacaacggcaagcggccgttcgtcatcctggtggttggcgtcaacggcgtcggcaagaccaccaccatcggcaagctggccaagaagctgcagctcgaaggcaggaaggtcatgctggccgccggcgatacgttccgtgcggcggcggtcgagcagttgcaggtctggggcgagcgcaacaagattgccgtgatcgcccagcacaccggcgccgattccgcttcggtgatcttcgatgcggtgcaggcggccaaggcacgcggtatcgatgtgctgatcgccgataccgcgggtcgtctgcataccaaggacaacctgatggaagagctgaagaaggtccgtcgggtgatgggcaagctggacgagacggcaccgcacgaagtgctgttggtgctcgatgccggcaccggccagaacgccatcaaccagaccaagcagttcaaccagtcggtggagctgaccggtctcgcgctgaccaagctcgatggcaccgccaagggtggggtgatcttcgctctggccaagcagttcggcacgccgatccgctatatcggtgtcggcgaaggcatcgacgacctgcgcaccttcgaagcggacgctttcgtcaatgcgctgttcgccgagaaagggacgagcggagcctcgtcatgattcgtttcgatcaggtcggcaagcgctatcccaacggccacgtcgggctgcacgagctgtcctttcacgtgcaacgtggcgagttcctcttcgtcaccggccattccggggcgggcaagagcaccttgctgcgcctgctgctggcgatggagcggcccaccagcggcaagctgctgctggctggtcaggatctggcacgaatcagcaatgcgcagatcccctttttgcggcggcagattggcgtggtgttccagaatcaccagctgctgttcgatcgcaccgtattcgacaacgccgcgctaccactgcagatcctcgggctgaacaagcgtgagatcggccagcgggtcatgacggcgctggatcgcgtcagcctcaaggacaaggcgctgcaatacccggcggacctttcgacggggcagcaacagcgtgtcggtatcgcccgtgccgtggtgcaccgtccggcgttgctgctggccgatgaaccgaccggtaacctcgacccgcgtctggcggcggagatcatgggagtgttcgaagacatcaatcgcctcggcaccacggtgctgatcgccagccacgacctggcgctgatcgcgcgcatgcgtcatcgcatgctcacgctgcagcgcggtcgcctgatcggtgacggggaggccgcccgatgagcgcacccgagcagaatccaaaccctgccgagcgcgccggtggcgtgcgcaacaaaccggagcagccaaggggcgatgagccggatttcaagaccttgtttcacgcctgggtggagagccatcgcgccagtgtggtcgacagtgtcggccggctggtcaagcagcccatcggcagcttcttcacctgcctggtaatggccgtggcgctgagcctgcccatggggctggcgctcctgctggacaatgtcgagcggctcggtggttcctggcagcgggcggcgcagatttcgctgttcatgaagctcgatgtgggcgcggagcagggccggacgctgcgcgagcagatcctcgagatgcccgatgtggcggaagccagctggatcagccgcgaacaggcgctggaagaattccaacagctgtccggtctcggtgaggcgctgcgcgagctgccggagaacccgctgccgggggtgatcctggtcacgcccagcaaggtcgatcgcgatggcctcgaagccctgcggcaacgcctggctgagctgcccggggtcgagcaggcgcagctcgacctgctctgggtcgagcgcttgacggccatcctcaagctcggcgatcgattcgtcttcggcctcagcctgttgctgatcgcgacgctgctattggtgatcggcaacaccatccggctgcatatcgagaaccgtcggacggagatcgaggtagtcaaactggtcggcggaaccgacggctacgtgcggcgccccttcctctacatgggcgccctgtacggcctgggtgccgggttgatcgcctggttgctgctggcctacgggctgggctggttgaacgaggccgtggttgggctggccggtctgtacggcagcgacttcggcctgaccggtgtgccggccgatgacgccctgtcgctggtcctcggcgcggtattgctgggctatatcggcgcctggctggcagttgcccgtcacctgagcgagctggctcctcgctaagcgtctgatttataacggtttttattaggtgtaagggaacttttccaggttcttgcagtctgactgagcagtgctaaactgctgcagcttcattatcggaggatctgcatgactacaaatctgcaacctgttcaagccctggtcccgggaggcaatctcgaggcctacgtgcagacggtcaacagcattccgctgcttacggtcgagcaggagcgcgatctggctgagcgtctgttctacaaccaggacctcgaggccgcgcgtcagatggtgcttgcccacctgcgattcgtcgtgcatatcgcccgcagctattcgggctatggtctggctcaggccgatcttatccaggaaggcaatgtcggcctgatgaaggcggtcaagcgcttcaacccggaaatgggtgtgcgcctggtgtccttcgccgtgcattggatcaaggccgaaatccacgagttcatcctgcgtaactggcgcatcgtcaaggtcgccacgaccaaggcgcagcgcaagctgttcttcaatctgcgtagccagaagaagcggcttgcctggctgaacaacgatgaggtcgagcgggtcgctgacagccttggcgtcgaagcccgggaagtccgcgagatggagagccgcctgacagggcatgacatggcgttcgatccgtcggccgatgccgacgacgacagcgcctaccagtcgcctgcccattaccttgaagatcatcgctacgatccggcgcggcaactcgaagacgcggattggagcgacagttccaactccaacctgcacgaggcgctggagacgttggacgagcgtagccgggatatccttcagcagcgctggctgagcgacaacaaggcgaccctgcatgacctcgccgccaagtacggtgtgtcggccgagcgcattcggcagttggagaagaatgcgatgaacaagctcaagggatccattcaggcctgattggccccttgatgatcgacaaggcgctgcaaagcagcgccttttttgtgcccgccagtcgggtctgacggctgcacggagtgccggctcggcgagtcaggccggcgggctggcgctgcccagggcatcgctcagtgcgatcagtaactgcgccgcgctgatgggtttgtgcagccaactgatgccgctgtcgccctcgtgctgctcgaattggctgacagccgagatcacgatgatgggcaggtcgcgcgtcgacggttgtgcgcgtacctcgtcgatcagctcgcgcccgctgccgtcgggcaagtgaagatcgagcgtcatcgcctcgtagcggacgttggccagcttgtcccgtgcagcatgcaggctctgcactcggtctaccgcataaccggcgtcgcgcagcatcaagtgcagcaaccggccggtatccggttcgtcttcgatcaccagtagccgcggctgcccttggtccgccgccgaagaggacgactcgaggatcggcagctcgcaccagaaggtcgtaccgtgcgtctcgctggtttcgaagccgacccgcccacccatgcgctcgatgaattccttggtaatggcgaggcccaggccggtgccgcccttctggcggctatcggaagcgtcagcctgggcaaacttctcgaatacccggctgcggaagctggccgggatgccagggccctgatcggtgacattgatgcgtacatgaccggcgtcgggcaggctgcaatgcaggctcacttcgccaccttcgggcgtgtacttgatggcgttggagaggaagttggtcagtacctgttgcaggcgcaggccatcgacccagacgttgacgtttggcggatctcgcagcacgcagctcacgttgaaatgcgcggcgaaggactgattgctggctatcgcctcgtccagaagtcggcgcagcgcatgttcgcgcatgtcgaaggtcatcttgccggcggcgatcttttccatgtccagcagatcgttgatcagatagcccaggcgcaggctgttgcgatgggcgatctcgagcatttgctgcatcgctggcggaacatcccccagcgcgccgccggtgaccaggcccagggcgccgctgatggaagtcagtggggtgcgcagttcgtggctgacggtcgagacgaactggtccttcatctgctcgatgcgcttgtgctcggtgagatccatgctggtgccgctgatgcgcaagggctggccgtcccggtcgcgctggatataaccgcggatgagcaccggaatcaccttgccggtcttgtgcaggaaacgcagctcggtggtgaaatgatcgaccgccgaaagcatggtctgcgccaactgtgccttggcctgcgtcaggtcttcggggaccagcaggcgttcccagagcttcaggtcggagtgcagctcgccgggacggtagccgagcatgtgccaggcgcgtggcgatgcgtagaagcttccggcatccaggtgcaggtcccagaggccgtcgttgctgcccttcagggcgaggctgaggcgctcctcgctgagttgaagggcgcgcttgttttcgcggatatgctcggtcatctgctgcgccagcgcctcggcgcgactgtgcctgagcgacagcgaggaggtcagcacgaacagcagcaggctcaggccggcaccgagcccgatgactaaccagttgctggcctcgaagaacgcctcgaattccggcaggctctccaggcgcaaggtccaggtctgtccgtacagatcgagctgcacgacctggctgtactttgccggctcggcgcgtggttgctggcggctggcgaagatcaggccttccgggtcctcctctgctccggcgtagatgtgcaggctgaggttggggccggcggcgccgaggatgccatgcatcaggtcgtctatccggtacgggctgtagacgaatccccggagcgcctgcaagcgctgttcagccgtgcccgcgggttcgtcaggtcggtacagcggtacgtacatgaggatgccggcctgcgttgcgccgtgtgtctcctggcgcagcgtgaccttgccggtaatgtgagtctgccccgatttggcggcctgcagcatggcatgccggcgcaccggctcggcgaacatgtcatagccgaacgccgccaggttgcggccactaaacggctcgaggtaaacgatgggggtgtacagccgggcattttcgcgggaaggccgtacgtcgtagtcggcgaagccttcatcgcggacgcgttggatatgcgcggcccactccgccggccgtacggcttcggcaaacccgacgccctggatgccggggtagttttcgctcagccgcagccgcgcgttgtaggcgcgccactgtgtccgggacacctcatcgttgacgtcgaacagtccggccgcgccgagcaggatctgctcgtggtcgatcatccgcttgtcgatggcttcggtggtggtcttcaccagaaaatcgaattgctggttcgccgcgcgttcttccttcagcgtcaggtgctgaaggatcgccagctgtaccagcagggtgaacgccagcacgagccaggcgacgctgttacgccaatggaagagttgccgcaccttgtgcaaaggtgcctggattgcggttccgctcatgctagcgctgccatgcgttcagtggcgaatcggcgagaagatgactgcacgtccgcctcgatggcgtcctgtccgtcgggcgtcgccggcatctcgcgacctgtcgcatgcagcttactcgttgcgatggcgcactgccataacggtccgtctggccgtaccggttaccggagatcccgattcacgaccggtcagtcgggttatggcccctggagctgattcaggtagtggctgccgcccagctgacgcatttgttggcggatccagctggcacgtcgccgtacatgcggaccgggacgcccggcgctccattcacgcggattgggcagcacggcggccagctggctggcctgggccgtggacaggtaggccgcgcctttaccgaaatgatgctgggcggccgcctcggcaccgaaaacgccgttgccccattccacgctgttcagatagacctcgaggatgcgttgctttggccacagcagttcgatccaggcggtgaaccagacttcgaatcccttgcgtacccagctgcgtccggaccagaggaacaaattcttggcaacctgctggctgagggtgctggcgccacgcagcgagccgccgcgctcgttgtgcgcgaacgcggcgcggatagcggcgatatcgaaaccccagtgatcggcgaatttctgatcttcagccgcgatcaccgccatcttcaggtcatcgggcagcaccttccagggccgccagctgcgttgcaggtcgatgctttcgccgccggtccaggattcgatcttgcgctcgaccatgagcgcggtgaagggtggcggcacccagcgcagcaccaggaccagcagcacggagactgcgctcgaccagagcagcagtttaatgaggcggcgtgatagggctcggagcatggacatggtcgggggcggggtgagcgggcattataacggcctcatcccatcctgactggaagcgcctgatgattcgtctctttctcctgcttgctgcgttcttcggcttgaccggcgtggcgctgggtgcctttgccgcacacggcctgaaaagtcgcctcagcgccgaatacctggcggtgtttcaaaccggtgtgcagtatcagctgattcatgcgctggcgctgttcggcgtcgcgttgctggcgttgcaggcgccgagccgtctgctcaacgccgctggcggtttttttgccttgggcgtcctgctgttttccggcagcctctatctgttgtcgctgaccggcgtaacccggctcggcatcactacaccggttggcggcaccgcctttctcgccggatgggtctgcctgctattggcggcctggaacctgcgcggctgactgatcgcattccgcggcaaggatgaatggcagtgctcgtcgccttggtgcgccgagatgatcgggctagaatgcgtgccccttgtcaatggcggcgatcactatgcacatccagttgaacggcgagcgctacgagctccctgacggtcagtcggtggccgatctgctgcaacgcctggacctgactgggcggcggctggcggtcgaactcaatcgagacatcgtaccgcgcagccagcatggcacgacgcgactggccgaaggcgatcgggtcgaagtcgtgcatgcgattggcggcggttgatcggtccgctgcctcgatagtaattccggacgtcgcccgtgcagcgacgtacttcttcgcttcattacagatgaacaggatggtcgcatgagcccagttccgcacgacaaacccttcacgcttgccggccgcacttatcagtcgcgtctgctggtgggcaccggcaaatacaaggatctcgacgagacccgcgccgccatcgaggcttcaggcgccgagatcgtcaccgtcgcggtgcgccgcaccaacatcggccagaacccgggcgagccgaacctgctcgacgtcatctcgccggaccgttacaccatcctgccgaataccgccggttgctacgatgccgacgaggcggtgcgcacctgccgtctggcccgtgagctgctcgacggccacaagctggtcaagctcgaagtgctggccgaccagaagaccctgttccccaacgtcatcgaaacgctcaaggccgccgaggtgctggtcaaggatggcttcgacgtcatggtttacaccagtgacgatccgatcatcgcgcggcagctggccgagatgggctgcatcgcggtcatgccgctggcgggtctgatcggaaccgggctgggtatctgcaacccgtacaacctgcggatcattctggaagaggccaaggtgccggtgctggtcgatgccggtgtgggcacggcctccgacgccaccatcgccatggagctgggctgcgaggcggtgctgatgaacagcgccatcgcccatgcacagaacccggtgttgatggccgaggcgatgaagtacgcgatcgacgcgggacgcctggcctatctcgccgggcgtatgccgaagaaactctacgccagcgcgtcctcgcccctcgaaggcctgattcgctgagttgtccctccgtctccggccgcgctcgcttgcgcggccgttcttttttctctgcaggtctattcatgagcgacaccctccctccggctgaaggccaacggcgcatgcgcaccatcaaaagtttcgtgatgcgcgccggacgcatgactgaaggccagcagcgcggcctggaccagggttggccgcgcttcggcctggagctggccgacggcccgcgcgacttcgatcaggtcttcggccggtcggcaccgcgcaccttcgagatcgggttcggcatggggcactcgaccctggaaatggccgcggccgcacccgaacaggacttcatcggcgtcgaggtgcattcgccgggcgtgggcgcgctgctaaacggactcctgtcacaaaacctgacgaatgtgcgggtttacagttgcgatgcgcttgaagtgctgcgtgaatgcgtccccgacgccagtctggaccgggtattgctgttctttcccgatccctggcacaagagtcgccaccacaagcggcgcatcgtccagccggcattcgccgagttggtgcggcaaaaactcaaggttggtggcgtgttgcatatggcgaccgactggcaggcgtacgcggagcacatgctcgaagtgatgagcgccgcgcccggctaccgcaaccaggcggccatcgggcaatacgtcgagcgtccacaagaacgtccgacgaccaagttcgaacgccgtggcgaacgcttgggtcatggggtctgggacctcaagttcgagcgcgtcgactgatagaaaaaagggtgtcgcacggcacccgtcagagccgcgaccagcggcctcagggaagaccagacaacaagagcatgccagggacggcacgatccccaacgcctcaacgagcgccttgcctgtcggcaaaggccgttatctgccgcgcgccgtttgcgcagcaaggagcaagagagatgtataggaaatttgcagttctgctattggcgctttgcgccagccaggcccaggccaaggtggacgaggctcaggccgcgcgcctgggccaggacctgacgccactgggcgccgagcgagccgccaacgccaacggcagcatcccggcatggaccggcggggtgaaaccaccggccgattaccagccggggatgcatcaccccgatccgttcgccgccgatccggtgctttaccgggtcgataacagcaatgtggcgcaatatgccgcactcttgcccgaagggctgcgcgccctgatcgagcgctatccggatttctatcttcgtgtctttccgacccgccgcagcgccgcggcaccccagcgcatctatgacgagacgcgtgccaatgcgctgtctgccaagctgatcgccaacggcaacggcatcacgggcgcggtggccggtatcccgtttccgctgccgcaggacggtatgcaggtcatctggaaccacatcctgcactacaagggcgagcagacccacatggtcaacaaccaggccgtcgtcatcgacggcagggccagtctgatcaagcgggaccggcacatctactacgtctacaaccgcgaaggcatgacccgcgcgcagctggacaacacgctactgttctacaaataccgggtgaccgcaccggcaaagctctccggtaccgcgctggtggtgcaggatccgatggaccaggtactggcgatccgcaaggcgtggcgctacagcccgagcgatcgtcgggtacggcgcctgccgtcgctggcctacgactcgctgcagccggacaccagcgggctggcgaccgccgacgtggtcgactccttcaacggtgcgccggatcgctatgagtggaagctggtcggcaagcgcgaaatgctggtgccctacaacagctacgcggtccatcagcaaggcattccctatgactcgatcgtcggagcgcataccttgaaccccgacctgctgcgctatgagcagcaccgggtatggatcgtcgaagcgaccctgcgcaagggcttcagccatccctacgccatgcgccgtttctatatcgacgaagacagctggcagatcctggcggtcgacctgttcgatggcgatgccgagctgatcggtctgcaggagagccatccgatcagctattacgaggtgccgatgttcggcagtacggtggagacgctgtatcacctcaaggatggcaactatttcgtcgacggcttggacaacaacgagccgatgtacgacttcagtgcccagatgggaccgcgagacttctcccccgcagcattgcgtcgcggcgccaactagcgctgcgcccggtcaggtgcctgacgcctgaccgcgccctggtcaacctggccagggccgtcttttccgagggctgccggcaccttcgctaccagcgcttcgagcctgtttcgtagccatccacctgccgatacgccgcctgcttctggcgaacgttccgatcgccgcattgccgttgcgggctggcgtctgcggcgtcccgattccgcagcaatgcgacataacacagcggcgcttgccgatgccagggcgtaatgcctcggtgatttcggcgcgcctgccatatccacctgacccctgccgctccgaagccgcaggccggcagcctgcgcaaacagctacagcgttctcggcggctgccaccgaacggttggcacgcctgcgtccacgcagccgacctctgccccgcacgccgtcggcccgcctctatgtcgtgctctttatatgtatatacattaggtgcggtctagcagccaagccatagagacataagcgcgagtttacgctgcgcaaagcgttaaacagcgcttgaccgagatgcttgtctttcctattgtatatacaataagccagccagaggtcaccaccgatgccttctactcctgacaagcgcctgctttggcgcgccgtaagcctattcgacggcacgcagacactgcccgagccgatggtggtgatggtcgaggccggtcgcgtcgcgctcgtggtgcccgtgtccgaactggatgaggcgcaggtcgccggcgcactggaagtgggccgcgggggcgtgatgacgcccggtctgatcgattgccacagtcatctggtctatgccggcaaccgcgccgacgagttcgagcagcgcctggaaggggtcgactacgctgaaatcgccaaggccggcggtggcattctcagcaccgtgcgtgccacccgtgccgccagcgaggagcagttgctggctcagagcctgcctcggctgcaggcgctgctggccgatggcgtgaccaccgtcgagatcaaatccggttacggcctgacgaccgccgacgagctgaagatgctgcgtgtggcgcgccggctcggcgagctgctgccggtacgaatcaccacgaccttgctggcggcgcatgccttgccaccggaatatgccgacgacagcgacggctacatcgacctggtgtgcaacgagatcattcctgccgccgcggccgagggactggccgatgcggtggatgtgttttgcgaacacatcggcttcagcgcgagccagtgcgagcgggtattcatggccgcccgggcgcacggtctgccggtcaaggcgcatgccgaacagctgtccaaccagggcgccagcgccctcgcggctcgctatcgcgggttgtcggccgaccatatcgagtttctcgacgaggccggcgtgcaagccatggccgccgccggtacggtcgcgaccctgctgccgggcgcctatcacacgctgcgcgaaacccagttgccgcccatcgcgctgctgcgccagtacggcgtggcgatggcggtagctggtgattcgaaccccggtacggcgccgatctgcttccccaccttgaatctgaacctggcctgcacgctgttccgtctgacgccgcgcgaggcgctggccggtatgaccgcacatgccgcgcaagcgctgggtacgcccgagctggggcgtatcgctgtcggtgcgccggccgatctgtgcctgtgggatgtccagacgccggccgagctggcgtacgcggtacagccgggacgcctgcgccagcgggtcttcggcggtgttgtcagctacgacaaggaggccgcccgtgatgcacgctgatctccattcgatggagccctggcagggccgcgttgatccggaagcggacagcgcgcgctggcaccagcgcattcagtcactcgccgatggcagcgagccgggcctggccttgctcggctttgccagcgatgaaggcgtgcggcgcaaccatggccgagtcggcgcggcaaacggccccttggcgatccgcaaggcgctggccaatctggcctggcaccgcagcgggccggcctacgatgccggtgacgtggtctgtgccgacggcgatctggaagcggcgcaggctcgtctgggtggcaatatctgcgcattgctcgatgcgggccatctgccgatcgtgcttggcggaggccatgaagtggcgttcggtagctggcaggggcttgccgggcatctgggcggcgatcgattggagcagcaggccccgcaggaggccgtcccacggaaggccgccccacgcataggcatcatcaatttcgatgcgcactttgacctgcgcgacccggcccatgtgcattcttccggcaccccctttgcgcagattgccgaacagtgcgcggcacgcggttggccgttcgcgtacgcctgtatcggcatcagccgtgccagcaatacgcgcgcgttgtttcagcgcgccgccgacctgcaggtactggtgcgcgaggaccgcgacatcagcgagtcccgtctggcggggctgggcgccgacctggagcggttcatcgccgattgcgacgccgtctacctgaccatcgatatcgacgtgctgccggcctgtgaggcgcctggggtcagcgcaccggctgcgcgcggcgtttcccttgcgctgctcgaacccttgctcgaacgcatccgcgacagcggcaagctgcgtctggcggaccttgccgaactcaaccccgagcatgacatcgacaaccgcaccgcgcgggtggcggctcgcctgattcacctgttgtccctgaccggctgagccagtctcgactacttctctgacaaaaataactacagaggaaccctcagatgactccttccaccgactgcccgcacggtaacgccgccgtctcgcggacccgcgccctggcccgtctgcttggctacagcctgatcgggctgctggtcttcttcgtgccgttcgagattggcgggcgcaacaccattctgctcgatcacagcgccagcgccttgctcgcccacgcccgtccactggtcatcgccattgccgtgctgttcatgctctacggtgcgttgcagccctggctcagcggtagctggcgcggcgacctgacccgcacgatattcagtgtgctcaaggtgttcggcctgctgatcggcgtcggctatctgtttggcatcggtcccgaggcgctctaccagccgggcatgctgccgtttctgttcgacaagctggtgctcagcctggcgctgatcgtgccgctgggtgcgttggcgctggtgttcctgatcggcttcggcctgctggaactggtcggcgtgctgatgcagccggtgatgcggccgatctggcgcaccccgggcaagtcggcgatcgatgcggtggcctcgttcgtcggcagctactcggtgggcctgctgatcaccgaccggatgtatcgacagggccattacagcgtgcgtgaagcggcgatcatcgccaccggcttttccaccgtatcggcgccgttcatggtgatcatcgccaagaccctgggactgatggacgtctggaacctgtatttctggagcgcgatgctggtcaccttcagcgtcaccgcggtcagcgcgcggctttatccattgtcacgcttgccgtccgagagccgagccgagccgccgctgccagccggtgagagccgtatcgccagcgcctggcgcgccggtctggagcaggccgctcatgcgccgtcgctgccgagcgcgctgcgcgaaaccttcgtcgatggactgcgcatgaccgcggcgatcctgccgagcattctcgcggtcggcctgctcgggttgctggccgccaagtacacgccgctgttcgatgccatcggcttgctgctgtatccgctggtctggttgttcggcctcgaccagccgatggtggtggccggtgcggtctcctccggcctggccgagatgttcctgccggcggtgctgctgaaggatgccgacgtgctggtcaagttcgtcaccgccatcgtctcggtgagcagcgtgttgttcctgtcggcatcgattccctgcgtgctcgccacccgaatccccctgcgcttgcgcgacctgttgctggtctggctgcaacgcaccctgttgagcctggcattcagcattccgctggcctacctggcgcattacctgggctggctgtaagccgcccgcgattaccgaatttgtagagaggagcctgaaatgacccgtttccgcgacaccgaaatccgcgccgcccgcggtaccaccctgaccgctaaaagctggctgaccgaagcgccgctgcgcatgctgatgaacaacctcgacccggaagtggccgagaaccccaaggagctggtggtctacggcggcatcggccgcgctgcgcgcaactgggaatgcttcgacaagatcgtcgaggtgctgacccgcctggaagacaaccagaccctgctgatccagtccggcaagccggtcggcgtgttcgaaacccacaaggacgcgccacgggtgctgctggccaactccaacctggtgccgcattgggccaattgggagcatttcaacgaactggatcgcaagggcctggccatgtacggccagatgaccgctggcagctggatctatatcggcagccagggcatcgtccagggcacctatgaaaccttcgtcgaagccggccgtcagcattacggcggcgacctcaagggtaagtgggtgctgaccgccggcctgggtggcatgggcggcgcgcagccactggccgcgaccctggccggtgcctgctcgctgaacatcgagtgccagcagagccgtatcgatttccgcctgaagacccgttacgtcgacgagcaggccaaggatctggacgacgccctggcgcgcatcgacaagtacaccggtgaaggcaaggcgatctccatcgcgctgtgtggcaatgccgccgagatccttcccgagctggtgcgccgaggcgtgcgcccggacatggtgaccgaccagaccagcgcccacgacccgcgccatggctatctgccggccggctggagctgggacgagtacgtcgctcgcggcaagaccgaagaagaggtggtggtcaaggccgcgcgccagtccatggccgtgcacgtgcgggcgatgctggacttccagaaaatgggcgtgccgaccttcgactacggcaacaatattcgccagatggcactggaggagggcgtcgacaacgcgttcgacttccccggtttcgttccggcctatatccgcccgctgttctgccagggcatcggcccgttccgttgggtggcgctgtcgggcgaccccgaggacatctacaagaccgacgccaaggtcaaggagctgatccccgatgacgctcacctgcacaactggctggacatggcccgcgagcgcatcagcttccagggtctgccggcgcgcatctgctgggtcggcctgaaggatcgcgcgcgcctggcccaggcattcaacgacatggtcgccagcggcgaactgaaggcgccgatcgtgatcggccgcgatcacctggattccggctcggtggccagccccaaccgtgaaaccgaggcgatgcaggacggctccgacgcggtctccgactggccactgctcaacgccctgctgaacaccgcaggcggcgcgacctgggtctcgttgcaccatggcggcggcgtcggcatgggctattcgcagcatgccggggtggtcatcgtggcggacggtacgccggaagctcgcctgcgtctcggccgtgtactgcgcaacgatccgggcaccggggtgatgcgtcacgccgatgccggttatgacatcgctatcgattgcgcccgcgagcagggacttgacctgccgatggtcggcgcgaaccaaggagcccaagcatgagcctgttgaccctcaatcccggcacgctgagcctcgcccagctgcgtacggcctaccagagcccgctgcagctgcttctggacgaaagcgcccatgccgccatcgaagccagtgtcgcctgcgtcaacgcgatcattgccgaggaccgcaccgcctacggcatcaacaccggtttcggcctgctggcctcgacccgcatcgccagcgaagacctggaaaaactgcagcgctcgctggttctgtcgcacgccgccggcatcggcgagccgctggacgacgccatggtgcggctgatcatgctgctcaagatcaacagcctggcgcgcggcttttccggtatccgcctgaaagtgatcgaggcgctgatcgccatgatcaatgccgaggtttacccgcacatcccgctcaagggctcggtcggcgcgtccggtgacctggcgccgctggcgcacatgtcgctggtgctgctcggtgaaggacgggcgcgtcataaaggccagtggctggcggccccggaggcgctggcgatcgccggtctcgagccgatgaccttggctgccaaggaaggcctggcgctgctcaacggcacccaggtgtccaccgcctacgctttgcgcgggctgttcgaggccgaggacctgttcgccgcggcgaccgtctgcggcggcctgaccgtcgaggcggccctgggttcgcgggcgcccttcgatgcgcgcatccacgccgctcgcggtcaacgcgggcagatcgacgcggcggcggtctatcgtcatctgctcggcgacagcagcgaagtcggccggtctcacgaggcctgcgacaaggtgcaggacccttattcgctgcgctgccagccccaggtcatgggcgcttgcctgacccagctgcgccaggccgccgaggtgctagcggtggaagccaatgcggtctcggacaatccgttggtattcgccgccgagggcgacgtgatttccgggggcaacttccacgccgagcccgtggccatggctgccgacaatatcgccctggccatcgccgaaatcggcgcgctgagcgagcggcgcacctccttgatgatggacaagcacatgtcgcagttgccgccgttcctggtggccaacggtggggtgaactccggcttcatgatcgcccaggtcaccgctgccgccctggccagcgagaacaaggccctggcgcacccgcacagcgtcgacagcctgccgacctcggccaaccaggaggaccacgtgtccatggcgccggcggcgggcaaacgcctgtgggagatggccgccaacacccgcggcgtgctggccatcgaatggctgggcgcctgtcaggggctggacttccgcgaggggctgaaaagttcgccgttgctcgagcgggcgcgccagacattgcgcgccaaagtgccctactacgtggaagaccgcttcttcgcgccggacatcgccgcggccgacgccctgctcgccgagggcgtgctgagcccgctgctgccggccgggatattgccttctctgaactgaatcgctgaatcgctaacgtttcctcggcctaccggccggggaacgctgtgcgcaaaaaacaacaataaaaaccgaaaggaactcaaatgaattcaattgttctggcggtgctggccatggtcacgctgtcgatgatgcgggtctcggtggtctttgccctggtgatctcggcggtaatcggcgggctgacggcggggatgcctatcgaggcgatcatcgaggccttcaacgaggggctcggcggcggcgcctcggtggccttggcctacgccaccctgggcgcgttcgccgtggcgctgtcgcgtaccggcattgcccagcggctatcggcccgggtggtcgagcatctggggagcagccgacacaaaacgggtgagctggcgctggtcaaatggggcatgttgacctgcctggtgctggccggttttgccgccgagacggtgattccggtgcatatcgcctttatcccgatcctggtgccgccgttgttgcacgtgatgaatcggctacagctggaccggcggttgaccgcctgcgcgatcacctttgccattaccgtcacctacatggcgctgccgatcggctttggcaccatctttctcaacgacatcctgatcggcaacgtcaaccaggccggcgcggcccagggcttgacggtcagccgcgaaatggcgccccaggccatggcgatcccggcgctgggcatggtcctcgggctggtgatcgcagcgttcagttatcgccgcaaacgggtctaccaggagctgccgatcgccggcgagcatctgcgcaacaacgccgagccgttgagtgcacgccagctcgggctgatcgtgctcgccctgctgctggcgctgggcgtgcagttgtggagcggttcgatggtattcggcggcctggtcggcttcgcggtaatttcgatcagcggggtgatccgctggaatgagcaggacgacgtcttcacccagggcatgcgcctgatggcgctggtggggttcatcatgatcgccgcggcgggcttcgcagcggtgatgaaggccaccggagagattcccaatctggtcagcagctcggcggagctgattggcgacaaccgcggcatggccgctctgatcatgctgctggtggggctgttgatcaccatcggcatcggctcgtcgttttccaccgtgccgatcatcgcctccatctatgtgccgctggggctgggtttcggtttctcgccactggcgatcattgccctggtgggcaccgccgcggcgctgggtgatgccggttcgccggcttcggactcgaccctcgggcccactgcggggttgaacgccgatggccagcacgaccacatctgggacaccgtggtgccgaccttcctgcatttcaatctgccgctgatcgccgcgggctggctggcggcgatgttgctctgagccgcctgcacgctcgggtccctgcacctcggccacggcggacgttatcatccgcgcatcgcgcgtcgacattaagggggcctgagtggccagcaatacacctcgctaccgggtcatcgagcaatatctgctcgaacgcatcagcgccggggattttccggtcaatcaccagattcccgccgaggagcaactggcacgggatttcggcgtcagccggatgaccgccaacaaggccatccgcgacctggtgcagaagggctatctgatccgccaggccgggctcggcaccttcgtcaccgatcgcaaggccgagtcttcgctgcacgaggtgctgaacattgccgccgaggtccgcgggcgcggcaacgaatacagcaacctgatactgcgctgcgaggcgatcgaggccgatgacgaggtggccctgcggctcggcgtgcgagtcggcacgccgacctttcacagcatcctggtgcaccgcgagaacggcctgccgatccagctggaggatcgctacgtcaacccgcgctgggtgccggattacctgcagaccgatttcgcccggcacacgcccaacgaggtgctggtggcggcctgcccgatctccgatgtggagcatgtcgtcgaggccgtgctggtcgatcgccagaccgccgaatggctggccatggacccggcgacgccgtgcctgagcatgatccgccgcacctggtcggaggatcacctgatcagctacgcgcggctgatccaccctggggatcgctacaagctgcgttcgtcgctggggccgcgtgacttcgcctcggcctcgccgcgacgtggcagctgacgcctgcgtcgcgaccatgcccgggcgtgtcgggctagtccggtccgctcgccgccaggctgatgcgggtccccgcctgcccctggacgatcgcctcgatatcaccgagtgagccgatgaccgccgtcctgccggtgttgcgcgcgaattcgcaggccgcctggatcttcggtcccatcgaaccggctgcaaaacccaacccttccaactggtcgggatgggcctcggcgatgcgccgctgctgcgctgtgccccagtccagataggcgccgtcgacgtcggtggcgatcaccagcaggtccgcctcgagctgctcggccagcagcgcggagcagagatccttgtcgatcaccgcctcgatgccgtgcagtttccgctcctggtcatagaccgtcgggatgccgccgccaccggcgcagatgaccaccgcacctttttccagcaaccagcggattggcctgatttcgaagatgcgcttcggtcgcgggctggccaccacgcggcggaagtggtcgccgtccgctgcgatgctccagcccttcgccgcggccagacgttcagcttcttcgcggctgtagaccgggccgatcggcttgctcggctgtgcgaaggccggatcgttcgcgtccacctcgacctgcgtcagcaaggtggcgaagggcacctcgacgggcagcaggttgcccagttcctgctcgatgatgtagccgatcatgccctcggtttccgccccgaggacgtccagcggatagctgggcacgtccgtgtaggcggcgccctgtaaggcaagcaagccaacctgcgggccgttgccgtgggccacgaccagctcgttgcccggggcgatccgggcgatctgggcgcaggcggtccggacgttctcgcgctggttttcagcgctcagcggctcgcctctgcgaagcagggcattgccacccaatgcgacgacgatacgcatgctgcaatcctccacggcgcccgcacggggcgggcgccgaatcgttcagatatcggccagggtcgagaccaggatcgccttgatggtgtgcatgcggttctcggcttgctcgaaggcgatgcatgccggcgactcgaagacgtcctcggttacctcgatgccgttggccaggtgcgggtactgggccgcgatctgcttgccgaccttggtctcgctgttgtgaaacgccggcaggcagtgcatgaacttggtccgggggtagccggtggcctgcatcagggccgggttcacctgatagggcagcagctgctcgatacgctcggcccaggcctcgactggttcgcccatcgacacccagacatcggtatgcacgaaatcaacgtcctgcacggcggcctgcgggtcctcggtgagcagcagccgggcgccactctgttcggcgaatgcacggcaggcgttgacgtgctcttcgctcggccacagcgcgcgtggtgcggcgatgcgcacgtccatgcccagcttcgcgccgatcagcagcagcgatttgcccatgttgttgcgggcgtcgcccagatacgcatagctgatctgatgcagcggcttgtcgcagtgctcacgcatggtcagcacgtcggcgatcatctgggtcgggtgatactcgtcggtcaggccgttgtagaccggcaccccggcgtagcgggccagttcctcgaccacgtcctgcttgaagccacggtactcgatggcgtcgtacatgcggccgagcacccgggcggtgtccttcatgctctccttgtggccgatctgcgaggagttcgggtcgatgtaggtgacgttggcgccctggtcataggcggccacctcgaaggcgcaacgggtgcgggtggaggtcttttcgaagatcagcgcgatgttctttcccttcaggtgctggcgctcggtgccggtgtacttggcacgcttgaggtctcgggaaaggtcgagcaggtagcgcagctcgcgttcgctgtggtgcatcaggctgagcaggctgcggttgtgaatgttgaaagccatggtcaagcgtcctctgtgcaggtcgccggcgcgcggccggcggcctgatcgattgatcaatagtcgagtgcgtcgcgcacgatcgggcaggtcatgcagtggccgccgccacggccacggcccagttcgctggcgctgatggtgatcacctcgacgccggccttgcgcagctgcgtgttggtgaaggtgttgcggtcgtagccgatgaccacgccgggctccagggcgaccacgttgttgccgtcgtcccactgctcgcgttcgacctcgtaactgtcgccgccggtttcgaccacacgcagcgccggcaggccgagggcttcggcgaccacctgcaggaagcccgcgccttcccggcgcagatcgatgccgcccggcttgctttcgtcaggccgcaggctgaaggcgacgatgccgttgaccacctcggggtaaacggtcaccagatcgcggtcgcagaagctgaacacggtgtccaggtgcatggccgagcgtgagcgcggcaagccggcgacgatcacccgttcggcggcgccctgacggaacaacgactgggccagctggccgatggcctggcgtgaggagcgctcacccatgccgatgaggaccacacccttgccgatcggcatgacgtcgccgccctcgagtgtggccaggccatggtcgagctccgggtcgccgtaccagaccttgaagtcctgcccggagaactgcggatggaagcggtagatggccgccgtgagcagggtttcctgacgccgcgcggtccagtgcatggggttgagcgacacgccgccatagatccagcaactggtgtcgcgagtgaatatcgtgttcggcaagggcggcaggatgaagctggagtggccgagatagtcgcggaacaggctgacgatctcgccgctgtgggtgcccggcagatcgctacccgacacaccgccgatcaggtattcggacagctgcctaggctgttgctcctcgagccaggcgcgcacctcgttctgcaggccgacgccgacctgattggcggtgatcttgtgatcaaggatccatgtgcgggcttcaggattgcccagcgtctcggtgagcagattgtgcatttccagcacctcgacgccccgttcgcgcatcttgctgacgaagtcgaagtggtcgcgcttggcctggctcacccagagcacgtcgtcgaacagcagctcgtcgcagttggccggggtcaagcgctggtgcgccaggccgggtgagcagaccatcaccttgcgcagttttccggcttcggaatggacgcccagcggcatcggttgtggggtcatgtcagttctccttgcagaggcctgcacctgtgggtgcatggcggcaagccaccgctcgtgacggtggcggtatgtgcggacgcttgcccgacgatcagagggataggaagcccgcgtacagcccgtaggcagcgatggcggcgccaatcagtaccgctgcgaagatcgccttctccagcgaggtgaataccggttggccgagctcatgcttggccttggcgaagaacagcacgccgggcgcatagagcagggccgaaagcagcaggtactgcatgccgccggcgtagaccagccagagcgcgtagagcgtggcgacgatcgcgatcgccagatccttgcgccgctcgccgggctggccttcgtagctttcaccgcgcagcccgaccaggacggcgtaggcggcggaccagaaatacggcaccaggatcatcgaggtggccagatagagcaggctcaggtaggtcgaggcattgaacagggtgatgatcaggaacagctggatcagcccgttggacagccacagcgcattggcggggacgtggttggcgttttccttgcgcaggaaactcggcatggtgtggtcgcgggcgcccgcaaagagaatctcggcgcacagcagcgtccaggcgagcagggcaccggccagcgataccaccagcccgacgctgatcaggatcgcgccccagcgcccgaccacctgctccagcacaccggccatcgaggggtttttcaggccggccagttcggcctggctcatgatgcccatcgaaagaacgttcaccagcaccagcaaggccagcacgctgacgaagccgatcaccgtcgccttgccgacgtcgctgcgtcgctcggcgcgcgccgaataaacgctggcgccctcgatgccgatgaacacccagacagtcaccagcatcatgtttcgcacctgctgcatgacgctgccgagctcggtattgccctggccccagaagtcagcggtgaagacgtccaggtgaaacgccacggcggcgatcaccacgaacagcagcagcggcacgatcttcgcgatggtgctgatcaggttgatgaaggcagcctgctggatgccgcgcagcaccagcatgtgcacgccccaaagcaccaccgaggcgccgatgaccgctggcagggtattgccctcgccgaacatcgggaaaaaataaccgagcgtgctgaacagcaggacgaaatagctgacgttgccgatccaggcgctgatccagtaaccccaggcggaggaaaagcccatgtagtcgccgaagccggctttggcataggcgtacacgccggcgtcgagctcgggcttgcggttggccagggtctggaagacgaacgccaggctcagcatgccgaccgcggtgatcgcccagccgatgagaatggcacccgcgctggcgctggctgccatattctgtggcaaggagaaaactccgccgccgatcatcgatcccactaccaatgccactaacgcactgagtttcagttgcctcggattcctggccatgaccttgtctcctcaaggatggtttaactggaatccattgaatgcctacgtccgggaagcggtcatgacgggcgtcaacaaaggtcaggaatggcgatgtcagcatcggtccggcgttggagcactgcctcatgaggcggaaagtaccgtcccagacgcggtgcatgacgcaagtagctaccaggaggatctatgttccgaccgggtcacgcggaagtcagtcgactggcttcgccaggccttcccggctttcacctggtcctcgactaccatgtcgagggaccggagaacaaaccggagtgggcctgcttccacctgcatgggcatgtcgatgaaacgccgatcgacgagcagttctcgatgcaccgggacgtggcgttcaatttcatgcagcgcatccatcaatgcttgcgcaaacgaggtgtgagcctgcatgccgatgtgctgtttggcttccatgccgactacgatccgctgttcgaggatctgcgccaccagctgcacggcacgcccggggagccggtggatctcgatcggtttttgcgcgaggagtgacgccgctcagttgcggtcggccaccacgccgatgatgaacagcaggagcaacagcaccggagccagggtgtagttgttgaactgggccaggcccttggccagccaggggctcaggtagatgatgcccaagccgtagaccacggcgcagaacaccacgaaggcgagcgtgcgcaggacgaaattgaggccgccgatgttcttctggacccaggcgttgagcgccggcccgaacagcacgaacagggtcgccatgaccgcaagcgagatgtcgaacagatgatgccggctccagcgcgacagggtggcgatgaggtcgagtacaagatccatgcgggggtccttagggcaggaaaagctgcagcaggtcgttgaggaataactggcccttggcggtggcgaccaagcgctgcggatcaggctccagcagtccacgcgcttcggcctcgtggcggccctcggcgagctgcgtcgtcgacagactggtgcgttcagtgaacagtgctgacggaacgccgtcggtgaggcgcagcacattcatcagaaattcgaagggcagctcgtccggttcgagaagcttgtctcccgcgcggaagcgttttgccgggtcgaggtagtccttgggcaggcgcgtcttccagtggcgacggatctgtccgtcgggactgctggccttgccatgggcgccggcaccgaggccgaggaagtcgccgaaggtccagtagttgaggttgtggcgcgcctggcgtccgggctgggcgtaggccgaggtttcgtactgccggtagccgtgctcggcgagcagcgcctggcccgcctcctggataccccacagtgtctcgtcctcggggagcgtgggcggtcggttccagaactcggtgttgggctcgaccgtgagttgataccaggaaagatgcgtcggctgctgagcgatggcggtgcgcaggtcgcctagagcgtcgtccaggctttgctggggcaggccgtgcatcaggtccaggttgaagttgtcgaagccggccgcgcgcgccatgtcagcggcacgcaccgcttcgtcaccatcgtggatacgccccagtgctttcagcttgtcggcctggaagctctgcacgccaatcgaaaggcggttgattcccaggctgcggtagtcgcggaatttcgcttgctcgaaggtgcccggattggcttccagggtgatctcgatgtcgtcggcaaagccgatccgctgttccagtccctcgagaatcctgcccagcgcctgggccgagaacaggctcggcgtaccgccaccaaagaagatcgagctgagcgcgcgcccctgcgcctgatccagatcgcagtccagatcggtcagcagcgccgcaacataggcgtcttcgggaagcgacgggccggctgcatgcgagttgaagtcgcagtaagggcacttgcgcacgcaccagggaatatggatgtaggccgccagcggcggcagctcgaagccgggagctggaagctggaggctgtccgtgcgcttttcgttaccagcgttcggcttctggcttccggcttcgctcatgcgatacccaggcgatgcttgagcagggccatggcgcgggcgcggtgactgatctggttcttgtcctgcggggccagttcggcgctggagcagtcacgctcgggcacccagaacagcggatcatagccgaagccgtgctcgccctgaggggcatgcaggatgcggccatgccagagcccctcgcagagtatcggcagcggatcctcggcatggcggaccagagccagggcgcagacgaactgcgcgccacgctcggcatccggcacctcgcggagcgcatcgagcaacttggcattgttcgccgcatcgccctggccgtccgcgtaacgagccgagtagattcccggcgcgccgccgagatggtccacggccagtcccgagtcgtcggccagcgcaggcaagccggaaaccctggcggcattgcgcgccttgaggatggcgttctcgacgaacgacagcccggtctcctcgggttccacgtcgctgaactcgcccaccgagcgcacgcgtatcgcgtggccgagcatggcttgcagttccttgagcttgccggcgttgtggctggccagcaccagttcgttgaagggcatcattcgtccgggaaaaattcttgagtgaagtcgaaatcgatcggcgcagccccgctaggccgcacgttcagattgaagcgcaggacctcgcgtgactcgaagggaaattgcgcgaggtaatagatggcctcgtcgccttccttgagttgcttgaaggtcaggggatagtcctgcccgagcagattcttgaccgaaccgctgacctgcgcggccaccggtttgccggccttgagcaccgagacgttgaccacgccctgagtcttgctgcgcaccaggcccgccgcagcggctatgtccggctgcaggaagctcgaattgaaggcgctgtagtgaacgtcgtgctcgcccacgctgtgtttgcgctcggccacggcgggcagcgccagcatcagggtgagcatgcctatcaggatggatttcatggtttcctccagcgatgaagcgatcagcgagcaggtccggcaacgcgatagatgccgatctccccgatcaggttgggccacaggcggctcgccacgccgtgtttgtgatgacggtcgaccgccagccgctcgagcacccgggcgccgagttcgcgacaaagccgctcgaaatcctcgaaggtacaaaagtggatgttcggcgtgttgtaccaagtgtagggcaggaactccgagaccggcatgcggcccttgctggccagataccagcggcatcgccagtggccgaagttgggaaaggtgatgatgcattcgcgaccgacgcgaagcatttccttgagcagttcgtccgggtagtgaacggcctgcaacgcctgggtcatgacgaccatgtcgaagctgtcgctggcgaaattgcccaggcccttgtccaggtcctgctcgatgacgttgacgcccttgtcgatgcaggcggcgatgttgtccgggtcgatttccaggccgtaaccactgacctgcttgtggtcgcgtagccaggccagcagttcgccattgccgcagccgaggtcgagcacgcggctaccggccggtatccagtcttggatgatgtccagatcggcgcgcatgtggattccttatagaacgatgcggttcatgtagccgcgaaacgcttgcagataacggggaatgggtatgaggaaggcgtcgtggccttgtggcgcgtcgacctccaggtaacagacgttcttgcgtgcggccatcagcgcatcgacgatctcgcgcgagcgctccggcgagaagcgccagtcggtggtgaaggaaatcacgcagaagtccgccttggctgtggacaaggcttgcgccagatcatcgtcgaacgcggcggccgggtcgaaatagtccagcgccttggtcatcagcaggtaggtgttggcgtcgaagcggctggagaattcctcaccctggtagcgcaggtagctttcgacctggaattcgacgctgttgaagtcgtaattgagcttttcgctcttcagaccgcggccgaacttggtgcccatggcgtcatcggacaggtaggtgatgtggccgaccatgcgtgccagcatcagcccgcgcttgggaatcacgttccgctcgaggaaatgcccaccatggaactccgggtcggagaggatcgcctggcgcgccacttcattgaaggcgatgttctgcgccgacagcttgggtgcggacgcgatcgccacgcaatggcgcacgcgctcgggatagctcatcgtccattgcaaggcctgcatgccgccgaggctgccgccgaccacggcggcccattgttcgatgccgaggacatcggccagccgcgcctggctgttgacccagtcctccaccgtcacgacaggaaaatcggcgccgtagggattgccggtctgcggattgatgctgctggggccggtcgagccgttgcagccgccgaggttgttcagactgaccacgtagaagcggttggtgtcgatcgccttgcccggcccgatgcagctgtcccaccagcccggcttgcgctcatccatgtcatggaagccggccgcatggtggtggccggatagcgcgtgacagatcagcacggcgttgctgcgcgtggcgttcagctcgccgtaggtctcgtagaccagctggtagtcgtggagcgtgcggccacaggcgagtgccagcggctcggcaaaatgctcgaccttcggactcaccagaccaacggaatcggctggaatagctgtgggcatcgaccctggctcgtactggaagaaggcggcaaagtctaaaggttagcgcgcctcaattcatcctcaatcgcaacgcaacggtcaacccaggctggcactggtcaggctgacaaccttgccctggcggcgtagcggtgccgggcgccgtagcacgcggagcatttcgccggcttgtgccagctgctgctccagctcaacgccgtaatgtgccaggaggcggccacgctggctgttttgctggctgtcctgggccaggctcttgagctgaagcatgtgggcttcgagctgttgcttgtgctccagcgagtgttgcatcagcggcatcagcgcttcgccggcccattgctcggcttcctggcgaagcctttggtgcatcgcgatgacctcctgcaccagcgtggcgaagaagcgccgggtcagcgtgcgttgttcggtgagtagcgtcttgagctgcagacggaactgatcggccttgttctgtaggcccttgagctggtgctgataggccgcaagccggaacagtggggcgtcgatgccatgcaacgggttctcgtcgttgtgacgacggtagatcgccgagaccatcttgttcgccagtgccgcttcgtgttcgagggcgccgaggtcctgctccaccgagcggaagaagtgcaggatgctcaggttgatgcccagcgtggtcaggctaccggtcaggctgcggcgcaggcgtgccaggtgttcttccaggcgctcggcgcgcacggtgccacgtagcagctcgccctggcgctgcagcaggcgctggttggtcttgagctgcaacaggcgcttgtgatgctggttgtgatcgtgacgcgtgcgtgcggtcagctccagcagcagctggccactatcctgccgacggccttcgagcagttcgctctgcgcgcgcaccttggccaggcgctgcgtcaggatgtgctggctgttgtgcaacagcgcgagcacctggcgtacgacctgctgctcgagcaattgctctttctgcgcgaggatacgctcgcaaagcaggttctccagcgccaggagccggctgcgttgcagtaacccctggtcaccgcggatcttggccagcagggcctgcttggccgacagcggcaggacgtcatcctcggcgatgtccagctgttgcgcggtggtggcttgcatccgctgaatcgcgtcatcgacgaaggcatcgccggctacgtcgtcccagaggacatcgatcttgttcagaacggcgaacaggcgctggcggtcaccgtcgtccagttgccggatgtgctgctcccagatgttcatgtcactggcggtcgcgccggcatcggcggacaggagaaagatcaccgcctgggcgctcggcagcattgacagggtcagctccggctcgctgcccagcgcgttgaggccgggcgtgtcgaggatgcgcaggccttggcgtagcagcgggtgatcgaagttgaccatcgcgtggcgccaggccggcaccaatacctcgccggggatgtccgcgttttccagcgtgtcggggtggaaaccgagctggatagcgcgctccacgggcatggacttgacggcggcgacctgggtgaaggcttccaccatgccgtcgggattcgccgtgtccagcggcagcgtcaaccagaggagcggattgcgcttgagctgagcgatgctggtgtcttccaggcgcgactcgatgggcagcagacggatatagctgcgctccgcccggggatcgaaaaacagctcggtcggacacatggtggtgcgcccggcccgtgacggcaggatgcgctggccatagcccgagaagaacagggcgttgatcagctccgtcttgcctcgggaaaattcgccgacgaaggccaaggtgatgtgatcggtgcgcagcagcttgagcgcgcggtccagtctggcctcgaccgcctcggaattgaggcggttgtgcgccagccagctgcgataacgggtgatctcgcggaccaggtcacgcttccaggtgacgtaggcatccacttgccggtcgagtcgttccatgatcctggtgtgtcctgataggcgaatcaggcgattatcccagtcgcctggtgtcggtcaatcgagccgttgtgaaccagtgcccaaagtgcgcaaccggaggccgcttcagatcagcgaacgaaggatgttgggcatgtgcgtcatcatggccaggttgttgataaccagcatgtccagcagcttgatcgcgagaaaggcgaagattggcgaaatgtccagtccgcccatgttgggtaagaggcgacggaagggcgcgagcgccggctcgcagatctggctgaccagttgcgcgcccggattgtggctgccgggggcgacccacgacagaatcacgctgatgatcagggcgtagaagaagatattgaggaacagcccggtgaccccgatgatcgcccagaccagcagctgcaggggattgccgatggtgccgtaggcgatcatgagcacggcgcccatcaacagcagttgaacgatgatcgccaacagaagcgacgacagatcgagcccaccgatgcttggaatcacccggcgcaacgggcgtaacaaggggtgcgtggcgcgtacgatgaactggctcagcgggttgtagaaatcggcccgaaccaactgcaggatgaaacgcaagagaacgatcagcaggtaaaggctgccgagcgtctgaacgatcaggatcagggcttgcgagagttgcgacatgaaggctccttaggaactgttgaggtttcgtcgcgagccgcgctgctgcgccgagaggcgctaggcaaagcgcgggacgcaggtaatggttgtgccctggccaagtgctgcagcgccgactggttcgattgcgttgtgcagcccgtgcggctctatacgaagggccggatctgttttggcgcggtgcggcgtcattcgtcgctgatttggactggccaacttctctcccatgcaattcccatatccagcgttaacgccgcaaggccgtcggcggcgccgcggcccggttcttctcgaaccacggcccggcgccccgcaaaagatcaacggaccctacttgcccaattgttcggcaagttcggccgagcggcgtgcggcggcttccattgcctgttgaaccagcgcctcgaggccgcctgcctgaaaggctttgatcgccgcctcggtggttccgttcggtgaggtgacacggcgccgcagttcggcagcctcaacgtcgctttcacaggccatccgcgcggcgcccaaggcggtatgcagggtcagttccgctgcggtatcgcgcggcagaccaagctgttcgccggcggccgtcatggcttcgatcagcaggaagaaatacgccgggccgctgccggacactgcggtcaccgcatcgatcagctcctcgcggtccagccagagcgccagacccaccgccgacagcagctgttcggcctgacgtttctgctcgtcactgactgctgcattggcgaacagaccgctgacgccctggcgcagaagcgcgggcgtattgggcatgcagcgcacaatcgcccgtggcgtatcggcgcccagccattgctgcaggctggcgcaggtgatcccggcggcgatcgatacgatcagttgactcgcttgcagatgcggagccaggtcgcgacagacggtctgcatcacctgcggcttgaccgccagcaccaccacgtcggcaccggcaacggcctgggcattgtcggcgaaagtgtcgatgccgtgagcgtcatggagctcggtgcgtctgtccgcgccggggtcgctggcgcaaatggcggaggcaggaaggccctgggcgcgtagcccaccgatcaggctggcggccatgttgccgccgccgatgaaggcgatacggggagtgctcatgcgaaatgtcctttattcatgcgggtgggctgccgtagtcccgggcaccgaagagtgccgtgccgattcgaacccaggtggctccctcggctatggccgcttccaggtcctggctcatgccaatggaaagcgtgtccaggtccatttggagttcggcttgcaggtggcgtaaccgggcgaacgctgcgcgttgttctgtcggatcgtcggtcggctcgggaatcgccatcagcccacgcaggcgcaggcggggcagggccgcgatggcttgcgccagctgtggcacatcctgtggttcgcaaccggacttgctggcttcgccgctgacgttgacctgcaggcagatattcagcggtggcagcgattcgggacgctgatcggagaggcgttgggcgatcttcagacggtccaccgagtggacccagtcgaagtgctcggcgatcgccttggtcttgttcgactggatcgggccgatgaaatgccaggtcagtggcaggtcggccaggtcggcctgcttctccagcgcttcctgcaggtagttctcaccgaaatcgtgcaggccagcttggcaggcctggcggatagcctcggccggttgcgtcttgctcacggccagcaggtgcacctggtcgggattgcgtgccgcagcttgcgccgcctcacggatgcgcgctgcgacctttgcaatattgttcgctatcgtggacattacctgcgcctgccaccttagggtctgcgcggcattctacctgcttgcttgtaattggggagtcccatggatatcacagagctgctggccttcagtgccaagcagggtgcgtcggatttgcacctgtcttccggcttgccgccgatgatccgcgtcgatggcgacgtgcgtcggatcaacctccccgcgatggaccacaagcaggtgcacgcgctgatctacgacatcatgaatgacaagcagcgcaaggatttcgaggaatttctcgagaccgacttctccttcgaggttcctggcgtggcccgcttccgggtcaacgcgttcaaccagaaccgtggcgccggcgcggtcttccggaccattccgtccaaggtactgaccatggaggacctcggcatgggcgaagtcttccgcaagatcaccgacgtaccgcgcggcctggtactggtcaccggcccgaccggttcgggcaagtccaccaccctggcggcgatgctcgactacctgaacaacaccaagtaccaccatatcctcaccatcgaggacccgatcgaattcgtccacgaatcgaagaagtgcctggtcaaccagcgcgaagtgcaccgtgacaccctcggcttctccgaggcgctgcgttcggcgctgcgggaagacccggacatcatcctggtgggcgaaatgcgcgacctggaaaccattcgcctcgcgctgaccgccgcggaaaccggccacctggtattcggcaccctgcacaccacctcggcggccaagaccatcgaccgcgtggtcgacgtgtttccggcggaagagaagtccatggtgcgttcgatgttgtccgagtcgctgcaggcggtaatttcccagacgctgctgaagaaagtcggtggcggccgggttgcggcccacgaaatcatgatcggcaccccggcgatccgtaacctgatccgcgaggacaaggtggcgcagatgtactcctcgatccagaccggcggatcgctgggcatgcagacgctcgactcctgtctcaagggactactggccaagggtctgatttcccgcgatagcgccaaggaaaaggccaagcagccggaaaacttctaaccaaaatggggccgggcagtatcgcctggctttcgcttcgctggatggcggccatacccgcctgcgagaaagacgatggaattcgagaaactgttgcgtctgatggtcgagaaaggcggctccgatctgttcattaccgctggtgtgccgccttcgatgaaggtcaacggcaagatcatgccggtgaacaagacgccgatgtcgccggagatgacccgcgagactgtgcattcggtgatgaacgagcagcagcgccgggacttcgccgagaaccacgaatgcaatttcgccatcagcgcgcgcggtatcggtcgcttccgtgtcagtgccttctatcagcgcaaccttgccggcatggtgctgcgtcgtatcgagaccaatatcccgacgctcgaagatctgaagctgcccgacgtgctgaagaagctggccatgaccaagcgtggcctggtgctgttcgtcggtgcgaccggcaccggcaaatccacctcgctggcggcgatgatcggctaccgcaacaagaactccagcggtcacatcatttccatcgaagaccccatcgagttcattcaccagcatcaaagctgcatcgtcacccagcgtgaggtcggcatcgacaccgactccttcgacgtggcgctgaagaacaccctgcgccaggcgcccgacgtcatcctcatcggcgaggtgcggacccgcgaaaccatggactacgccgtggccttcgccgaaaccggccacctctgcctcgcgaccctgcacgccaacaacgccaaccaggcgctggaccggatcatcaacttcttcccggctgatcgtcagcagcaggtctggatggacctgtcgcttaacttgaaagccatcgtcgcccagcagctgatcccgaccccggatggcaagggccgccgcgcggtcatcgaagtcctgatcaacacgccgctggccgccgacctgatccgcaagggcgaagtgcacgagctcaaatcgctgatgaagcgctccaccgacctcggcatgcagaccttcgatcaggcgctgtacaacctctacgtgcagggtgaaatcacctacgaagacgcgctgctgcatgccgactcgtccaacgacctgcgcctgatgatcaagctgggctcggaaaccgatggcgagcacctgacctcagtgtcccagggcctcaccctggaagtcagcgacgacgatccgggtcgcagttttcgctaatcagcgcttgccgggctggccgatccgcttgcccggctggttggcgacgcgttcggcctggccgtcacgttgagccccggctctggcgcggctcatcagttgcggaatcagcggcccttcggtcagatttttccagaagcgcaccggcagattgctctgcatcaccccccggttgagccgcgcagggttgaaggtgctttcgtaataggtcttccacagttccgcctcagggtcttttgccgtctgcgccagctcccgccagctgggcgggcaaggcttggcgtagtgcatctcctgcccgtcccacagcactgcgtcatcgggcgtcgcgatcaaccatgaatgcagtcccatccgttcggcgaaatgcggcgccgcgctgatcaggatgtcgtgcgccggctcgaaccaggccacgtattccggagcgctgtcgcagttcgttgggctgaagcgcaggaaggcatgcatatgatgagcttcgcggcgtaccgccttgatcctcgcatgcagctcgctgccatcgacgtcaccgaccagtcgggccgtctgatcgcctctggcgacccgccagagaatccgatacagcaggctccagcggtctcttgcgcgaaagcgcgccgcgctctccagttcgacgatcagttgccgcggaatgcgtatacgcggcatcggctcggtcggctcggtctgttcggcgccatcaggctcgtcgaacaggccaccgctatcgctgctgccgagccactccagccgatgaggggcgacctggcgacgaagcaggtcgcgcgcgacctcgcgccagccatcgaaactgccgtcgaaacgtacctgctgcatcaccacaaccccatctgcaccgggccttcgctgagctgctggcgcagggcggaggactcccggagggcctggctcggccggtaatcgtgggtgacgatgaagggcttggccttttccagtgagcagcgaaggcgcgtcagatcctcgaagcggatgcgtttctgccggcgtagggccaccagacgctgggcgctaaggattccgatcccggggatgcgcgcgatcaatgccggttcggcgcgattcaggtccaccgggaactgctcgcggttggacagcgcccaggcgagcttgggatcgatgtccagcggcaggtttcccggcccggtaagcagctcgccggcggtgaagccatagccgcgcatgaggaagtcggcctggtacagccggtgctcgcgcagcagcggcggcgcctcgaagggaacggtcttgggactgtgcgggatgggactgaatgccgaataatagacgcggcgcagacggaaatcgccatacagtgactgggcggtgtggagtatggtgctgtcgtcggtggcatcggcaccgacgatcatctgagtgctttgtcctgccggtgcgaagcgcggcgcacgcttctcggcctgggcttcggtctcgccctgatgaatcgagtgcatggcctgcttgatggtcacgacttgcttctctggcgcaaggcggagcaggctggactcggtcggcagttcgatattgacgctgaggcggtcggcatagcggccggcctcggcgatcagcagcgggtcggcgtccgggatagtcttcaggtgaatgtagccgcggaactcatgttcttcgcggagcagcttggccactcgattgagctgctccatggtgtagtcggccgagcgaatgatgccggagctcagaaacagcccgctgatgcagttgcgccggtagaaatcgagcgtcagcgccaccacttcttcgggagtgaaacgtgcgcgcggcacatcgctggagcgtcggttgacgcaatactggcagtcgtagaggcagaagttggtcagcaggaccttcagcagcgccacgcaacgaccatccggcgtgaagctgtgacagattcccatgccatcggtcgcccccaatccgctcttgcctttcgagctgcgtttgggcgcgccgctgctggcgcatgacacatcgtatttggcggcgtcggcgaggacactgagcttctcgatcaactgcatggcgattaccgtaacactgtttgcatatacagtatcacggcgcgccagcgaaccaatgcccgctcggcagaagcgccagcgcgtgccaatcggataagctcggcagcaacacctaatcagacccagtcagaacagtgaggctcagatgcggcagaacacccacagcaccttcatcggctatctcctgtggattttcggattcctcggttcccaccgcttttactacggcaagccgatcaccggcaccctctggttcttcacgttcggcttgttcttcgtcggctggatcatcgacctgtttctgattccgtcgatggaccgggaggccgacctgcgctttcagcccggcccgatcgactacaccgtcgcctggatcctgctgaccttcctcggcgtgttcggcgtgcaccggatgtaccagggcaaatggattaccggcctgatctacctgtgcaccggcgggctgttcttcgtcggcgtgctctatgatttctggacgctgaacagccagatatcgatgcgcaacatggaaaagcgctggtaacggtccggctggcccggaccgtttgccgaggcttcagccctggaacgcgattcggccatcgaccagcgtgtagcgcaccgctccaggcaggcagtggcctatgaaggggcagttgcgccccttggagtgccagacttcgccggccagcgtcgagctgtgcggatcgaacaggaccaggtccgcggccgtgccgactgccaactggccggccggcagttgcagtgccgtggccgggccgctgctcagacgagccagcagggtcggcagatccagcaaaccgtcgtccaccagcgtgagggccagcgggagcaggatttccgcgctgctgatacctggctcggtctcgccgaacggcgcctgtttggcatccgcctcatggggctgatggtggctggaaatggcggagataaccccggttctgaccgcctctcgcagcccttcgcggtcggctgcgctgcgcagcggcggctgcacatggtaaagactggagaagccatgcaaggcttcgtcggtcaggatcagctgatacatcgccacgtcggccgtgaccggtagcccgcgggcctgggcgtcggcgatcatccgagcgccgcgcgcggtggtgagctggctgaaatgggcgcgcacgccagtttgctcgaccagcagcaggttgcgcgccaaggcgacggtttcggccgtctctggaattcccgccaggccgagaaacgctgccgcaggcccttcgtgagccagtccgccagcggccagatcagcgtcctgggagtggatgaccaccgtcaggtcgaaggtcgcggcatattccagtgcccggctcaggttccgatggttggtgaactcggtcaggccgttgccgaaggcgacgcagccggcatcgcgcaacgccaccagctcggcgagctgctcgcccgccaggttgcgcgtcagcgcgccgatcggaaacaccttggcatgtccggattcgcgggcgcggtcgaggatcagttcggcgactgccgcggtgtccagcaccggcttggtggcgggcgggcagcacaggctggtgatgccgccagctgtggcggccagcgtctcgctggcgatgttgcccttgcggctatagcccggttcgcgcagtgcgacggacaggtcgaccaggcccggtgtcgcgaccaacccttgtgcgttgagcgtgtgcgcggctgcgaagccggcagggggttgcccaatgcccacgaccttgccgtcctggcagtagatattggtgacctcgtcacggccactggcggggtcgatcaggcgggcgtcgagaatttcggttggcatcagttctgctcctcgagcgcctgttcattgtcgatttgccgttgggctgtctgcccgctcatggccatggacagcaccgccatgcgcaccgcgatgccataggtgacctgattgagaatgaccgactggctgccgtccgccacggcggattcgatttcgacgccgcggttgatcggccccggatgcatgacgatggcgtccggtttggccagcgccatgcgctgcgtggtcaggccgtagaggcgatagaactcgccttcgctgggcagcagtccaccctgcatgcgctcgcgctgcaggcgcaacatgatcaccacgtcgacacctcgcaggccctcgttcatgtcgtgatagacattcacgccgtattgttccagccctatcggtagcagggttttcgggccgatgacgcggatgtccgggcagccgagggtgcgcagggcgagcatgttggagcgggccacccgtgaatgcaggatgtcaccgacaatcgcgaccgatagtttctcgaagtcacccttgtggcggcgaatggtgagcatgtcgagcatgccttgggtcggatgcgcgtggcgcccatccccgccgttgatcacagccacatcggggcagacctgctcggcaatgaaatgcgcggcaccggaatcggcatggcgaacgacgaacatgtcggcggccatggcttcgaggttgcgcagcgtgtcggtcagggtttcgcccttgctggtcgacgaggtcgagacgttcagcgtgatcacgtccgccgatagccgcttggcggccagctcgaaggtcgtgcgggtgcgcgtcgagttctcgaagaagacgttgcacaccgtcttgccgcgcagcaacgggaccttcttgaccgccctggcgcctacttcgagaaaagagtcggcggtatcgagaatttcggtaagcagtgcgcgcgggaggccatccagggacaggaaatggcgcagctgaccgtggtcgttcagctggagcgggcgcttggcgtcggtgggcgtcatcgcaggggtctcaattggcggaagcgaaagtctggtactcgagggcgagcggtgcggggccaagcagcttgacgcgctggtcgggcggcagcgacagcgtggcgccgaccacgtccggacgaatgggcagctcgcgggcgttgaggtccagcaggcagaccaggctgacactggcggggcggccataatcgaacagctcgttgagtgcggcgcgaacagtgcgtccactcattaacacgtcatcgatcagcaccaggtgctggccgtcgatctcgaagggcagcgccgaggggcggacctgtggatgcagcccgttctgggtgaagtcgtcgcggtaaaacgatacatccagcacaccgagggcttcctgccgcccacgcgaatccagcaatgcctgagcgacccagacgccgccggtgtggattccgatgaagcgaggttccgagatgccgtggctgctcaggtgttgatcaagtgcggccgccatttcgggcagcagtcgatcggggttgggcagggtcatcgtttctctccttgaagcgcgtcaggcgcgcggttgtgcggtcaaccagccttcgagcaacagtgccgcggcgagggcatcgactggccgctcgcggtagccgccctgctgtccgccacgcaggcgctcgcctttggcttcgtaagtggtcagtcgctcgtcgtgggtgaacaccggcaggttgaagcgaccattgaggcggcgcgcgaatttctccgcgcgggcgctcatctcgctggcgctgccatccatgttaagcggcaggccgaccaccagcgcgtccggttgccattcgcgtagcagggcctcgatccgcgaccagtcgggcacgccgttctgcgccttgagtacgcagagttcgcgggcctggccggtaatggcctgaccgaccgcgacgccgatctgcttggtgccatagtcgaatccgagcaatagacgcagggcgctcatgcgtggccgacctgagtggtcagcaggtcgaggtccacgcccagcgacgcggctgcggccgtcaggcgctgctccggagggaggtcgaacaggatgtgcggctgcgccgggcagctcagccagacgttgtcgaccagctccgcctctagctggccgggctgccagcccgcgtagccgagcgcgatgaaatagtgcttcggcccgacgccgtcggcgatggcgaacagcacgtcctgtgaggtggtcacaccaagttcgccgagaccgagcgtcgcctgaaactgcgcgtcggctggatgtagcacgaagcctcggtccgtttggaccgggccgccggaaaagacagcgacctgatggttcgccaggccgacgggctcgtccggtcgcaactgctcgagtatgtccgccagattcagcccgctcggtcggttgacgatcagccccatcgccccctcccggttatgctcgatcaggtagatcagcgtctgggcaaagttcgggtccgccatgtgcggcatggccatcaggaagtggtgcttgaggtagctgggcgaggttgcgttcatggttgctagcttaagcgttgcagacgggggcgtgaagccgcctgcgctggcttgccgcgtaagagctgcggtagggcggatggcccgatcagcggctcgacagccggtcgccccgctcgaagcgccaggttctgatgatttcgacctgatcgaacttctgcgccagctcgccggaaaagggggcgaagggcgcggcgagccggacgatgcgcatggccgcctcgtcgagcacggcttgcccggaagactccaggacgcggagttcctggaccgcgccgttgcgatcgacgattaccagcatgcgcaggctgccgtagatgcgttgacggcgtgcttcgtcggggtagttgagattgccgatgcgttcgaccttcttgcgccattcatcgcgataccaggcgctgatgtcgcgcatcgtcgccgcgctgttctggcggctgacgcgcggccttttggcgtactgctcgacctgctgggccagctcggcctcgagactggcaatttccgaactgagctgcgagctgtcatataccggggctggcggcgcctgcggtttcggtttgttgtccgcagcctttgccggcgttttttccggctgaggtgcgcgagtggcaaccacggtcttcggcgtctcgttgcggcggctcggaggcggggcggaagcaggtgtgaccttgcgtacctgggtgtcctggaaaggcgcttgctcggtggttttcggcgacgccttgtgttccagcgtgccgctgccttgctggttgtcctgcgcgaggaaatcggcttccttcggcttgtcttcgctcttgaaggtggacaaggtgatttccagcgtcttgctggtctgcttgggcgcggacaggctgaacccgagccccagaatcaatgccgcatgcaacacggcggcgaggaacagcgtaaagccaagacgatccgccggacggacatcggaatgggcaggaatgggtcggcgagttgcggcgttcatcgcatatcagtcggctcgaagtgcgcgcagtctgcccagcgtgactgcaaaagtctatgaaccaggcggcagctttgatgagcggataaaagaggcggcggcgcggtacatcggccgcagggctgcatctatccagcagcggctgcggccgagccgagcgatcatcggcacgcggctgctaggcgcccgaacggctggtcagcttgtcggcgatcgcgtccatcaggcgctcgccgatccgggtgtcgaatgcattgtcgatttcccgaatgcaggtcgggctggtgatgttgatttcggtcaggaagtcgccgatcacgtccagcccgacgaacagcagtccacgcttgcgcagctccggtccgacgatggcggcgatctcccggtcgcggtcggaaagcggttgcgcgacgccgcgcccgccggcggccagattgccacgggtttcccccgctgcaggaatacgtgccaggcaatagggcaccggctcgccatcgatcatcaggatgcgtttgtcgccgtccttgatggctggaatgtagcgctgcgccatgatctggcggctgccatgttcggtcagcacctccaggatcaccgagaggttcgggtcaccttcgcggtgacggaatatcgaggcgccacccatctcatccaatggtttgagaatgatgtcacgctgttcgcgagcgaactcccgcagaatgtcggaccgtcggctgacaagcgttggtggcgtgcattgcgggaattgcgttgcaaagaacttttcattgcaatcgcgcaggctctgcgggcgattgacgaccagcgtaccggcctgttcggcaagttccagcaggtaggtggcgtagacgtactcgctgttgaacggcggatccttgcgcatcaggatgacgtcgagctcggccagcggcttgtcggtttcttcccctgtctcgtaccaatgttcggggtcgttgaagacggtgagcgggcgcatgcgggcacgcgcctcgccaccgagctggtaaaggtcgcgctgctccatgtagtagatcgtccagtcacgggcttgggctgccagcaacatggccagcgagctgtccttcttgaaggcgatctgcgcgattgggtccatgatgatcccgacgcgaacggtcatgtgatgatctccaacgaacggcagaacggagctgccggggccttgaaatgtcgacgcagattggcggcggttgtgcgttgggtcaaggaaaatcccgctgctccggcggcagatggcttgcttttgaggagtgtgctaaaaaggtccggcgattgggtgcagcccatcgatggcagggcctctggcgcactgacataacgataaactacgactcaccgaggcgatggtagggcgaaatggaacagcactccgagggcttgaaggtcatggtgatcgacgattcgaaaacgattcgtcgcaccgccgaaacgctactgaaaaaagtaggttgtgatgtgatcacggcggtggatggcttcgatgcgctcgccaagattgccgatagtcacccgcgcatcattttcgtcgatatcatgatgccccggctggatggttatcagacctgcgcgttgatcaagaacaacagctcgttcaaatccactccggtcatcatgctgtcttccaaggatggcctgttcgacaaggccaaggggcgtatcgtggggtctgatcaatacctcaccaagcctttcagcaaagaagagttgctcggtgccatcaaggcccacgtgcctgatttcgcaccggtagagcaagtatcctgaagttcggccctgtgtgccgctgaagcctttcccacggagaaaccatggctcgcgttctgattgttgatgactcgccgaccgagatgtacaagctgacagccatgctcgaaaagcatggccatgtcgttctgaaagccgaaaacggtgccgacggtgtagcgctggctcgccaggaaaagccggacgccgtattgatggatatcgtcatgccgggtctgaatggctttcaggccactcgccagctgaccaaagatgctgaaaccagtcacattccggtgatcattgtgacgaccaaggaccaggaaaccgataaggtctggggcaagcgccaaggcgccaaggattacctgaccaagccggtcgatgaagcgacactgctgaagaccctgaacgccgtacttgccggctgataggcggtctcgtaattcggacaagggatgttgcgacatgtcggattcgcctacgccgtttcagcgactcctggagatcgatagccgctgccgagcgctggctgccgggctgccttcacaacaggaggccgtccagacgtgggcggggatcggttttcgaatgggggggcgattgtttgtcgctccgatgggggaggtcggcgaaatacttcatgagccgcgctacaccttgctgcccggagtgaaagcctgggtcaagggtgttgccaacgttcgtggcaggttgttgccggtcatggatctgtgcggctatttcggtctcgagttgtctccgttgcgtaagcagcggcgggtgctggtcgtcgatcatcaggacgtgttcgccgggttgacggtcgacgaagtgttcggcatgcagcactttccggtggatacgttctccgagcagctgccgccggtcgaggcgtcgattcaacccttcattcatggagtcttccagcgcgagcaaccctggctggtgttcagccctcatgcgctggccgcgcatcagacctttctggacgtggcgtattgatttaggtggggtcggctgatgccggccttttggttcttggaaggaaacgtacgggtggtccaggcgggggccggaaaaaatgaaaaaaatgaacgcgaatgcactgctggctggggtacgtagcaatacgttgatcgccgggctgtttatccttctgatcgtgtcgatggtgttgctgttcgtgaacttcgcgtacatcaatactcaagccgactatgacaacgaatacatcggacacgcaggcgagctgcgagttctgtctcagcgcattgcaaagaacgccgtagaggcggccgccggtaccgcggaagcgttcgactcgctgaaagaggcacgcaacgacttcagcgagcgttggggttacctctccgaaggggatgagcgcatcggtttgccagcggttcctcagtcgctacagaccgaagtcgccgcggtgcagcaggactgggacaccttgcggcagaacaccgacgcgattcttgccagtaagcaaacggtactgtcgctgcatcaggtcgcggcaaccctggccgaaaccattccgcagttgcaggtcgagtacgaggaagtagtggacattctgctggaaagcggcgcaccagccgctcaggtgtccgtggcgcagcggcagtcgcttctggcggaacggattctgggctcggtgaataaggtgctttccggtgaccaggactccgtgcaggctgccgacatgttcgggcgtgatgcgagtctgttcggtcgcgtgctcagcgcgatgctcgagggcaacgaagccatgggcatcagccgggtcaacgacgccgaagcgctggatcgtctggctgcgatttccgagctgttccagttcgtatccggctcggtggacgagattctcgaaacctcaccggaactgttccaggtgcgcgaatcgtcgaacagcatcttcgaggtctcgcagaccctgttggacaagacatccgcgctgactcagggccttcagagccgtgcggacgctcgatacgtcaacgcactggccggttatgtgctcggtgcgctggcgctggcctcgatcctgttgatcggcctggtcatggtccaggagactcgccgccggttgagcgagacggccgaaaagaacgagcgtaaccagacggcgattctgcgactgctcgacgaaatcggcgacctggcggacggtgacctgactgtggcggcaaccgtgaccgaagacttcacgggcgccatcgccgactcgatcaactactccatcgaccagttgcgtgatctggtcgaaacgatcaaccagacggccgtacaggtgtccggtgctgcgcaggaaacccaggcgaccgccatgcacctggccgaggcttccgaacaccaggcccaggaaatcgccggggcgtctgcggcgatcaacgagatggccgtttcgattgaccaggtatcggccaacgccgccgaatcctccgcggtagccgagcgctcggtagcgatcgccaacaagggcaacgaagtggtgcacaacaccatcaccggcatggataacatccgtgagcagatccaggacacctccaagcgcatcaagcgtctgggtgaatcgtcccaggagatcggtgacatcgtcagcctgatcaatgacattgccgaccagaccaacatcctcgcgttgaacgcggccattcaggcctcgatggccggcgatgcgggccgaggcttcgccgtggttgcggacgaagtacagcggcttgcggaacgttcgtctgcggcgaccaagcagatcgaggcgctggtcaagacgattcagacggataccaatgaagcggtaatctccatggaacagacgacctccgaagtggtacgcggggcgcgtctggctcaggacgccggtgtcgcgctggaagagatcgagaaggtatccaagagcctggcggcactcatccagaacatttccaacgccgcgcgccagcaggcttcgtcggccggccatatctccaataccatgaacgtcattcaggaaatcacgtcgcagacatcgtcaggcaccaccgccactgcgaagagcattggtaacctcgcgaagatggccaatgaaatgcgtcactcggtatccggctttacgttgccgacgacgcaggaccaggcctgatgagagcacggcagccagccatggctgccgtagacgttcacgagtaaggggcagggcatgcagccaagtgttgactggtcattgagacccttggccgatatgtcgtcagccgaatttaacgactggcaggccttgctcgaagagcgctcgggcctcgtggttaccgagcagcgtcgaacgttcctccaggcgaacctgagcagtcgcatgcgcgaaatcggagtgactgactatgccagctactatcgccaggtgaccgacggtccccggggcgcggtggaatggtcgaccctgatggatcgcctgacagtgcaggaaacgcgcttctttcgccatcccccgtcgttcgcgctgcttagtgactatatgcggcagcgccacgagtcgcgtgatcacgcggagcggccctggtcgttatggagcgtgggatgtgccagcggcgaggaaacctactcgctcgcgatctgcgccgccgaggcgttgggccacgggcaagccgaggcgacgtttggtgtgatcggtaccgacatcagcctcagcgccttggcgcgttcgcgcgagggcttgtatagccagcgacgcctcgaacaggtgtttcccgacctgcgcaatcggtatttccagccgtgtgcagacgaccggttccaggtaataccgagtctggcgtcccgtgtttgctttgccaggctcaatgtcctggagctggctggcgcgccaatgtccgatatggacgtcattttttgtcagaacctgttgatctacttccgtcgctggcgccgccgcgaaatcctcaatcgcctggtcgaacgcctggtgccggggggcttgttggtaatcggcgcaggtgaagtggtcggctggcagcacccggagctgacgcccgtggctgatagtcaggttctggcctttatccggaaaagtttatgagcggagtcgctatgggtgatcggcacgattatgtcgccctggagtgggtgaaaggcgaaattgccgaaacgctgaagcaggcgcggcaggccttggaagcgttcgtcgaaaacccgcaagactcgacgcggatgcgcttctgtctgacctatgtgcatcaggtgcatggcaccctgcagatggtcgagttctatggtgcagcactgctcgccgaggaaatggagcagcttgcccgtgccttgatggacggggccgttgccaatcagaacgaagcgctggaagtgctcatgcaggccatcctgcagatgccggtgtatctggatcgaattcaaagcgcccgtcgcgatctgcccatggtcgtgctgcccctgctcaacgatctacgcgccgcacggggcgagaagctgctgtcggaaaccagcctgttctcacccgacatgtctgcccgcgcgcccgcgctttcccatgagtttctggctcagagacagaccgaagaacttccggggctgcttcgcaaactgcgacagatgctgcaggtcgcattggtcggcgtcatccgcaatcaggatctgccgaccaatctgggttacatggcgcgggtcttcgcgcgtttggaaatgctctgcaaagaagcgccgttgggcgcgttgtggcagatcgcatcgggcgtggtcgaggggctcgccagcggtgcagtcgccaacggcaccacggttcgaaacctgctgcgtcaggtcgacaaggagctcaaacgcctcgttgcccagggcgccgacgggatcaaccagcctgcacctgacgagctgatcaagaacctgctcttctacatagccaaggcaccgaccgagtccccacgcatcaaggcgctgaaggctgaatacagcctggatgatgcgctgccggacagtaccctggtcgatcaagagcgcgcccagctgtcgggtccggaccgtggagcgatgcgttcggtcgtggccgctctgtgtgaggagctggttcgcgtcaaggacagcctggacctgttcgtgcgcagcgatcgccttgggctggccgaacttggcgcgttgcagccgccgctcaagcagatcgccgatacgctcgccgtgctgggtttcggtcagccccggcggatcgtgctcgatcagatcggcgtgatcgaagccctggctcaagggcagcggcagcctgacgacgcggcactgatggatgtcgcaggcgcattgctgtatgtcgaggcgacgttggccggcatggtgggcggtacgtccgatgagcggggcgaagagagccatctgcccaccaccgacgtggcgcagattcatcgcctggtgattcgcgaggcgaggactggcctggaacaggccaaggacgcgatcatcgaattcatcgcctcccagtggaaccatcagcacctggcgcgcgtacccgagcttctgacccagtcgcgcggtgggttggccatggttccgctggcacgtgccgccgcattgctggacgcctgcaaccgctatattcaggaacaattgcttgctcagcaggcgattccggactggcagagcctggataccctcgccgatgccatcaccagcgtcgagtactacctcgagcgcctcagcgaagactgtggctcgcaaggcgatctgattctcgacgttgccgaagaaagcttgcaggcgctggggtacccgctacgcgagccggccccggcggccgccgatcaggccgatcagatgggtaccgaggcgagcctggagctgcacgatccgctggatgaaatcgaagtcctgctaccggaacccgcttcggaattcccgcctgcgcagcagctagaacaatccgacgaacttagcgccgatgcggcgacgctcgacgagtcgaacctggacgagccggacctcgtccttgagtggatggttgacgagcaaggtacggcagacggcgatgatgccgagtccgcatcgtcagccgtatcggcggagtggctcgaactcaccgaatatcccgtaaccgaactgcctgcacctgaagaggctgatgcgtcctcgccgggtatcgatatcgacgagtcgcctgccgacgagcagggccttaccttggaatggagcgaggccgaaatggccgaactcgacatgcccgaggtggagttgcctgagcggatggagcaatcggttgccgccgaaccggcgatgaccatggaagatgtgatggccgcgccggtcagttcgatcaacccgcctgcgcagcacgtcccgccgagtttgctaccaccgcccgagggcgaggaaccggtcgatgacgacctgctcgaagtgttcatcgaggaggctgccgaggtgctcgagaccatcggcgagtatctgccgcgctggtgcgccgatactgccgacaaggacgcgctcggcgaggtgcggcgagctttccatacgctcaagggaagtgggcgcatggtgcgcgcgttgatcatcggcgaactggcctggtcggttgaaaatctgctcaaccgcgtgctcgatcgcagcatcgaaccgagcgagccggtacgcaagctggtcaccgatgtggttgccctgatgcccgtgctggtcgaagagtttgccgccaaggcgcagcgtcagcgcgatgatgtcgaccgcctcgccgcgaacgcgcacgccctggcgaaagggttgccgaccgatccggagccgtcgggcggtgccacggttgacgagccggcggcggcaccggcggtcgaggataccctggatccgcagctgctggagatcttccgcaacgaggctgaagcccatctcaccaccttggtcgactacctcgccgactgtgcgcaacgcctgccgcaaccggtgactgatgccttgcaacgggcgctgcataccctcaagggcagcgcgcacatggcaggcatcctgccggtggcggagattgccacgccgctggagaaaatggtcaaggagttcaaggccaacctgattccaatggatctggccgaggccgagctgattcaggctgccgagcagctgctgcgtcgtggactcgagaatctcgagcacgatccgctggcgccgatcgaaggtgccgaagcgttcatcgcccgggttcacgccctgcatcaagctcggttggcagacgtcagtgagcgtaccaacagcgaacagggcgagccgcgcgacccggggatgattgcgctgtttctctccgaaggcatgaacatcctgctggacgctgaggacttgctgcatagctggcgcgagcacccagccgaacgccaggagttgacggcgctgctggaagaactgacgacgctcggcctcggtgcacagatggccgatctaccgcagatcgatgcgctttgtcaggttctgctcgatctctacgcggtagtgcaggacggccgtctcgcggtcagtgcacgcttcttcgacggcgtcgaacaaggccatgaggcgctggtcggcatgatggatcaggttgcggccggtctgcaggtcaccggtcagcccgaattggtggctcgcctcgaagcgttactcagcgaggcgatcgacccgcagctctatgagctgccaggcgaagacctgcagcctgatgcccttgcccataccgttgcgatcgatgacgtcaccgagcagacaaccgaagccgaagccgaagccgaagccgaagcctggcctgcggagcctcatgcggagcacaacgcactcgacgaggaaatggtcgagatttttctcgacgaagccgtcgatctgcttgaaagcgccggcgctgcgctggagcgctggcttggcgaccctgccaatcagctggcgctctcggcactgctgcgcgatctgcacacgctcaagggtggcgcgcggatggcggaagtccgcccgatcggcgatctcgcccatgagctcgaaaccctctacgaggggctttccgacggtcgctatgtccacacggacgatcttgccaggctgcttcagcgcagccacgaccagttggcggtgcagctggagcaacttcaggcacataagccgatggatgccgccgcgacgctgatcgaagagattcgcgcctatcgccagggcatcaggcctagcttggacggcgatgccttcgggccggacgaggtggatgtggctgaggccatttccggtgcggaatttgaagtcgacgacgctgagccctcggcattggccgacatggatgacgagtcctctctcgtaaccgatgcgattgatgttcccgatgacgcctcgaccgacgctgagaccgagcaggccgaatccgcgccgacggagaccgttggtatcgtcctggaggactcggcggaggagccgtcagcaccgccggaagctgcggcgattgagcctgccgattccgaggctgcgcatcctgcaacggagtccggcgcgcccgacgtcaccgattgggacaaccgggatcccgagctggtagaaatcttcttggaagaaggcttcgacatcatcgagcgtgccggggcctcattgcagcgctggatggacgacgtcgacaacagctttgagatcgaagcgctacagcgtgacctgcatacgctcaaaggcggcgcgcggatggccgacatacgcgagatcggcgatctggcgcatgaactcgaatacctctatgaggggctgtgcgccggcaattaccgcgcgagtccggctttgttcgtcctgctgcagagctgccatgaccggttggccgcgatgctcgacgcggtgcgtgcttaccggacgctgcccagcgggcaggacctgatcgaaaccatcggccaattccgggccaatcctgacgagcaactgagcatccccagcagtgttgcgctgaccgccgctcaggatacggccgaggccgaaattctcgacattttcatcgaggaggccgatgacctgctcgaggaaatggagacgtcgctcgggcgctgggaggcctcgcgcgatagtgctgcgccgatcaccgacatgatgcgcgtgctgcatacactcaagggaggtgctcgcttggccggccagggccgcctgggcgacatggcccacgacctggaacagcgcctgagcgaagcgcaagtgcagggtggcccctggacggacagcctgtttctggacgtgcagggcggctacgacgcgctgctcaaggaagtggaagcgatgcgctcgcggctcgccagcgacgcagacatcgcggtgcccgagcaattgccggaaagtccccaggcgcctggtcccgacgcttcggtggtcgtgctcgaaacccctctcctggcggccagtgcgcaacggcaggacgtcgcggcaccggccaaagtcctgccattcatccgtcgtgccgaacaggctgcgctggacgccgcatcgcgtcgtgcaccgcaggaactggtgaaagtccctgccgacctgctcgagggcttggtcaatctggctggcgaaacttcgatctttcgtggtcgagtcgagcagcaggttagtgacgtcggcttcaccctgggcgaaatggaagcgaccatcgaacgtgtgcgcgaccagttgcgacggctggataccgaaacgcaggcgcagattctcagccgctaccaggccgaggccgagcgtgccggctacgatgacttcgacccgttggaaatggaccgtcactcccagctccagcagctttcccgcgcgctgttcgaatccgcttccgacttgctggacctgaaggaaaccctggctgcgcgtaatcgtgacgccgaaaccttgctgttgcagcaggcgcgggtcaacaccgagctccaggaagggctgatgcgcacccgcatggtgccgttcgaccgcctcgtgccgcgtctgcggcggatcgtgcggcaagtcgccagcgagctgggcaagcaagtcgaattccatgtgggcaacgcgacaggggaaatggaccgcagcgtgctcgagcgcatcgtcgcgccgttggagcacatgctccgcaacgccgtggaccatggcatcgagcacgcggccaagcgcgtggcggcgggcaagccggagcagggcaacattcgcctggacctgagtcgcgagggcggcgacatcgtcctgtcgctgggcgacgacggcgccggtatcaatcttgaagccgttcgccgcaaggcgatcgagcgtggcctgatgttgcccggcagtgatctgtcggaccatgaggtgctgcagttcattctcgaggcgggattctccacggccgagcaggtcacgcagatttccggccgcggtgtgggcatggacgtggtgcactcggaggtcaagcagctcggcggctcgatgagtatcgagtccaagctcggcagcggtacgcgcttcctgatccgcctgccgttcaccgtgtcggtcaaccgggcgctgatggtctattccggcgaggatctctatgcgattccgctcaacaccatcgaaggtatcgttcgggtctccccctatgagctggaagcctactatcagccgggcgcgtcgcgcttcgagtacgcggggcaaacctatgagctgcgttatctcggtgagctgctgaacaacggccaacggcccaaactggtcggtcaaagcctgccgctgccggtgattctggtgcgctccaacgagcacagcgtggcggtgcaggtcgatagcctggccggctcgcgcgagatcgtggtgaaaagcctggggccacagttcgctacggtgccgggtatttccggcgcgaccattctcggtgatggccgcgtggtggtgattctcgacctgctcgcgaccatccgcgtactgcatgcacatctgctcacgcagcagcagccgttgcgtctgttcggcggcgacgagccggccgaggtcgaggtcgatcggccaacgctggtcatggtagtggacgattcggtgaccgtacgcaaggtcaccagccgcctgctcgaacgcaacggaatgaacgttctgacggccaaggatggcgtcgacgcgatcacccaactgcaggagcgcaaaccggacatcatgctgctggacatcgagatgccacgcatggacggtttcgaagtggccacgctggtgcgtcacgatgagcacctgaaagacctgccaatcatcatgatcacctcacgaaccggggaaaagcacagggaccgcgcaatggccatcggcgtcaacgaatacctcggcaagccataccaggagtcgctgctgctcgaggcgatccagcaactggtcaagcgccatgactgagccgctggccgcacgcattggcgtgatcgccgatacgtcgctgcagcggcacgtgctgcagcaggcgctgagcgccaacggctacacggtggttctcaacagcgatcctgcgcggctgcaggaggcggacctcatggcggtggaggctgatctgtggctggtcgatctggcccagacagaagactcgccgctggtcaacgcgctgctcgaacgggacagctgcccggtgctattcggcgaggggcacgcgcccgagcgccattccgagcactatccacgttgggaacgtcgtttgttcggtaagttgaaacgcctcgtcggcgacccgtcccgggtcgttggtccgcgtctcgaagggttgcgcgcagataaagaagagccgaaacgcctggagctgccacgcgcgttgttggctgccgagtcggttgcgggcgagccggcgacggaagtctggctgctggcggcatcgctgggcggccccgaggcggtgaaggcatttctcgatgcgctgccggacgggttgccgattggcttcgtttacgcccagcacatcgaggccagtttcgagtcggcactgtcgcaagcggtgggacgccacagccagtggcgcgtcaatcagagtcgcgcgcacgacccggttcgctgcggcgaagtcgtgatcgcacccgtcgctcaggaaatgagcttcggcaaggatggcgccatgctgctcagcgggcgcagctggccggagccctacagcccgtccatcgatcagatgatgcttaatctggcccagcagttcggcagccgttgcggcgtcatcgcattcagcggcatgggcagcgacggcaatgccgccgcagcttacgtgttgcgccagggcgggcgcgtctggacccagcgtgccgactcctgcgtctgctcgagcatgcccgacagccttcgcgagggcggctacagctcgttcagtggcgatccgcgcgaactggcccaggcgctggtcactcatctcgcccagcaggccaaaccgcccgttgcggctctgcatttggaaaacccatgagtcaatccgtcactacccaggacactgccaccagcatcaccgggctactggtgccgctggccgatcgcacgctgctgctgcccaacgtggctgtcgccgaattgatcccgtatcgcgcaccgcacgccaccgagggggctccatcctggtttctggggcaggtcccgtggcgcgacctgcgattgccgttgctgtcattcgaggcggcgtcgggcgggcagcccgaaatcggtccgcaggcgcgggtggcggtactcaacgcgctcggcgggcgcgaccacgtgaagttcatcgccctgctggtgcagggtattccgcgttcggtcaaggtcgaccccagcctggcacgctcggatgtggcattggcgccgctggagctggatgcggtcaatttcggtgacgcccaggcgcgtatcccggacctggtggcactggagcagaagctcgcggacgctgggctgatctgaccgagctggccagcgcaccccggcgatcggccgtggcgtgtcggcaaactcagtgctcgggtgggaaatcaccccatagctgctgcgccacgctcagcgccaccaccggggcggtctcggtgcgcaggatccgaggcccaaggcgggcgggctggaatcccgcggtacgtgcctgggccacttcggtatcgttcaagccgccttcgggcccgatcaggacagccagggtggcggggcgttgatgcgcagttagcggttcggccactggatgcaggaccagcttgagcgccgcctctaccgccagccactcgttcaggggcgtcggtgggtgaatggtcgggatgatcgagcggccgcactgctcgcaagcgcttatggcgatctggcgccagtgggccagacgtttgtccgcgcgctcctcattcagacgtacttcgcagcgctcgctgatgactggcgtgatctcggccgcgcccagttccgtggctttctggatggcccaatccatccgctctccccgcgacaggccctggccgaggtgtatacgcagattcgactcgggcaggccgggcagcctgtcttgcagatcgaccgtgactcgcttcttgccgacgtcgaccagctcgccgcggtactcatgcccgctgccgtcgaacagctgcaccgcggcgccagtcgtcaggcgcaggacccggccgatgtagtgcgcagcggtctctggcagatcctgcgggccaagcgagagtggggcgtcgatgaagaatcgggatatgcgcatcgggcatgctacggtcgaaagaaaggagcggcagtctatcgcctaagccgcaaaccctgaagcctgcggccgcggtgatactaaccgggatcgcgaaactcgtcgggcgcgcccgcggcgatggagacgctgaccgctgcgcgggtagcgatatcgatgccttcgctggcgacctcggccaggaagtcgatctcttcctccgtgatggtatatgggggcaggaaatacaccacgctgcccagcgggcgtaatagcgcaccacgctgcagcgcatgttgatagaccttgagcccgcggcgctcctgccagggataggcggtcttgctggccttgtcctgcaccatttcgatcgcgacggccatgcctgtctgccgaacctccgccacatgggggtgatcggccaggtgagctgtggcgctggccatgcgagcagccaggcctttgttggcttcgatcacgttgtcgcgctcgaagaggtccagcgtcgccagggccgcggcgcaggccaacgggttgccggtgtacgtatgcgaatgcaggaaggcgcgcaaggtcgcgtagtcgtcgtagaacgcctggtacatcctgtcggtcgtcagcaccgcggccatcggcaggtaaccgccggtgagcgccttggacagacacaggaaatcaggcgtgatgcccgcctgctcgcaggcgaacagggtgccggtgcggccgaagccgaccgcgatttcgtcgtggatcaggtgcacgtcgtagcgatcgcaggcctcgcgcagcagcttgagatagatcgggtgatacatgcgcatgccgccagcgccctggatcaatggctcgacgatcaccgcagcgatctgatcatggtgctcggcgagggtctgctccatgtgcgcgaacatctggcgcgagtgttcctcccagctcacgccgtcggggcgcagatagcaatccgggctgggaaccttgaaggtgtcgagtaataacggcttgtacgtatcggtgaacagcgcaacgtcgcccaccgacatggccgccacggtctcgccgtgataactgttggtcagggtgacgaagcgctgcttttccggccgcccgcagttgcgccagtagtggaagctcatcttcaacgcgacctcgatgcccgccgaaccgttatcggtgaagaacacccgatcgagaccggccggggtaatcttgaccaggcgttccgacagttccacgaccggttggtggctgaacccggcgagcatcacgtgctcgagctgatcgagctggtccttgatgcgctgattgatgtatggattggcgtggccgaacacgttgacccaccaggagctgaccgcatcgaggtagcgtttgccgtcgaagtcttccagccagacgccctctccacgccgtatgggaatcaagggcaactgctcgtgatccttcatctgggtacaggggtgccagagcacggagaggtcgcgctgcatccagctgtcgttcaggctcatggtcgctcctttgcacgtaaaatcgtcgcagcctagcagaagtcattcatggcgcttagctggcgtccatctatctgcctggtcgataaattgaaacaaaaaacgagattcattccgatctgttagtcgttaggcttggctcattcattttcgaggcgtcttcatgcattggcgaaactcatccagtaactatggcttggtcagtattctgatgcactggctcgtggcgatcggcgtggtggggctgttcgcgctgggttactggatggtgggcttgacctactacagcagctggtaccgtaccgcccccgagatccacaagagcattggcctgctgcttctggcagtgatggtatgccgggtcgcctggcgattcctgagccccggtccggcgccgctggcgaaccacgggcggttcacgcgttcggccaccaaggcggggcacggccttctctacatcggcctgttcgcggtgatgatctccggctacctgatatccactgccgatggacgtgcgatcagcgtgtttggttggttcgaggtgccggcaacgatcacctccatacccaagcaggaagacgtcgccggcctggtccaccagtacctcgcctggggcctggttattttttccggcgtgcatgcattggcggcgctgaaacaccatttcatcgatcgcgatgcgacgctcaaccgaatgctcggccgtgccgaagcctgatatccatcactcaaggagacatcatgttgaagaaaaccattgctgcattggccctgggctcgtcgcttctcgccagccaggtcttcgctgcggactatgcgatcgacacccaaggccagcatgccttcgtcaatttcaagatcagccatctgggctacagctgggtctggggtagcttcaaggagttcgatggcaacttcagcttcgacgccagccagccagaagcgagcaaggtcaaggtgactctgcagaccgcaagtgtcgacacgaaccatgccgagcgcgacaagcatctgcgcagcgatgacttcctcaacgtttccgagcatccgaccgccacgttcgaatccacgtcggtcaagtcgactggcgacggtaccgccgatatcaccggcaacctgacgcttaacggcgtaaccaagccggtggtgatcgccggtaagttcatcggcgaaggcaaggacccttggggcggctatcgcgctggcttcgaaggcaccacgacgctgaaactgaaagatttcgatatcaagatggatctgggcccggcgtcccagacggtcgatctgatcatttcggtggaaggcgttcgccagtaaaccgaggtgggttttccagcgccggcgtaagccggcgttctgatttctatggcaccgaaaccttgttgccactcgttcaaaagaacttcgctagtggtcccggtgacgcgtcgcagacgcgatcatctgtttacagacagtcttgaatgtaagtatattccacacattctgccattcgagtctgtccgagccatcgagctctgggactgtctgttcaatgaggtcgcgttcgatgtcaatcaagcaagccagtgctgctctgatcccctttcttgccgctgcgatcctgctcggcggttgccgcgatgaccaggccgagcacgccgacgggggcaagccccagccaaagccgcaggtgggtatcgtgaccctggaggccgagccgttcgcccagactaccgagctgccgggccgcactaccgcctaccgggtggccgaggtccggccgcaggtcagcgggatcattcagaagcgcttgttcaccgaaggcagtgaggtgaagcaagggcaacagctgtatcagatcgatccgtccgtttacgaggccacgctgaaaagtgccgaggcacggctggcttcggccaagtcgctgtccgatcgctatggcttgctggtcaaggaacaggcggtgagccaacaggcctatgacgaggcccgtgcggcgtcgctgcaggcgcaggccgagctcgagcgagcgaagatcgatcttcgctacaccaaagtgctcgcacccatctccggccgcatcggccgctcggcagtgactgaaggcgccctggtcagcaacggtcaggcgcagcagttggcgacgatccagcagctcgatccgatctacgtcgacgtaacccagccggtgcaggacctgattgccctgcgcaacgaccttgaaagcggccggctgcagcaggccagtgacagcgcggccaaagcccggctgatcctgccgaacggcaccgaatatccgcgtgacggtaccctggaagtctctgaggtggcggtggatgaaggcaccggttcggtcaccctgcgcgccgtgttcccgaatccggagaaaaacctgttgcccggtatgttcgtccacgcgcggctgctggccggcgtgcgcgagcaggccttgctggtgccgcagcagggcgtcacccgtaatgctcgcggcgagccgaccgcgatggtggttggcacggacaacaaggtcgagctgcgccagatcaagaccgagcgtgcggtgggcaaccgctggctggtcagcgaaggtctgcaacctggcgaccgggtcatcaccgaaggcctgcagttcattcgccccggtgtcgaggtcgatccgcatccggccggcaacgttcaacaggccggcccggctgtcgggcagcccgctgagcaggccgctgcggcacccgctgccggccagggggaataacccgatatgtccaagttcttcatcgatcggccgatcttcgcctgggttattgccctggtgctgatgcttgccggcacgctggcgattctcaatctgccggtcaatcaatatcccagcatcgcaccacccaacgtggcgatttcggtcaactacccgggcgcttcggcgcaaaccgtccaggacactgtcgtccaggtcatcgagcagcagctcaatggtctcgatgggctgcgctatatcttctcggagagcaactccgacggcagcatgaccatcaacgtgaccttcgagcagggcaccaatcccgacatcgcccaagtccaggtacagaacaagctgcagctggcgacgccgctgctgccgcagcaggtccagcagcagggcatccgcgtgtccaagtcggcgcgcaacttcctgatggtggtggcgctggtgtccaaggatggccggcagagcaacttcgatctggccaactacatcgtggccaatatccaggatccgatttcgcgcacccagggtgtcggtgacttccaggtgttcggtgcccaatacgcgatgcgtatctggctcgatccggccaagctgcagcagtatcagctgaccgctgtcgacgttcgttcggccatccaggagcagaacgtccaggtgtcgtccggtcagcttggaggcctgcctgccatcgagacccagcaactgaacgccacgatcatcggcaagacgcgcctggagacgcccgagcagttccgcaagatcctgttgaaggtcaatgccgacggctcgcaggtgcgcctgagcgacgtcgccaaggtcgagctcggcgccgagaactatgcgatcaacgctcagtacaacggccagccggctgcgggtctgggtattcgtctggccgcgggcggcaacgcgctggacaccgccaatgcggtgcgccagaccatctccgagctggaacccttctttccgccgggcgtcgaggtggtctatccctacgacaccacgccggtgatctcggcgtcgattgagggcgtggtgcatacgctcctcgaagccttcgtcctggttttcctggtgatgttcctgttcctgcagaacctgcgggcgacgctgatcccgacgctggccgtaccggtggtcatcctcggcaccttcgcgatcctgctgacgttcggatacagcatcaacacgctcaccatgttcgccatgatcctggcgatcgggttgctggtggacgacgccatcgtggtggtggagaacgtcgaacgggtgatgcgcgaggaagggctctcggccagggaagcgacgcgcaaatccatgggccagatccagagcgcgctggtgggtatcggcgtagtgctgtcggccgtattgctgccgatggccttcttcggcggatccacaggagtaatctaccgccagttctccatcaccatcgtctcggccatggtgctgtcggtgctggtcgcgctgatcttcacgccggcgctgtgcgcgaccatcctcaagccgcatgacggcgagcatgaaggcaagcgtggcttcttcggctggttcaaccgcacgttcgatcgcggtacccagcgctacgagcgcggtgttgcaggtctgctgcggcgcaaggtgccctacctgctgatgtatctgctgatcgtcggcgtgatgatctggatgttcacccgcattcccaccgcgttcctgcccgaggaagaccagggcgtgctgttcgcccaggtgcagacgccggccggttcgaccgccaaccgcacccaggaagtggtcgagcagatgcgcgactatttgctgaacgaggaaagcgagacggtccgttcggtcttcaccatcaccggcttcaacttcgccggtcgcggtcagagctccggcatggccttcatcatgctcaagccctgggaagagcgcaccgagtccgggcagggcgtgttcgacctggcccagcgtgcacagggctatttcttcagcctgcgcgacgccatggtgttcgccttcgcaccgcctgcggtgatggagttgggcaacgccaccggttttgacgtctatctgcaggatcaggccggcctgggtcacgaggccctgacccaggcgcgcgacaagttcatggagctggcggggcaggatccggttttgaccggggttcgcttcaacggcctgcgggacgagccgcagtaccacctgatcatcgacgatgaaaaggcgcgtgcccacggggtttcgctcgccgcgatcaacgactcgctgtccatcgcctggggttcgagctacgtcaacgacttcatcgaccgcgggcgcgtcaagcgcgtctacatgcagggcgagcccagctcacggatgaatccggaggatctcggcaagtggtatgtgcgtaacgatgcgggcgagatggtgccgttcactgccttcgcctctggcgaatggacctatgggccgcccaaactgacgcgcttcaatggcgtgccggcaatggagattctcggctcggccgcaccgggctacagctccggcgaggcgatggccgcggtcgagcggatcgcggagcaattgcccgccggtatcggctactcctggacggggcaatcctacgaggagcgcctgtccggttcgcaggccccggcgctgtatgccctgtcgctgctggtggtgttcctcgcgctcgcggcgctgtacgagagctgggcgattccgttctcggtcatgttggtcgtgccgctgggtatcgtcggcgcgttggcgttcaccatggggcgtgggttgtccaatgacgtcttcttccaggtagggctgctgaccaccattggcttgtcggcgcgtaacgcgatcctgatcgtcgagttcgccaagacgctgcacgagcagggcatgacgctggtcgacgcagcgatcgaagcgtgccgcatacgtctgcggcctatcgtgatgacctcgctggcgttcatgctcggcgtgcttccgctggcgatttccagcggggcgggcgcgggcagcaagcatgcgattggtacgggcgtgataggcggcatgctcagcgccctgttgttggcgatattctgggtgccgctgttctatgtcgtggtgtcttcgctgagtgagcgcagaaaaaaggtcgctgaagaaccgaagggagatacgcaatgaacaagtcggtaatggccgtggcgctgatggcagcgctgagcggttgctccttgatccccgagtatcagcgtcccgatgcacctacggcggccaactggccggaaggcgaggcctatgacggcgcttccagcgcggctctgggacaggagaatctcgactggcaaaccttcttccgtgacccggcactgcgccagctgatcggagtggcactggaaaataaccgcgacctgcgtgtcgcggcgctcaacgtcgatgcctatcgtgcgctgtaccgcattcagcgagccgacctgctacctgccgtgagcgctgacggtaccggcagtcgcactcggacgcctggcgacctcaaccagaccgggcaaagtgcgatcagcagccagtacagcgcaacgctcggcgtgtcctgggagctggatttgttcggtcgcctcggcagcctgcgtgagcaggcgctgcaggagtatttcgccaccgaggcggcacaacgcagcacgcagatcagtctgattgccagcgttgccaacgcctggctgacgttacaggctgatcaggccctgttgcaggtcagtcgcgacactctcaagacctacgagcaaagcctgggtctgacgcagcacagcttcgacgtcggcgtcgcctcggcgctcgatctgagccaggcacgcagtgccgtggacacggcgcgggtccgcatcgaacagtacacacgccaggtcgcgcaggatcgcaatgcgctgaccctgctgctcggccagaatatccccggcaatctgccggcacccggccaactggagcgcgatcaactggctgcgttgcctgtcggtctgccatccgatctgctgcaaaagcgtccagacatcatccaggcggagtatcagctcaaggcggccaacgccaacatcggcgcggcgcgcgcggcgttcttcccgcgcatcagcctgacgggcgctgcgggcacggcaagcagcgagttgtccggcttgttcgatggcggttcgagctactggagtttttcgccgagcatcagcgtgccgatcttcaatgccggccaacttcgagccaacctcgactacgccgaaatcagccgcaacatccaggtggcgcagtacgaaacggctatccagaccgcctttcgcgaggtggccgacggcctggctgcccagtctacctatacgcggcaggtgcaggcacagcgcgacctgctggacaccagcgaagactacttccgcctggcagaacggcgctaccggaccggtgtggacagctacctgacgctgcttgacgcccagcgccagctattcgacgtgcaacagcagtacatcaccgatcgcctggcccagatgatcagcgaggtcaatctgttcaaagcgctgggtggcggctgggaagcaccgacgcaaacgatgcccgacgaaggctgacgacctttccctcggcagtgctctggacgtcactgctggccaatcaaggcgcaaatgaaaacgccgccccgaagggcggcgttttttgtctcagcggttcagcggttgcgcgttagcaacgccggcttttcaccgcgaggtctggtcggtagctgatccagctgctcggcgctgggcagtcggtcgagcttcgactccttgtggatgatcagcggctgcttctccttaggcttggctgcgacttcatcctgacgtccgccgcgctcgttgtcgatgcgccggccttcgttcttgcgtcgtggctggccgccgcgcgactggccttggccctgacgcttgcccttgccctggcctgcgccggcaccccctgtcgaggcgcctgcgccgcgtggacccgccgcagcacgcggctggcccgtgccaggctgagcgggagcgcccggacggcggccgcgaccctgcttgttctgatacgggctgacgtagtcgacgcgattgccgaagttgtccacttcgtcatcaagaaacacttccggatcgcgatcgctgggcaggcgtggcgggcggctgacgggggccgcagcagcgcctgtcgatgcgctcgaggcggtgccggcgctgcgcgacttgttccgaccgcggcgattgcgttctttcggttcgccgctggggctttccgccttggccgcgcgaggcttgcgctcgccattgcgtggcgggcgcggttggcggggttcgcgtacttcaggcttttccgcttcaacggcgctggcgtcgaagcccatcaggtcgccgtcgggaatgcgctgcttggtcatccgctcgatgcccttgagcagcttctcctcgtcgggggcgaccagggagatcgcctcgccgctacgaccggcacggccggtccggccgatacggtggacgtaatcttcctcgacgttaggcagttcgaagttgaccacatggggcagctgatcgatatccaggccgcgtgccgcgatatcggtcgccaccaggatgcgtacggcgttggccttgaagtccgccagcgccttggtgcgggcgttctggctcttgttaccgtgaatcgccacggctggcaggccatgcttgtcgagatactcggcgaggcggttggcgccatgcttggtgcgggtgaagaccagtacctgttcccaggcaccctgggtgatcaggtgagccagcaaggcgcgcttgtggctggcgggcaggcggaacacgcgctgctcgatgcgctcgaccgtggtgttcggcggcgtgacctcgatgcgctccggctcgtgcagcagcttgctggcgagatcggtgatgtccttggaaaaggtggccgagaacagcaggttctgacgcttggccggcagcttggcgaggaccttcttgacgtcatggatgaagcccatgtcgagcatgcggtcggcttcgtcgaggacaagaatctccacatgcgacaggtcgacagccttctggttagccaggtcgagcaggcggcccgggcaggcgacgagtacgtcgaggcccttggcgatggcctggatctgcgggttcatgccgacgccgccgaaaatgcaggcgctcttgaacggcaggtcgcgggcatagaccttgaaactgtcatggacctgagcggcgagttcgcgcgtcggagtcagcaccagcacgcgcggctggcgcgggccgtggcggtgttcacggtcgggatgtccgcccgggaacagaatttccagtacggggagggcaaagccaccggtcttgccggttcccgtctgtgcggcgaccatcaggtcgcgtccttgcaacacggcgggaatggcccgctgttgcaccggtgtaggctgggtataaccggcagcctcgacggcaccggccaaagcctcggagagaccgagggaagcaaaggacatgagtaatcctgtcttgtgtagggcgatgccctgggatggtcatgcctggctcgaatcgcgactggcgtgcgatcccgtccggtcctgccgcattgaaagatgctgacatccgggcgtaagcctggcggaagtgcggagtataacagagcctgctaacaccgcattgctaggacagtgtggcagttcgcaggttcattgaccagctccctgtttcgcagggagctgattcaacgatcagctggccagcttgaggttgtcccatatcgccaggcagggttcagcctggttcagggtgtagaagtgcaggcccggtgcgccacccgccacgagcttctcgcacatctcgctgatcacctgctcaccgaaagcctggatgctctcggcgtcatcgccgtacgcttccagctgcttgcgcacccagcgcgggatttcggcgccgcacgcgtcggagaagcgcgccagcttgctgtagttggtgatcggcatgatgcccggcacgatcggtgtctccacgcccagcttgcgcacgcgatcgacgaagtagaagtagcagtcggcgttgaagaaatactgagtgatggcgctgttggcgccggctttggccttgcgcacgaagttggcgaggtccgcctcgaagttgcgcgcctgcggatgcatctccggataagccgcgatctcgatatgaaaatggtcgcccgtttcggcgcgaatgaattcgaccagttcattggcgtagcgcagctcgccgctggccatgcccatgcccgacggcagatcgccgcgcagcgcaacgatgcgcttgatgccggcattctggtacaggttcagcagctcgcgcagttcctgcttgctgtcgccgacacaggaaaggtgcggcgcggtaggcaccttcacgtcgccgtcgagttgcagcacggtgttcagggtgcgatcgcgcgtcgagccgcctgcgccgtaggtgcaggagaaaaagtccggcttgcactcggccagccggcgcgcggtggtcatcagtttctcgtgcccggcatcggtcttggtggggaagaactcgaagctgatggaggggcggaggttatccatgattgtgttctctcatgggcggcagacggcaggccgcaggctgcaggcagtaccagtctgcctgcagcctgcagcttgtagcctggagccttattagtagcggtaagagtccggcttgaacggcccttcgacctggacaccgatgtactcggcctggctcggggtcaggcgggtgatgacaccaccgaagcccttgaccatctcggcggcgacttcctcgtcgagctttttcggcaggaccatgacggtgacgttcttggtcttctcgacaaccggcaggtcggcgaacttctcgttgaacaggtggatctgcgccagcacctggttggcgaaggagccgtccatgatccggctcgggtggccggtggcattgcccaggttcaccaggcgaccttcggccagcaggatcaggtagtcatcgttctgcgcatcgaagctgcccgggccggtgcggtggatcttgtgcacctgcggcttgacctcttcccatgcccagttcttgcgcatgaaggcggtatcgatctcgttgtcgaagtgaccgatgttgcacaccacggcgcgcttcttcagcgccttgagcatgccggcgtcacagacgttggcgttgccggtggtggtgacgatcaggtcgatcttgcccagcaacgcggcgtcgatgctggcgtcggtgccgtcgttgaggccgtccttgtacggggagaccagctcgaagccgtccatgcaggcctgcatggcgcagatcgggtcgacttccgagaccttgacgatcatgccttcctgacgcagcgattgcgccgatcccttgcccacgtcgccgtagccgatgaccagcgcctgcttgccggacagcaggtggtcggtggcgcgcttgatggcgtcgttgaggctgtgacggcagccgtacttgttgtcgttcttgctcttggtgactgagtcgttgacgttgatcgccgggatcttcagggtgcctttcttcagcatgtcctgcaggcgatgcacgccagtggtggtctcttcggtgacgccgtgcacgcgctcaagtacctgcgggtacttgtcatgcaggatctgggtcaggtcgccgccgtcgtcgaggatcatgttggcgtcccacggctggccgtccttgaggatggtctgctcgatgcaccactcatactcttgctcggtttcacccttccaggcgaataccgggatcccggcggcggcgatggcagccgcggcctgatcctgcgtcgagaagatattgcagctggaccagcggacttcggcgccgagggcggtcagcgtctcgatcagtacggcggtctggatggtcatgtggatgcagccgaggatcttcgcgcctttgagcggctgttcgccagcgtacttgtggcgcaggcccatcagggcgggcatttccgattcggcgatgatgatctcgcggcgaccccagtcagccagggaaatgtcggcgactttgaaatcgttgaaaccggcaggcgtcatgacagcactcattgaagagttctccattcgtttgtgcgaatgggcgccgttgatgcgtatggttaacgccccatccgagcctgacagacccctgaaacggtaagcctgctgcagcgcccctcggacaggtggcgggcacggccgaacggtgtcggccgagtcaaacccggcgattatatccgcgacggcaggcaatcccaagcccggcgcagtgcctgtcagtggtcattgtggctggcgccgcagatcccccgtaccagtcggccgatggtcaggccctggatgatgatcgagaacagcacgaccaggtaggtgatattgagcagcagattgcgctcgtcgctggccggcagcgccaggaccagggccaccgagatgccgccgcgcagcccgccccaggtcaggatgcgcaccgttccgtccggcagggcgcggccgagtttgcgtagcagcagtgccggtgggccgacggcaatcaggcgggtgccgagaatcagcagcgccacgcacagtgcgatcagcaggtactgcgcgctgaagggcagcaagaccagctccatgccgatcatcacgaaaagcacggcgttgaggatttcgtcgagcaattcccagaagttgtcgaggttttcccgggtctgctcggacatcgcgtgacggcgtccctgattgccgatgatcaggccggccaccaccatggcaatcggaccggatacgtgcaggtgcgtcgccagggtatagccgccgaggaccagggccagcgtcagcagcacctcgacctgatactggtcgatgcttttcagcaaggcgaaggtcagcgcgccgagcaggccgccgagcaacatgccaccgccggcttcctcgacgaacagccagacggcttctcccgcacccggcgcttcaccacgcgcgagcacacccaacagcaccgtgaacaccaccacggcgaccccgtcgttgaacagcgactcgccgacgatcgtggtttccagcgccttcggcgctcctgccgagcgcatgatgcccagcacggcgatggggtcggtcggcgagatcagcgcgccgaacagcaggcagtagatcagcggcggctgctgctcgaacagaccgaggatgtaccaactgccataaccgatcacggcggtggaaaacagcacgccgagggttgccagcaggccgatcgcccagcgccgggcgcgcagatcagcgaggttgatgtgcagggcgccggcgaacagcagaaaggacagcatgccgtccatcagcagatggttgaagtcgatgcgcccgaccagggtttcgatctgctcctcgatcgaaggcagccccagcagtgccagcgcatgcagcagcacggaaaataccagcgccgtcgccatgactccgatggtcggtggcaggccgatgaagcggtagttgagataggcgagcagggccgtgaggctgatgaagatggccgacagttcgagcatgggttcctcggatacctttcgcaggtgggttaggcaatggactgggtatcggtgctattggtgccggccgccgcgctaggctttgtacgaaaagtgcctgcgctcggtgatgctgcgttgaaatcgctctggtacgccagcccggtcagaatgctcatttacaatgcgtaaactgcgcttcttcgagcgttttcgccttgcctgaccttcgctcgacgacttttcgtacaaagcctacggattggcgctgcgtggccaggacacagcgcccgggtggattggcccgaacgcgctcgtgggagggcggtcaaacggggagctctggtgaatctcgccgggcgaaaccacgggagcaccagcatgaacctcttgtttcgttccgttccgtttgccctgcttgccgcgttcagcctaccggccgccgccaactcctgctacgtcagtgccgaaacctcgggcgccgtaccgccgccagttgtgacagaaaaatgcttcgaataccgaggcttggaagacaattccatcgattgggtgtgccaggacaacgaggcgatcaagaactcccagcgggagatccgcgacagctgtcccgcgggccatttcggcgtctgtaccgccgcgctgacaccggaaactctggccaacgagcgcgccaccggcacccaggcggataacggcaccctgccgaccaccgtgcccaaggacgcccggatcgtcacctaccactaccaggcgaccgaccgcgcccaggccaagatcgactgcgagagtgcgggtggtgaatggtcgcagtaggcgcgatgcgtttggtgaatcggccgcatgggtagataatcgccggcttcgtaagccgagtggttgagccatgaaactgatgccgttgtgtgtgtcgcttgtcgccgtccttgctctggtcggttgcaaccgcatcgatcccaattcgccgctgggcaagcgcaaggcgatctatcaacagatgctcgataccaaggaagatctcggtggcatgttgcgggggcggttggctttcgatgccaacggcttcgtcgccggtgcggcaaagctggacgagctgtcgcgtcagccctggcagtactacccggaggtcaaggaagagcagagcgaggcccgggacgatgtctggcaacagcaggagcgcttcaaggagctggctcgcgagttggaagcgcgtaccgcggagctggttacggtgacgacccaggggccggtgaccgctgaaagcgtcggggctgctttccagcgtgtcgaagacacctgcgaggcctgccacaagaaattccgcaacttctgatcatctgacggcgcgcgccgtcagcgcttggccttttccagggcacggcgcgcttggtccaggcgccttttgctgacctcgacgacctgcgggtcgccggtgctcagcgcgccgcgcagctgtgcttcgcgagtggtcaccaactgctccgcgcgttcgatttcgtcgtgattggattgcagcgcaacgacgccgcgacagcgttcggcgagcccatgcaggcgcgcctccaatgccgcgcgctggctggtgtcgccgttcaggcgtgcctgcttgatctgctggctgatgtactcgcgggtctcgctgcagctgctgtcggccccgggcgctgcaacaacggcctgcgcgccgcacaggctgagcgacagcatgaagaggattcgccgatcggccatgccttgatcctttttcttattctcgatgtcgtatgactgggttcggccagcgaagtgccgtcagaagccggctatcccggtggcctggagctgccgtcgcaactccgtgacatccggcgcggtgaagaacgcgcgcaactgccgagcccttgtcgcaccgataccgggcctggcttgccattgctccaggctggtggcagccaggctatcccagtcggctggcagttcgctgccgccgctgggcggcatgcctaacgcctgcatccaggttgcgaaggagcgccctcgagccaattgaaaactggcagccagcgtatttgcgctggcttggccaataccggggatcgattcgagctggcgctgatcgagttgcaaccagtcgagcagacctgtgaccagaccggagtccaccaacgtctgccaagtccccgggccgagctgcggcaggtccaggccatgcttgccactgagccaggccagacgcgccatgaattgctgctcgcagccaggtttggcctgccaacagctgagtgggtgataggcatcggcggcaggaatctcgatgggcaggcggcgctgtgcgcgccagattacgccgtcgtagcgagggatggtcagcccggccagggcgatcgcgacctgatcgtcggggcggatgtccgcctcctgccaacgcgccagggagccaagactgacgcggctgatacgtcggtcgtcgagctgcaacggctccagctccagcaccggcgtgatcttgcccgtgcgaccgatgctgaactgcacttggcgtacgcgggcgacagccgtgcgcaccgggtatttccatgcagccgcccagttcggcggctggacttgccaggaatcgctgtcaggccgcttgccctggcgcaacacgatgccatcgctggcgaacggcagaggctgatggaaccagtggtcccgccagtgcgcggcgtcggcgatcgtgtcgatgggcacggtcagcgcagcgctctgcctgaaacccatagctttcagcccgttcaggcgtgcctgcatatcggacgggccgttgggccaatcccagacgaacaggccgatctgtccggcggtcgcctgatcgagcgactgccgcgccatcgccccggcgacctggccgcgggcaccggcactgccggctgtggcctgaacgtggtggtcgagccgccaatagagttcgccctgaaggacaatgtctccagcggatgccagctgcaccggtacggccggtagctggcgcgcacgggccgtccagtcctgaccgcggctaccgttgccgcggctgacggcctgtaccagtgagccgtttcggtagtgcagcgtcacggcgacgccgtcgaccttcggctggatccacagctcggtgcggcgatccatccagtcggctacggctgcgcggtcggcgagtttcgccagtccggtctggaccaccgggtgcggcacgtcgccccccacggtcgccagcgggtctgcaggggtgacggagccatgcgcgaaacagtcgttccactggcgcaggcggctgagcgcctggtcatagacttcatcgtcgaccagggcgatcccttgacggtggtaggcatcgtcccattcggcgagttgtcgctgtaacgcacggctttccgattcggcgggttcggctggccagtcgggacattgggccgaggacaggactggggcgagacacagcaatagcgtgatgatggggcgcatcggagcatccttgctcgttggggccctgcattttgccaagcgggccgacacgtgaccgtgcgctggcgcatattgagccgctcccggtcgcatacccattcatccggcgccggacttttcgcggcgatgagagaagggcgctggaatgaaccatgtcagcacatcgcggccagaatccgagtgaccccgtcgcattaaccaaagagcccattccgaagagccggtgatacggccagttcgtcaggctgcgcgtccggtcttacgccagtgtcgacggcatgatcgttatcaacgtcatcgattagtgagctaaccacctgcgtcgtacaatcgtcagccaatccttgcggagtgattcatcagtgcagcccgtgatttccatcgaacagctgagcaagacctatgcgtccggccatccggcgttgaaacagatcgatctgcagatccgcaagggcgaaatcttcgctctgctcggtccgaacggggcgggcaaaaccaccttgatcagcatcgtctgcggcatcgtcaatccagggggcggccgggtcctggtggacggtcacgacatcatcggcgactaccgccaggcccgttcgaagatcggcctggtgccgcaggagctggtcaacgagggcttcgaaagcgtctgggccacggtgcgcttttcccgcgggctgtttggcaaggcgccggatgatgcttacctggagaagctgctccgcgacctgtcgctgtgggacaagaagaacgcacggatcatcgagctctccggcggcatgaagcgccgcgtgatgattgccaaagcgttgtcccacgagccgagcatcctgttcctcgacgagcccaccgccggcgtcgacgtcgagttgcgccgggatatgtgggagatggtgcgaggcctgcgcgaacgcggcgtgaccatcattctgaccactcactacatcgaagaagccgaggaaatggccgaccgcatcggggtgatcagcaagggcgagatcatcctggtggagaacaagcaggtgctgatgcacaagctcggcaagaagcagctgaccctgcatctgcagcggccgctggcacagatcccgatcgaactggccggttatccgctggagttggtcgattccggcaaccaactggtgttcaccttcgatgcccagcaggaggacacgggtatcgcggagttgctcaagcgcctcggtgagcatggcatcgacttcaaggatctgcagtcgagccagagctcgctggaggagattttcgtcagtctggtgaagggcagccgcacatgaatttctacgcaatccgcgccatctacctgttcgagctggcgcgaacctggcgcacgctgctgcagagcatcgccacgccggtgatttccacctcgctgtatttcgtggttttcggctcggccatcggctcgcgcatggaagcgatgcacggcatcccttacggcgcgttcatcattcccggcctgatcatgatggcgctgctcaccgagagcatttccaacgcctcgttcggcatctacatgccgcgttattccgggaccatctacgaggtgttgtccgccccggtgtcgtacctggagatcgtcatcggctatgtcggcgccgccgcaaccaagtcactggtgctcggcgtcgtgattctgctgacggcgcgattgttcgtcgactacgagattcagcatccgttgatgatgacgctgttcttggtgctcaccgcggtgaccttctgcctgttcggtttcatcatcggcatctgggccgatggctgggagaagctgcaaatcgtcccgtcgctcattgtcatgccgctggccttcctggggggcagcttctattccatcgagatgctgccgccgttctggcagaacgtcacgctgttcaacccggtggtttacctgattagcggtttccgttggagcttctacggcgtctcggatatcggcgtcggtatcagtctggcgatgattctggtgttcttggccgcctgtttgacggcggtgtggtggatattccggacgggctaccggctgaagaactgacaggggctcggtcttccttccgctctgcatgtagcatcttggtgcacttctatttcgaggcaagcatgaaacacgttccttccatcgctgttctggtacttctcagcctgacgaccggtgctgccagcgccttcaacctcggcgaggccgcccgtgccgtgtccggggtgactggcagcggcaccccgcaaaacaatgctcagacgcaagcgctcggtctgattggtcagctcgatgaattgggtgtcactcccgtgcaggccgtagggggcagcggcgccctgttgcagttggccaagcagcagctgagcagcaccgattacgctcagctcgccaagtcagtacccggcatcgacaagctcactggcgatagcgggctgaatcaactcggccaactggatgcgctgagcggcttgctcggcaaagcggatacgtctgtcgacgcccagacggccgccgcggtcgataacgtacagagcctgcctgacgtcagccgggcgttttccgcgctgggcatggatgcgggtttggtcggccaatttgcgccgatcctgctgcagtacttagggaaccagggtgtaggcggccagctattgcagagcctgggtggaatctggggtgttggtggggcttgagggcccgatcaggtgagggtcatgcaatgtcgtaccagcggtggttgagcccgcattgagtttgtcgacagatgcaaaaaagccccgctcagctcacgctggcggggctttttttctgcctggttcggtcttacagacccgcagccgcgcgcagggcgtcggccttgtcggtcttttcccaggtgaaggcagtgaaggtgtcgccaccgaccgtcatttcatagggatcgcgaccgaagtggccgtaggccgcggtggccttgtacatagggtgcagcaggtcaagcatggtggtgatcgcgtagggacgcaggtcgaaatgctcgcgcaccagggcgacgatcttctcgtcgctcagcttgccggtgccgaaggtgttgatcgagatcgaagtcggttgggcgacgccgatagcgtaggagacctggatctcgcaacgctcggccaggcctgcggcgacgatgttcttcgccacgtagcggccggcgtaggcagctgagcggtcgaccttggacgggtctttgccggagaaggcgccgccgccgtgacgggccatgccgccgtaggtgtcgacgatgatcttgcgtccggtcaggccgcagtcacccaccgggccgccgatgatgaactggccggtcgggttgatgtggaactgggtgtccttgtgcagcagttcggccgggatcacgtgcttgacgatcagctccatcaccgcttccttgaggtcggaatgcttgacctccgggttgtgctgggtggacaacacgatggcgtcgatgccgaccaccttgccgccttcataacggcaggtgacctggctcttggcatccggacgcagccacggcagcaggccgttcttgcgcgcttcggcctggcgctcgaccagggcgtgggagaaacggatcggtgcgggcatcagcacgtcggtttcgttgctggcgtagccgaacatcagaccctggtcgccggcgccctggtcttccggcttggagcggtcgacgccctgggcgatgtccaccgactgcttgccgatgatgttgatgatgccgcaggtggcgccatcgaaaccaacgtccgagctgttgtaaccaatgtcgatgatgacgtcgcgcaccagttgctcgagatcgacccaggcgctggtggtgacttcgccggcgacgatggcgacgccggtcttgaccagggtttcacaggccacgcgggcgtgcttgtcctcggcgatgatggcgtccagcaccgcatcggagatctggtcggcgatcttgtccggatgcccttcggacacggactcggaggtgaaaatcgagtattcgctcatctatcggtttcctattaccggtgggtgagtcggctgtcaggggtgggccgggaaaagtaccgggcctggatctgaaaaccgttcttcaagccaatgtagaggctctcgccgggcgtgagccccgcggcatcggcccaacgggccagatcgtcctgttcgaagcccaaccatagatcgccgcaggcctccctggcccaactctggttgtggctgcacagctcggtgaccagcaggcttccgcccgggttcaccagccgtgccagttgcttgagcgcttcacccggcgccgccagatgatgcaaaaccatgttcagcacgacgcagtcggccgacggacagtcgtcatgcaaggcatcggccagtttcagctcgacgttgtccagtgcggcctgttcacagcgcgcacgcgccagttcgagcatggccgggctgttgtccaccgccaccacctgtgcgaagcggtgggccagctcgggcagaaagctgccgtcgccggggccaacctcgagcgcggtcgcggttggcgcgaaatccagcgcgtcgagcagcgccaccacactgtcacgatactgtggcagtcccgcgatcatgtcctggcgcgcctggaagctgccggccatgcgcatgaagaaatcctcgctggcggcactgcgctgtgcatgcacggcggcaatgcgtgcttgcacctcgagcggcaggctcagctgatcgacctcttcgagcaaggcagcgtgcagtctgccgccgaggctgtcagcgtgcggcagggcgcggcgatagaaaatggcgttgccttctcggcgtgttgccagcaacccggcctgggtcagcaccttgaggtggtggctgatgcccgactggcccgtggcgaagatctgcgccagctcgagcacgccgaacgagtcgctggccagcgcccgcagcacattcagacgcagcgagtcgccgccggccttgcacagggcggcgagctgatcgctgtcatcgaaggagatctggggaatgcgcaggctcataggccgcgcagtctagtcggtcgtttttcgtacagcaatggctgtatcaaaaagttttgatattgaacaagcgttcgttcaattcacaaggctgttgactcccatgccgcaggacaccaggccgagggccagcaggaagaagctcggcagtaggtcgagcacctgctgcagctgcggatgactggccagacgccgcgccgccaggctgtaggtaatcagaatggacacatcgaccaatgcccagatggcgatcaatgtcgcggcctgcggcgcgaacggctgtgctggcaggatgaaaccgggcagaaacgcgaggaagaagaggatgtctttggggttcgacaggcccacggccatggcgcgccagaagtagtgaacgtgggagcgtggcaggtgcggcttttcgtcattgccgccgcatagcccgtccgcgccgagccagatcaggtaaagaccaccgatcacctggccccattcgaggatcactggctccagatccagcgccagatagatcagcaccagggccgcgaccagcaggatttgggcggatagcacgccgccgaggatggtccaggccggccagctgcgccgcgcatcggcaatgaccagggctaccacggggccgggtgaggcgatcagcagagtgatggcggcagcaaaggccaggtaggtggcgttcatagctcggtcaccaattcgaagatgcgtgattgtttgcccagcttttcggtgtacagcggcaggttgcagctggcgaaggtgcgctgcatccagcgatcgctgccgtcgaaacgggcggtgaaggggctgcgtgcatgggcggtgcggcgattgtcgatgatcagcaggtcaccggggccgagccgcacgggctcgacgacttcccaggcgatgttgcgcaggttgtccagcgattgctgggcgcggtcgctgtaggcaaccatgaactgcgggtcgaagcggaagaatggcgcgtcgggatcgccatagagcacggtctggtgcttgttgatgtcgatgcgctggttcttctcgttcgggccgtaatcggagagaaagttgtacggctcgttgagcaggaaggcctgctgttcgtaactcaggtgctcgagaatgcgctcgatcgaggcgatgtaggtgatagcctcggcggccgggtcctggcgcaggcaaagcagcagcaggtaatcgggctggatcgcgtggaaagcgttctcggtatgcaggtcgagttcggtgtcgaagctgtccgaggtggcggcgcgtgattgggtctgctgggggaagaagttgttgacgatgcagccgccggactcctgcacatagccgatcggttcgccgagcagggcggtggcctgcagcagcaggcgctcgctgcagtcgtctggtttgtgtatctcgatgcgcgaggccggagtcggcgggatttcaccgatgttggtgtcctcgagcagcaggaaacccttggcgttgccgaacagcttgaattcgaggatctgcgctatttgcgccgagctgagccccccgtggtgaatgctggcagataaaagttggtcgaactcgagactgggcatgtcatccttccctagggttatacaaaggcggaggcctctggtcggtccgggtgccactgcaatgctggccccatggccggcgagtattggtgggggctggagggttgcaaaatggaaaaaacgagcatctcgaatgagttttactcatgccggcggctgaccgcatgacgctgcgcatccctccgctctacgcgctgcgcgctttcgaggtggcggcgcgcttcggctccttcacccaggcggccgagagcctgtgcatcacgcagagcgccgtcagccggcacgtgaagacgctcgaggagagcctcggttgccagttgttcgagcggcggggttcccggctggcattgaccgacaccggtcggctgctggcgcaggagctcaaggtcggctttcgcaccatcgaaaatgcctgcgtggcggtgaatcgtcagcgtgacgcgctcaggttgaaggcgccttcgacgctgaccatgcgttggttgctcggggcgctcgacgatttccatctcagccacccgcagcatcgcgtgcagctcaccagcgcctggatggacctggacgccgtggacttccacaacgaacccttcgactgcgccatcctgctcgggaacggtggttttccggccgactggaaccgcgtcaagctgttcgacgagtggctggtgcccgtttgctcaccagaggtccagggcgggtcgacctggtcggccgagcggctggcccaggccgaactgatccatccttcgcgcgactgccgtgactggcgccgctggctgcagcgggtcgggctgatcgatgtcgtcgcctggcagcagggcaaactgttcgacacgctggagttggggatttccgccgcggcgcaaggccacggcgtgtccatcggcgatctggcactggtggcgacggaattgcaaaagggcgcgctgacactgccgttcgatcaggctgtgcgctccggcgacagctactacctggtctggcctgcgactggcgaaaccccggcaaccctgacccggatgaaggactacctgctgcagcatctgcccaataccgacagccgcggggttcgtctgctcgactgagcaccgcggacgaggcgtgcgagctgattcagtcattgccccgccaccccgggtaggggaaaatggccgcctttttctacgtacacccccgcaggagattcagcgatgcccagccgtcgtgagcgagccaatgccatccgcgccctcagcatggatgctgtgcagaaagccaacagcggccacccgggtgcccccatgggcatggcggacatcgccgaggtgctctggcgtgaccacctcaagcacagcccgaccaacccgcagtgggccgaccgcgaccgcttcgtgctgtccaacggccacggctcgatgctgatctattcgctgctgcacctgaccggctacgacctgtccatcgacgatctgaagaatttccgccagctacacagcaagactccggggcatcccgagttcggctacaccgccggcgtcgagaccaccaccggcccgctgggccaggggctggccaatgccgttggcttcgccctggcggagaaggtcatggccgcgcagttcaaccgtcccggtcatgacatcgtcgatcaccacacctatgtcttcatgggcgatggctgcctgatggaaggcatctcccacgaggtgtgctcgctggccggcaccctggcgctgaacaagctgatcgcgttctacgacgacaacggtatctccatcgacggcgaagtccatggctggttcaccgacgacacgccgcgccgtttcgaggcctacggctggcaggtgatccgcaacgtcgacggtcatgacgccgaagaaatccagatggccatcgacactgcgcgcaagagcgaccggccgaccctgatctgctgcaagaccatcatcggtttcggctcgccgaacaagcagggcaaggaagagtgccatggcgcagccctgggtgatgcggagatcgccctgactcgcgaggcgctgggctggaagcatggcccgttcgagattccggccgacatctatgccgagtgggatgccaagcagaagggcgccgacgccgaaaacgagtggaacaagcgcttcgctgcctatgaagccgaattcccggccctggcgtccgagttcaagcgccgcatggccggcgagctgccggaagattttgccgagaaggccagcgagttcatccgtgaagtcgccaccaagggcgagaccatcgccagccgcaaggccagccagaactgcctgaatgccttcggcccgctgctgccggagctgctcggcggctcggcggacctcgccggctccaacctgaccctgtggaagggctgcaagccggtggtggccgaggatgcctcgggcaactacatgtactacggcgtgcgcgagttcggcatggccgcgatcatgaacggcgttgccctgcacggcggcctgatcccctacggcgcgaccttcctgatgttcatggaatacgcccgtaacgcggtgcgcatgtccgcactgatgaagcagcgggtgctctacgtgttcacccacgactccatcggtctcggcgaagacggcccgacccaccagccgatcgagcagctgaccagcctgcgcaccacgccgaacctggacacctggcgtccggccgacacggtcgaatccgcggtggcctggaagcatgccgtcgagcgcaaggatggcccgagcgcgctgatcttctcgcgccagaatctgccctaccacatccgcgacaacgaaaccgaatcggccatttccaagggtggttacatcctgaagaactgcgttggcgagccggagctgatcctcatcgccaccggttccgaagtcggcctggctgtgcaggcctacgacaagctgaccgagcagggccgcaaggttcgtgtcgtgtcgatgccgtgcaccagcgtgttcgatgcgcaggacgccgattggaagcagcacgtgctgccggtcgaagtcggcgcgcgcatcgccatcgaggcggcgcatgcggactactggtacaagtacgtcgggctcgacggccgcatcatcggcatgaccacctacggcgaatccgccccggccggccagctgttcgaggcgttcggctttacggtcgataacgtgctcgcggtcgccgaagaactattggaggactgacgtcctgcggcaggctacaggcggcaggcttcaggcagtgagtgcgcgcctttagcctgcagcctgcagcctgcagcctggagctgctgctatgcccaatcgcccttaccgcatcgccctgaacggctacggccgcatcggtcgttgcgtgctgcgcgccttctatgagcgcaatgcggccttcgatttccagatcgtcgcgctcaacgaccttgccgacatggcgagcgtggaatacctcacccgtttcgactcgacccatggccgctttcctggcgaagtgaccgtagacggcgattgcctgcacctgaacggcaattgcgtgaaggtgctacgcgaaccgacaccggaagcggtggactggcgtgggctcgatgtcgatctggtgctggaatgctccggggcctacaactcccgcggcgaagctcagcgattcatcgatgcgggcgcgccacgggtgctgttttcgcagcccatgagcggcgccgcggatgtcgacgccaccgtggtgatgggcatcaaccaagggcagctgaccggtggtgagcggctcgtctccaacgcctcctgcaccaccaattgtggcgtgccgctgctcaagctgctcaatgatgcgatcggcctcgactacatttcgatcaccacgattcattctgcaatgaatgatcagccagtgatcgacgcctaccatcacgccgacctgcgccggacgcggtctgcgttccagtcggtgattccggtctccaccggcctggcgcgaggaatcgaacgcctgctgccggaactctcggggcggattcaggccaaagcggtgcgggtgccgacggtgaacgtatcctgcctggacatcaccgtgcagacgtcccgcgataccgatgcgtcggagatcaaccggatcctgcgtgaagccgcgcaggccgggccgttgaaaggcctgctcgcgtataccgagctgccccatgccagctgtgatttcaaccacgacccgcattcggcgatcgtcgatggcagcctgacgcgagcctccgggccacggctggtgaacctgctggcgtggttcgacaacgagtgggggttcgccaatcgcatgctcgacgtggccgatcattatttgcgcgttgctcatcgcccgtagccagcggcgacatcagcaacgctcgacaacatcgccgttcttgaacttaaggaagatcacatgaccgttttgaagatgaccgacctcgacctccagggtaagcgcgtgctgatccgcgaggacctcaacgtgccggtcaaggatggcgcggtgaaaagcgatgcgcgcatcctggcgtccttgccgaccatcaagctggcgctggaaaagggcgcggcggtgctggtctgctcgcacctgggccgtccggaagagggcgtctacagcgaggaagacagcctcaagccggtcgctgactacctgagcaaggcgttgaatcgtgaggtgccgctggtcaaggactacctgaacggcgttcaggtgcaggcgggtgagctggtgctgctggaaaacgtgcgcttcaacaagggcgaaaagaagaacaccgacgaactggcgcagcagtatgcggcgctgtgcgacgtcttcgtcatggacgccttcggcacggcgcaccgcgcccagggctcgacccacggtgttgccaagttcgccaagatcgcctgtgccggcccgctgctggccgccgaactcgatgccctgggcaaggcgctgaaaagcccggccaagccgatggccgccatcgtggccggctccaaggtctcgaccaagctggacgtgctcaacagcctgagccaggtctgtgaccagttgatcgtgggtggcggcatcgccaatacctttctcgcggcggccggcttcccggtaggcaaatcgctgtatgaggccgatctggtcgacaccgccaaggccatcgcggccaaggtcagcgtgccgctgccggtcgatgtggtggtggcgaaggccttcgccgaagatgccgaagccaccgtcaaggccgtggccgccgtcgccgaagacgacatgattctggatatcggcccgcaaaccgcggccaacttcgccgagctgttgaagtcgtccaagaccattctgtggaacggaccggtcggtgtgttcgagttcgatcagttcggcaacggcaccaaggtgctggcccaggcgattgccgagagcccggcgttctcgattgccggtggcggcgataccctggcggcgatcgacaagtacggcgtcggcgagcagatctcctacatctccaccggtggtggcgccttcctcgagttcgtcgagggcaaggtactgccggcggtcgaagtgctcgaacagcgcgccggctgatcgccgcgcgtggtcccggcgcaacaggcgcaacggtaaaaggcaaccctgtgggcgcgctgctgtctctgttctgtccagacgaggaatggagactcatcatgcgctacaccgcgattgctgtttgctgcttgggcctggccgggtgcgccgggaacggtccggattcggcctgtgaggtgttcgatccgccgccgctggagagcccgaccgcgcagaacgaccagcgtgtacagatgcagagcaccggtgatcctaccgccggtaccgccgcggacgttcaggattgcccctgagccaacccgcatgagcaaggagaagcgatgaaaggcctgttcatcccgatcgccgcactgctgctgggtggttgcggccactggcaatcgggtcccgatgccccgttcgtccgctggaactgcaagagcctacaggacatcgcctggcgctacgccgacgaaggccatcaggccatcgacctgaaaatcggcgacagcgaacaggttcataccctgcgcaaggaaccggtcacgcgcggcgctttctatagcgatggcgtagtggcctttcacgacaagggaaacgaagcgctggtctaccgggtcgccgacgacaagctgctggcccatggctgcagcgcttcgctgatcaacctttgagtgaggcggatcggcccaccgtaaacctgtgtttttttccgagctgatggcttttggctcgtccgccactacaatgccgcgccatagatagcgtggtgcttgaacaccgccagcccctggggcaggctctacacgattaatcgaccctaaccgggagaaaggaaaccatggcactcatcagcatgcgccagatgctcgaccacgccgccgaattcggctacggcgtgccggccttcaacgtgaacaacctcgagcagatgcgagccatcatggaagcggccgacaagaccgactccccggtgatcgtccaggcttcggccggcgctcgcaaatacgccggcgcgccgttcctgcgccacctgatcctcgctgcggtggaagaatttccgcacatcccggtggtcatgcaccaggatcacggcaccagcccggacatttgccagcgctcgatccagctgggcttcagctcggtgatgatggatggctcgctgaaggaagacggcaagaccccgtccgattacgaatacaacgtccgcgtgacccagcagaccgtcgccttcgcccacgcctgtggtgtgtcggtggaaggcgagctgggttgcctgggctcgttggaaaccggcatggccggtgaggaagacggcgtcggcgccgaaggcacgctggatcacagccagctgctgaccgatccggaagaggctgcggacttcgtcgccaagaccaaggtcgacgccctggccatcgccatcggcaccagccacggcgcctacaagttcaccaagccgccgaccggtgacaccctgtcgatccagcgcatcaaggaaatccaccagcgcatcccggatacccatctggtgatgcacggctcctcctcggtgccgcaggagtggctgaaaatcatcaacgagtacggcggcgacatcaaggaaacctacggtgtgccggtcgaggagatcgtcgaaggcatcaagtacggcgtgcgcaaggtcaacatcgacaccgatctgcggctggcctccactggcgcgatccgcgagttcatggcgaagaaccccagcgagttcgacccgcgcaagtatctggccaagaccgtgagcgccatgcgcgacatctgcattgcgcgttacgaggccttcggcaccgccggcaatgcctcgaagatcaagccgatctccctggaaggcatgttccagcgctatgccagcggtgagctggatcccaagatccgctgattcaccgcctcaacgacgacgagcccgccctgtgcgggctcgttgcgttatggcgccgctccggcagggtgcggcggatatcaggcgagcagtcgttggatctggctccgtagcgtatccagcgagaagggtttggcgatgatcggcgccgagcgtgcgatagggctacccgattcgtgaatttcgatcggataaccgctgatgaagatgaccttcagctccggccgcagcttcagcgccggctcggcgatcatcaccccggaaattccgccgggcagcctgtagtcggtcaccagcagatccagctgcggcttggttgccagtatctcgaacgcttcggtggcatccgaagcttccaggaccttgtagccttcgtccgccagataatcggatagcaggcaaagaatgtggggttcgtcctcgacgagcaggacaactttgctggacgggttgctcattggagcgtttctcgaggttttcgcggggcacattgcttcagaccggtcactaatccagctcggggcgagcatgttggagccttgcggcattctgcaagttcaggacgaatcgtcattcgtagcgcttttgcttgctcagatgcccatgctcggtgcgcgttggcaatcggctccgtcatcgctaggctcggctcatgtcccttactggagtcgccatcatgcctgatgagcaagccgctgccataaccgaaaagaccctggacgactatcgagccaatgccgaggcgtttcgtgagggcactcgcgaccacgatgtcagccagaatatcgacgcgctgctgcgacacattcaaggcgagccgccgtttcgaatcctcgatctgggctgtggacccggccgggacctaaaggcattcaccgcgcggggacatatcgctgtgggcctggacggtgccgagcccttcgtccacatggcgcgccgcgaatccggttgcgaagtgctgcatcaggatttcttgcgtcttgaccttccgaccgagaccttcgatggcgttttcgccaatgccgtgctgttccatctgcccagccgggagatcaacggggtgctgtcgaagctgcacgcaacgcttcgcagtggcggcgtgttgttcagctccaatccacgtggcagcaatcaggagggctggagcgggccgcgctacggtacctggtacgactggccgacctggcgcgagctgctgctgtcggcgggcttcatcgaactcgagcactattaccggcccgcaggcctgccgcgcgagcagcaaccctggctcgcgagcgtctggcgcaaggcctagcgcggttcatagccttctgtaatcggctatctgacacagcagaatgcatgccgtatccccgcgggtcatgcgttttgcatgcgtgcaaaacgctattatgtgacgcaggtcactgaaattacttggtttgttgatctgtcgcggttggcacgaacgctgctctggctatggggctggaccataactggagtacacaataatgattgccgctgaaaaagttctctctgccgcgttccccgagttcgaagtgctcacctgcccgcgtccggatggtgggttgctactgacgctgcgtaacgatgatcgcgacatcatcaagcgtgccctttccaaggggcagacccagaccaatattcagctggaatgggtcatcagctcgatacgccgcgacctggcgttggaggctggcatgtcgcctgccatcgctcgcttgcagagccagagccgcaccggcctgccgacctacgaatacgcctgaacatgtggccgaaccgcgctcctgcggttcggccgcttgtataccgctgcgctcgagcgcaggcgatccgaccggccatcagagctggcgtgcttcgcaaacctgataagcgatgaggaaaccctatgaacgccatcgacctgctgatcgacgaccacgaaaaagtgaaggacatcctgacgcgtatgaccgagagcaccgaacgtgccgtcaagacccgtgccgagctgctgcagaaactcgaaatggaagtttccatccatacccagctggaagaacagattctctaccctgccttcaaggaagccggcggcaaggaagagctgaagatgttccacgaggccaaggaggagcaccgcgccgtggattcgctggtgttgcctgatctcaaatcgaccgatcctgcgagtgtccagttttccgggcgcgcgaaagtctgcaaggagctgctcgaacaccacatcgaggaagaggagtcggaaatgtttcccaaggcgcgtgaactgttcgaccaggcacgactggaggaaatgggccagcagatggccgagctgaaggagcgtctgaagaaggaattcctggccagccaggccgcctgagacggaccaagcgggcggattgctcgtgtgggacgggctctgattgcgaccggtgactccgtgcggctgcgggtcgcaagcagagcttgctcctacaggggttgtgctcatcgaggcgcggctgatgggttctaggtagcttctgctgttcatgtaggagcggcctctggtcgcgacccggggctccgcgtggctgcggatcgcaagcagagcttgctcctacaggggtttgtgctcatcgaggcgcggctgatgggttccaggtggcttctgcggttcatgtaggagcgacctctggtcgcgaccgatgccaccgcgcggctgcggatcgcaagcagagcttgctcctacaggggtttgtgctcatcgaagcgcggcttaatgggttctaggtagcttctgcagttcatgtaggagcggcctctggtcgcgacccggggctccgcgcgggtgcggatcgcaagcagagcttgctcctacagggcttgtgctcatcgaagcgcggcttaatgggttctaggtggcttctgcggttcatgtaggagcggcctctggtcgcgacccggggctccgcgttgctgcggatcgcaagcagagcttgctcctacagaggtttgtgctcatcgaggcgcggcttaatacgttctaccacggcttgccttcgtcgctgctcggttgtcatgaggtgcggctccttctacgcccgcctggctcgtcggcttcgctgacctgcatcaatgttcgccccgcaaagcactgcgaacctgatggccttacggcatcaaggttgatgtcgcttgcctgattttcctgccgacgaggaaacggcaaatacgggcatagtcggacaggggcgggaatggaagacgagttgaaggtgctgttgcagcgggtcgggttgggcatcggggagattcgcacccgtaaacgtttcctgcagtggcggtccgccgacgcgcagcgtctgaatcacgcggcagccgacgtcgacgctgcgcatcgctgtttcatcgatcggctttacgagcacctgggtcacttcggcccgccgactgccattctcgacgacccggccggcgtcgttcgtctcaagcacagtcagctcgactattaccggcgcctgtggaacggtccatacgaccgcgattacgtgaaggaccgcctgctggtcggcctcgtgcaccagcgagtgggcgttggcttggagtggtacctgggcgcctatcggttgtacctctccgaaatgctcgggctgctgttgggtgacagtgagcgctgcgccacatatgacagcctgctgaagatcgtcttcttcgatatgaccctggcgatcgatacctacagcgcggcccagcggcaagcgctggaggatagcgaggcccgcctggcgcgtgcgctgcgtggttccgaggacggtatctgggaatgggacatcgaacacgatcgtctgcatctctccgagcgctggaccgccatgctggggatgcaggccgagccgagcttctgcagccgtgactggttcgagcgggtgcatccggacgatttgccggggctgcgcgaggcgatcagtgcgcacctcaagggcggcagcccgtcgttggcgcatgaataccggatccggacccgcctcggcgagtacctctgggtgctggtgcgcggggtggtcgagcgctgcgagcagggcgccctgcgcatggcgggctcgcagacggatatcagtgcgcgcaaggccgcagaggcccgcctgcgccatgctgcccggcacgattcgctgaccggccttgtcaaccgcttgcatctcgacgagttgctccatgaaacccagcggcgtaaccatggccgcgcctcggcgctgctgttcatcgatcttgatcgcttcaagttgatcaacgacagcctcggtcacagcgttggcgatctggtgctggtcgaggttgcacgacggttggcgcgctgcctgcggcctggtgatcatctggcgcgcttcggtggcgacgagttcgtcgcgctgctcggtgatctggcctgcgaagccgacgccgaacgggtggcgcagcggatgctggacgccttgcgtcagccgctgcagctcggcgagcgcactctgacggtcagtgccagcattggtatcgcgccgctgcaccgtgacgggcagccgctggatgcgctgcaggcggcggatctggcgttgtaccgcgccaaggctgccggcaagaaccagttcgcgctgttctgcgaaagcctgcacaccaccgcggcacgccagctggaactggaaagcgcgttggcgcaggcgctgacgcgtgatgaattcgtcctgcactttcaaccgatctgccggatcgaccgagggcggccctacatggcgggcgtcgaggcgttgctgcgctggcatcagcatgacgcgctggtggcaccgaacgagttcatcccggtgctggaggagtccggcgagatcgtccgtgtcggtgagtgggtactgcgcgaggcatgccggcaggtgcgagtctggcagcaggccgggcagtcgcggctttactgcacggtgaacctgtcgattcgccaactgcaggagcctggctttaccgcactgctggagcaggtgctgggtgaaaccggactgcctcccgccagcctggtcctggagataaccgagacgctgctgatgcacgacagcgagctggtgctgcgcagcctgcacgagatcgcagcgctcggtgtgcggctggcgctggatgatttcggtaccggctattgctcgctcggctatttgaagcgcttcccgctggatattctcaaggtggaccgcagcttcatcgccgccgcaccggaagaccccgactcggtggccatcagccgggcgatcatcggccttggccatagcctcgggctggcggtggtcgccgaaggggtggagcgccccgagcaggtgcaatttctcgttcagcagcactgtgataacgcccagggctactggttcagcgcgccgcggccggcggccgaactgcagcgcctgttcagcggcgagaaacgcttcgaggggctctggcgcctgctcccgcaagccagtctggcgaacgctgccctggcgcactgagcagagccgtccggcgcctgggcgggttggtgcaggcactcctggcctcgggcgcggtccacttctttgactattgactactcaagtggtcaccggctgttcgccggttctttttctgaaggaggtgaccccatgcgactcgcttatctatccgctccaatcctgggcctgctgttggtaggttgcggcccggacgaggccgaccgcgaacaaacaccgccgaagccagccaccgagcaaccggcgactccaccggccaccacgccgccggctgacaccggaacgggcgcaggcaccacaggtactggtaccggtgcgggcgtcgagacgaacacggggaccggtatgggcaccggcgccacgggtgatatgaacacggcgccgggcgataacggcagcggtctgggcaccgagtccggggccggcaccgcgcccaataccaccggtggcgcgtccggtacgtcgcagtaagccagtaagcgttgcgccattggggagccgcgcgtcggctccccgacagtcaggagacccgcatgaactcgaaatctatcgctgccctggccgccgtgccgttttcgctgctgcttggtgcctgttcgccggacgacgagcgctcggccatggacaacaacagccggaatcagcaggaataccagaacaccgcgaccgacccggccgggccgcgcgaagtctcgccgccctccaacctatccaacgagtgacgtcgcgcccgcggcatcaaacgtattgtgctgcggcgtaacccgacgcccaggcccattggaagttgaacccacccaggtggccggtgacgtccagtacttcgccgatgaaataaaggcctgcggccttttgcgattccattgtcttggacgacacctcgcgtgtgtcgacgccgcccagcgtcacttccgcggtgcggtaaccttcagtgccggcgggtatcagctgccagcggccgagccgctccgccacctcgttcagttccgcctggctgtattgcttcaacggcctggagacgaaccagtgctcggccagcagacccgccatcttgcgggtgaacagctcgccgaggagcgtcttcagctcggtgttcggccgctcgagccgttgctcttccagccactgtggcaggtcgaggtgcggcagcaggttgatctcgaccgtgtcgcccggttgccagtaggaggacacctgaagaatcgccggccctgacaggcctcggtgcgtgaacaagatgttttcgcgaaagctctgaccgttgcagctcaccaggcaatcttcgacggaagtaccggacagcgcttcgcatatccccttgagctgcggctcggtgatggtgaacggcaccagcccggcccgcgtcggcaggacctgatgaccgaactggcgggcaatctggtagccgaagccgctggccccgagcgttgggatcgacaaacccccggtggcgatcaccagtgactggcaagcgacttcgccgaggccggtctgcaaccgatacccggcgtcgagcttttcgatcgtctgcacggcggtgtccaggcgcatgtcgacaccggcctgctggcattcgtcgagcagcatgccgaggatgtcgctggatttgtgatcgcagaacagctggcccagcttcttctcgtgatagggcacgccatggcgaacgaccatctcgataaagtcccattgggtgtagcgggccagcgccgatttacagaagtgcgggttgccggaaaggaagttggcgggctcggtgtacatgttggtgaaattgcagcgcccgccgccggacatgaggattttcttgccggccttgttggcgtggtcgagcaacagcacccggcgccctcgtgccgctgccgtgaacgcgcacatcagcccggccgcgccggcaccgatcaccaccacatccgtttgcaacaccactcacctcggtcagctctggaaacgcggcatggtactccgccggctcgctgcctgcagcgctgttcggcggttgatggtggaggcgcggctcaggtcggctgggcgggcaactggcggatcagatggctggccatgctgcgcagtggggccagctgacggcagatcagccccagctgggtctgaaccagacggtgggcgtcgtccatgtcttcggatgtctgctcgagctgctgtgccaaggcttcttcgtcctcgctgtagacggctaccggctggccgttctgcaggcccgtcgccagctcgtcgaggctggcggccaatcgctgggcggcgttctccagcagctcgtcgcgggcatcgtccggcaagccctcgcggtgcgcgcccaggcccgagagatagttgagcaaggtatgcgagaggatcaggaagcgaaagccggtttcggcatccttacgaaagtggccgggctccagcagcatgttggacagggtcgtcgacagcgcggcgtcggcgttatgtgcgttgcgccgggccagacggtaggcgaggtcgtcacgcttgccgctttcgtattgggccatgatctgccgcaggtagtcggcgctgcggccgagggtgttggcgaccatcaggttgaggcggcgcccctgccagtccggcagcaccagaaacaccgcggcggcggcgatcaggctgccgagcagggtgtcgaccaggcgcggccagatcagcccgtaaccgtcgccgacctggttgaagcagaacagcaccagcagcgtgatcgctgcggtcgccaaggtgtagcggttgctacgagtggcgaagaagaccacgccggcgaccaccgcgaacagcgcctggatctgctggctcggaaacaggtcgaacagtgcccagccggccaccaggccaagcacggtgccggttacccgctgcaccagcttgatgcgcgtggcgccgtagttcggctggcaaacgaataccgtggtcagcagcacccagtagccctgttccggatgaatcgcgtgcaacaccgcgtagccgcacaccagcgccagactcatgcgcaatgcatggcggaacagcaacgacgtaggggtcaactgcaggcggatgcgcgcgaaggcgtcgccgatcgattgcgggtcgcggtccagcaagctgctgtcctgctcaccggccagggcgtccgggttgctggcactggccagctgacgctgcatcgtcgccaggttgttcgacagcgctcgcagcgagcgcaacagtccacgccaggcaggattgctctgcagacgcaggtgcgccagcgacgattccaggtccgccagcgcctgggcattgtcgtcgtggtagcgaaacggctggcgcagctgaatggcactggccagttcggcacaggcggtaccctgcaagcgcagcagcctggcgcagcgaaacagtacatcgctatggaagaacgtttcggccagtgcctggtagggatagtgcgaggagctgacgcgctcgtgcagatcctgggcaaggaagtagagcttgaggtagtggctgatcttggcgcccggccggccattgccgaggcgatgcagcaacgtctccttggtcgcgttcagcgcgctgaccacccgcccgttctgctgcgcgagttgcagacgacgttcctcgacgtccagctgacgtaccggctcgaacagcgaggccttgagcttgaagtatcgccccagctcgcggtagagcctggccaggctctgctgcaccggctgatgcgagaacagggcattccagagcaccgatagcagcccgtagcaggtcgcgccggcaagcagcaacagcgggtcgcgccagggttgaatcgcatccgccgcacgctgatcggcagcgatcatgctgtagatggacaggatcagcgtggcctgggcgatcgcagcgtagcgttcgcccagcgcaccgagcatcaccagcgcgaaggccgccgccgccatgccggcaacgaacagcaggggatagggaaacagcagttgcaccgaagcggcggccacgctgaaacacagcagtgtgaccagcaacgcggtgagccggccgagccagctgtcgtcggtttccgccagggcgctggcgatcacgccgaggaacaacggaatggccagcgtcggctgcccgaggtgccagctcaggcccatgctgccggccagcgcgatcaggacgcgcaggctgtagccgaacttctccagggcccacaggcggcgcagggaatggctgagcgatggtgaacgcatagtacggtcggacctggtgatagaggtgattggacgtgcgaaacgctcaggcgtcaccgcttgcgattgcaaagcttataccgacctcccgtcgcgcattaccggaacgccatcgcttggtcatcgttctgccgtattcggctggcttcattcatgcgcccctcccaattcgataacagaggacaacccatgaaccgtgaacacgacgccagccgccgcaacctgctcaaaggcggtgccatcgccgcggtggtcgccaccaccccctttctcggcaccttgcaggccttcgctgcgcgcaacgcccaagggcgtggcgccggtctggtgcgcagcagctacggcccgctgcgtccgaccaaggatctgagcaccggactggagctgctgcagctgcctgacggcttccagtacaagagtttttcctggactggggacctgatggaaaacggccagccggtgcccacctctcacgatggcatgggcgttatcgatgtgcgtcgcggtccgaatggccctgaaatcgtgctggtgcgcaaccatgaagccggtaccggaagcctgatcgaagccggcggcatctatgacgacgtcaccctggccaacggtcagcggccagccggcggcaccaccaacctgtacgtctcccgcgggatcgaccagccggtgcgtaccgtgccgagcctgggcggtacacgcaccaactgcgccggcggtgtgacgccgtggggcacttggctgtcctgtgaggaaaccaccgccgactaccgcagcgtcggcggccgtgcccacggttacgtcttcgaagtgaccgccgatccggcgctcaccaccggccagccaatcgtgcagatgggtcgcttcgcccatgaagcggttgccgtggacccgcgcaacagctacgtctacctgaccgaggacgcccgtaaccgcgccggctactaccgttacatccccaccgacgccagccagcagccgggctcgcttgccgtgggcgggattctccaggcggcacgggtgcgcaaccgtgcgctggtcgacctgcacgcgccgaaccagggcgacagctatcagctggaatgggttgaagtgccgaatccggatctcgatccgcagcccgaaggcagtggtccctttgcccaggcgcgtcaggccgggggcctgagcatgagccgtggcgagggcatctggtacagcgaaggcaaactgttcatcgtcgacaccagcgccggcacagacgcccaggggcatgcgggctacggtcgcggcgcggtctggatgcatgacctggcgaccgatcggctgacctgcatcttcgcctccaccgatgccgagatcgccaacaacccggacaacatcaccgtcagcccgcgcggtggcctgttgctctgcgaggacggtggcggcgtgcaggatacgtacggcttcggtgagcgcctgctgggtctgacgactgccggcgaggcctatatcttcgcgaagaacaacgtggtgttcgatgatgtccaggccgcggcggccggcaagcgcgtgtccggcggcgattaccgcaaccgcgagttctgcggcgcctgtttcgacccgagcgggcacttcctcttcgtcaacatccagaccccgggcattaccttcgccatctggggtccgtgggcccgcgggtcgttgtaagagaagcggctggaggctggaggctggacgcgcccggcgcccggccgcagtccttggcgattaggatgatcgatgggttgcacccatcctacggcaggttggttttcgtgggatgggtgaaacccatcgaatccgccgcaaaggcctccaacctggtgacggcgtcgctataaaacccgcgcatgcgcgggttttcggcgtcggcttccagcttatagctgtctcaccttcaacgaccgccccttgatctttccggcgttcaggcgattgagcgcctgtttggcgacaccgcgctcgaccgcgacgaaggcttggaagtcgaagatcgcgatcttgccgacctggctgcccggaatccccgcatcgccggtcagcgccccgagaatgtcgccggggcgcaacttgtccttgcgtccggcgccgatgcagagggtgaccatcggcggttgcagtgccccgccgggctgcgctttcagctcgctcagcggctgccagttgagtggcgccttctggcgctcctcgatggcccgggcacgatgggcttcggcgggagcgaccaggctgatggcgatgcctttcttaccagcgcgtccggtacgtccgacgcggtgaatatgtatctccgaatcacgcgccagctcgacgttgatcaccatgtccagcgcatcgatatccaggccgcgcgcggcgacatcggtggcaaccaggacggacaggctgcgattggcgaacatcgccaggacttggtcgcggtcgcgctgttccaggtcgccattgagtgccatggcggagatgccttgggcgctcagccgatcgaccaattcctggcattgctgtttggtgaagcagaaggcgacacaggtttcggggaggaagctggcgaggatgcgaaccacggcttccatgcgatcctccgaatcgatctcgtagaaacgctgttcgatctgcgtgtcgtcatgcagcgcctcggccttgacctgctgcgggtcgcgcatgaaggtcgctgaaagttgcttgatgccggcagggtaggtcgccgagaacaatagcgtctggcgcttgctcggggtctggccgatgatttcggcgatggcgtcgtaaaagcccatgtcgagcattcggtcggcttcatcgagcaccagcgtgttgaggccgtcgagtttcagcgagccctttttcaagtgctcctgtatgcgtccgggcgtgccgacgatgacatgcgcaccgtgctccagcgagccgatttgcgggccgatggagacgccgccgcaaagggtgagaatcttgatgttgtcggccgaacgcgccagccggcgcagctccttggcaacttggtcggccagctcgcgggtcgggcagagtactagcgcctggcagccgaaatagcgcggattgagcggttcgagcagggcgatgccgaaggctgcggtcttgccgctaccggtcttggcctgtgcgatgaggtccttgcccttgagcatcacgggcaggctctgggcctggatcggcgtcatctcggtgtagccgagcgcgtcgaggttggccagcgtcgcggcgctgaggggcagggtggcgaaggctgaactgggcacggtaatcatctgcaagggggaaatggcgcgcagtctaacaggctgacggggtcgtcgcgtggcgcctcgccggtcggcaagtcggcggaacggatgcgcgcgcgggagggtcccaacgacaacaatggagactcccggaggttgttttgtcccgtttgctgttgctgttgagtgcattatctcttcccgccatcgccgcagagcccacgctcttcggccgctatgaacagatcaaggtcgaagacttgggcaagacgctcaaggccaagatggacaccggcgcgatgacggcttcgttgtcggcccgtgatatcgagcgcttcgagcgtgacggcgaggattgggtgcgtttccgcctggcggtcgaaggggctggcgataccgtcttcgagcggccgttggcgcgggtcgccgaaatcaagatccgcgcggaggaaggcgatccggacgacgatacggatatcgagcgtggcccgggcgtggccgagcggcctgtggtggaaatgcagctatgcatcggcgatcagctgcatcagaccgaggtcaacctcaccgaccgcagccatttccgttatccgctgctgatcggggcgacggccatccgtgacctcgaggccgccatcgacccggcgcagaaatacacggcgggtcgtccagcctgctgaggcgtgagcagacccaggcagcaaagcagcggtagagccgtgttgcgcttctctgccgctgattcgtgctctcatgtttatggcgagccgtccgggcggcggtgggcgatgtatcttgttttatttaaccgatgaatacggcgagtgcggctggcgttatatgacagtcatatgtccgcgcgggcgacgcttaacctaatgtcagatctgcctatttggcatgtaggtaattggctataggccgttcaatacaatcatcgatattggttaattatcggtcgatgcgttttctttcagtgcgtaagtgtcttattgacttctaggtcaaacaataggccccagagtgacacttgggtctgcctgggcggctgcggcacggttcgttgccggcggcctgcccgaggcgactgcgggcggcgttggatcgatcgaatggcttatatgcggtctgctactcactcgcggccgtcagactaaagtcggggctattcatcgataggccatccttgtaaattcaggatgtggttccctttacccgtaaataaaaataagacggagaacgtcatggccgacagcgacaaaacaaatgctgctgcgtactggaaggcgaatgttcgcctcataacttggagcctggtggtatgggctcttgtctcttatggcttcgccatcctgctgcgccctctactcgccggcatcccggtcgggggaactgacctggggttctggttcgctcaacagggttccatcatcacgttcattttgatcatcttccactacgcgtggcggctgaacaaactggacaaggaattcggggttgaggagtaaccacaatgagccaatattggatcaacatgatgttcgtgggcgcctcgttcctgctctatatagggatcgcggtctgggctcgcgccgggtcaaccaaagagttctatgtcgccggtggtggtgttcaccccgtaaccaacggcatggcaacggcggcggactggatgtctgcagcgtccttcatttccatggccggtctgatcgcctccggcggttatgccacgtccgtctacctgatgggctggacgggtggttacgtactgctggcgatgctgctggcaccctacctgcgcaagttcggcaagttcaccgtaccggacttcattggtgaccgcttctacagccgtggcgctcgcctggtcgctgtcgtctgcctcatcctcatctcggttacctatgtaatcggtcagatggccggtgctggcgtggcgttctcccgcttcctggaagtgagcaactccgccggtatctggatcgctgcggccatcgtgttcgcctatgcggtattcggcggcatgaagggcatcacctacacccaggtggcgcagtacgtggtgctgatcatcgcctacaccattccggccgtgttcattgccatgcagctgacgggcaacccgatcccgatgttcggcatgttcagcacccataccgaatccggtatgccgctgctcgacaaactgaaccaggtggtcactgacctcggcttcgccgcctacaccgcggacgtcgacaacaagctgaacatgttcctgttcaccctgtcgctgatgatcggtaccgctggtctgccgcacgtaatcatccgcttctttaccgttccgaaagtggctgatgcccgttggtccgctggctggactctggtcttcatcgccctgctgtacctcaccgcgccggctgtcgcttccatggcacgcctgaacctggttcagaccatctatccggaaggcccgaaggccgaagcgatccgctatgaagatcgtccgcagtggatccagacctgggaacagactggcctgatcaagtgggaagacaagaacgccgacggtcgtgtgcagatgtacaacgataccaacgccgccttcactccgaccgctaccgagcgtggctggaacggcaacgagctgaccgtgaacaatgacatcatcgttctggccaacccggaaatcgccaacctgccaggttgggtcatcggtctgatcgccgcgggtgccatcgctgctgcgctgtccactgctgcgggtctgctgctggcgatctcctctgccatcagccatgacctgatcaagacgttgatcaatccgaagatcagtgagaagaacgagatgctggccgcccgtctatccatgaccgcagcgattctgctggcgacatggctgggcctgaatcctccgggcttcgcggctcaggttgtggccctggcgttcggtctcgcggcagcgagtctgttcccggcgctgatgatgggtatcttctccaagcgtgtgaacagcaaaggtgctgtagccgggatgctggtgggtgtgatttccactgccgtgtacatcttcctgtacctgggctggttcttcatccccggcactgcgagcattccgaacacgcctgatcagtggtggatgggcatctctccgcaggccttcggtgccgtaggtgcgattctgaacttcgccgtcgcctatgccgtttcgatggcaaccgaggcgccgccgcaagccattcaggacctggtcgaaagcgttcgtacacccaagggtgctggcgctgcgcttgatcactaactgataatgcgccaacggtcagacctggtctgacgctgaagtagagtcgggcttccatatggaagcccgatttttttaaggaagctgaaatatgatctggcatctcatcgctgcaatagtcgccgctgtagcgggtgcagggatcgcgctgctgctgcgctccctgactcggaagcggttgccgaagtggatcattcccgtcttcgcgggcctgggtatgctcagctataccatccactacgaatacacctggttcgaagccaagcaggcgcgcctgccggaagggaccgtggtggttgcgagtgagaagggggagatgttgtggcgcccctggaccatgatgtatcccatgccgttgagctacacggttctcgatcgagcaaacgcgcaaattcaggacacggatcaggggcgggtcgctcgcttcgttctgtatcgcttcgataaacagcacctgatgtccacggtggtcagccagcgttatcaactgatctgcgcggaaaaggccatgttcaagctgaacgatgcgggccaggccaaggtggaaaccctgaccgagctggaggccgattcgccgttgtaccagcgtatctgtggtgccgatccgcgctgagcttggcggatcgatctggtttcgatacaccgctgcgcccgttgacgggacgcagcgctgcgtacgaggggcgccaggccaggggagccgcgcgtcccgtgatatcagcggattcgaggctccccggttgcggcgggtgttgccgtttgccgtcgcagcagcggccatgccccgagcactgccggtaggccaaggccgaaccaagcaatcacatcccaccagccatcacccagcagcgcagcgaaaagaccgacgaggctgagcacggcaatcaggcctggaagcataaaggttgactcacgccagctcatgctactgcctcgcgcgccaccgtctgggtaccacggcgccgaacccaccacaggtaaagcccgctgccgagcacgatgattgtcaggacgtccaggatcgcccagagaatctgcatcggccggccgccgtagtcgccgaagtgcaggggctgggacaaccccagcgcgtccatgtaccacgggcggcccccgaccgcggtgacctccagcgtctgcgcatcgatcagtactggcgtgtacaaatgtgaggtcagatggctgctgccgttcatgaataccgaatagtggtgctcgctggaaaagcgtgtgccggggaaggcgatgaagtccggctgcatgcccggtgcagcctgcgtggcgatcttcaacagatcgctggcaggagctcttgtcgtcagtggcggggcgtcttggtagggttcgagcatcgtcgccaacgattcggcgcgccaggcttcgatcagcagatcggcgcaggcgctgaccacgccggtgatgcccaccaccaaggcccaactgagcgtgacgacaccgatcaggttgtgcagatcgagccagcgcgtcctgctggaacggtcatggcgcacctgagcaaattccagacgccgcataaacggcgcgtacagaaccacgcccgaaatgatcgccacaatgaacatgatgcccatgaaggccaggaataacttgcccggtaacccggcgaacatgtctacgtgcatgcgcaggaaaaacatcatcagaccgccattggccgcgggcatctccaccgcttctccggtacgcgcatcgagcatgaaggtgtaggacgaattcggctcggtgcccgcagtcgcggcggtgatggcgacgacgccgttgggttcgtcagcttcccagccgaagtactgcaccacctcatctggccgatgccgttcggcggcactgaccaactgctgcagatccagatgcggggtgttggcaggcatctcacgcagctcgggcgcctcgccaagcagatgctccagctcgtggtgaaagatcagcggtagcccggtaatggcaagcatcagcaggaacagcgtgcagatcaggctggtccaggtgtggacgaaggaccagcgacgaatggtggtagtccgcatcagaattccagctgcgccgacagtttgagcgtgcggggtgccccaatgtaatggctgctcagccagtattcctcgtcggtcaggttgctcaggttggcgcgcagagtgagggcacgttcatcggccaaggccatgcgatagcgaccgcccaggtcgaaggtggtgaaggaggggatggtattgtcgttggcctcgtcggtgtattgcttgccggtgtagaaagcgccaccggtgagtgtcagcccgggtacgccgaagatcgcgtattcgccgtacagcttggccaggtgccgcgccacgtcgaccgggcgattgccgtcattggcagcgttcgccgcgccttctacgaccggatcgagcaaagtgacgccgcccaccagcgtcagagctggggtaacgtagcccgttacgctgaactccaggcccttgttattctgcatgccatcctgaacgaagaagttggctgcattggtgtaggtgttgggcttctcgatgtcgaacagcgcaacggtgtacagggcaccgccgagctcggctttcgcaccgatttcgtactgctcgctgacgatcggcgccagtgcctggccggcgttgttcgatccgctcggcgccacgccacccgtctgcagaccttcgatgtaggtcacgtacgtagtcagccactcgaccggcttgtagacgagcgagacgttgggcgaggtttcggtttcgctgtagtcctcgatcgctggcgcgctgccgaacgcttcgacccagacgaagttgtcgctgaaggtcttgatacgcgaatgcgtcacgccaaggatcgtcgaccattgctcgttgaatgtgatgacgtcaccgatcagtacgctgtcggcctgggagcggctggccagatggtagtcgccgtcgccaaggtcgtaggccggtttggcggcctgcggctgctcgccgaagggcgcttcgggcgtgaccgacacatattgcggacccgggaagggaatgtagtcggtgttatagcgaacccgggcgatgtttccttggtaaccgagggtcatctcatggccgatgcccacggtgtcgaaagccgcatcgaggaaaaggttaccggaggtctcttcggtttccaccggggcgaaggcgtagagcggctggacgtacacgccggccgagttcacggtcggccccgtataggcgtattcggtcgtgtactggctgtagccgagcgcaccgcgcaggctgaacacgtcgctcaggcgccactggaagcggctgccgacacggtcgtggcggctgtcgttgtaggcccatcgttggctatagagctcgtcgttctccaagtcgtcggcatcaggccggaatgcttgatcggcgaagtaccagtagctggtgaggcctcgcgtctcgctctgcttgtgcgagccgtcgaactggatgagcaagtcgtcgctgacgttccagtccagtgcgacgctggccatgtgacggcgttcgacctgtccgtcaatggcggtttcaccgtcctgggcgagcaggttggcgcggtaggcgaagcggccttcgctgtcgatcggcccgccgaagtcgccgtgcaggtactggttctcgccgcctgtggtgccgtaggtcacgctgttgtagcgctcggcagtgggtcgcttgagcacgtagttgaccagtccgccggggctggctggcccatagaggaagccggacaggccgctgaggatttcaagccgctccatttcctcgatgaagttgccgccatcgtagccgttgctgaagcgaaggccgtcattggcgatgctcagattgcctacgccgctgaagccgcgaatggccactgcgctggcgtagccggcgctggtcggggaggtgaactgtgtggtcgggctgagcttgaagatgtcgtcgctggaggtggcctggatgttatccatcagctccgaggaaatcactgtcaccgaatagggggcatcctggagtgccattccgcccagcgcgccgacgtttcgcacggcgctggcgcgatagccgctttcttcgccgccctcagccaacgcctcggttgccgtcacggtgacatccggcagtgccatcgcctcggttgctgcctgctgcaagctgtaactgcccgaagggtcctgacgaagttcgagtccggtgccgcgcagggctcgctgcagcgcaccctggccatcgaagcggccttgtaccggttcggccatgcggtcgcgggttaacgccggatcgatgctgagcacgagccccgcttcggcggcaatgcgattcagagtcgaggccagaggcgcggcgggcagggcgtactcacgaacctcgccagcagccgtttcgccattgggcgtctgggccagtagtggcagaggcgcgacggcaattgcaacggccagcaggctggggcggaacagtgaaagcgatggcatttgtgaataactcccgaataggaatatctctcagttattcatcaggccgaagcagaaacgaaaagtgataggggcagctgaaaatattttcatagggcctgcagcaccgctgcgatgggggctgcagttacttgcccggatggctgacaggttgcgccggcaccaccttgacccaccaatcggtgtgccgctcgatctgtaccggtaggctgggaggcagggccgccaacgcgcggtcagtgtcattcagcggaaagctgccgctgatgcgcagggattcgaggctcgggtcgaggctgagataaccgtggcgatattcgccaagcttctccagcagctcgctcagcggcaggtcctcgacgaccagcatgccccggctccaggcgtctgcggcgaccggtgctttctgattgtcgtcaagatggtcacggtgcatcactacctgctcgccagcccgtacggtacgacccgcctggaggctgcccggaagcgcggccacggcggatcggagaacgatcaggcgggtcgcatcaccctctcgccgaacgatgaaccgcgtgccgagcgcgcgcagatcgccttgttcggtttcgacgatgaagggtctcggatcgctacccggtgcggtttcaacaagcacctcaccgctgtgcagaaacagtcggcgctcttgctgatcgaagcgaatgtccagtgcactgcggctattcagttggatgtggctgttgtcagtcagggtaacggttagctgttctccagcgccggtgcgctcgtcggctaaccacgccggcagcggctgtgatcgcaatgccactcccacgcccagcgtgcacagcaaggccagaccgagaaaggcgcggccagtggcgcgccgtcgttgggatgtcgcaccgatctgcagcgcccgtcgcgcagagggcgagttgatgctgcccaggtgctgatcgatgccgcccaattgcgcccaggctttggcgtgctcggcactttcattcagccagcgctgcagctccttttctaactgagcgctcgcttcaccgtcgccaagacgtagctgccaggcaatggcttcatcgagtacacgggccgataccggctgccggtccaggctcatttcggctcaccgtaaacggcgatatagcactggcgcagggcctgggcgagatactgacgtacgcgtggaacggatacgccgaggcgcgacgcgatttcggcgtgggtcaaaccgtccaggcggttgtagatgaaggctgcacgcgaattggccgagagctcgccgagcatccggttcacttcacgcagtgcctgaagcacctgtagctgctcctcggcgccgggttgcagctcttcaggttggagtgccagctcatcaaggtaggcgcgctctaatgtgctacggcgaaaataatcgatcagaagaccacgagcgatcgtcgccagcaaggtgcgtggctcacgtaggttgctcaggtcgtcgcgcttgagcaatcgcataaaagtgtcctggctcaggtcctcggcgcgatgagggcatggctggtggcggcgcagccagctcaatagccattcgcgatgatcgcgatatagcgagcccacaagctgttgatgagtcgacccagccgacaagcgaatgctccaaggccgcgagcacggcctgtaacgagaactattcgcacatgatcgcaagttacccgcgtcggtgcaacgaagatatcgcgtcgttgattccgaatccctgagagcgcagttacatgaactgcgcctgctgccgtttccgccagttgatcagccgcaggcttaccgcttccaggctgcccaggccttggcggcgcgctttgctgaagagaatcagcgccagctcggccgtcaccagcgcatcggcgctggcatgatgacgttgcagtacctgcaggccgaaatgggtgcaccagtcatcgagacagttctgtcttggccggctgtccgggcagagcatcggtgcaagctcggcgacatcgatgaacgggtggcgcagcttgtagccgagcgcctgcttcagcgcccgggccagcatgcgttggtcgaagctggcgtgaaatgccaggatcgggctgtcgccgacgaactccatgaaatccagcagcgcttcggccggctcctcgccggcttccagcacgctcggcgcgatgccatggatgagaacgctttcgctgagcttctgggccgggcgcaacaacgtcgattcgaactggtggccgagatcgatcgcaccctgttcgatgaccacggcgccgatggacaggacgatatctcggcgcatgtccaggccgctggtttccagatcgagcaccaccatgcgttgcgcctgcaacgggcactggtccagcgccgcaggtgcaagcaattgctcgcgccgctgcagttgttccaggctgaggagcggaccgcgtcgtctgaaccagggcatattcataactgatagcgaaccgccaggctgctttgcaggcgctgggcctgacgaaaggactcacgaaggatgcggcgatccagatgattgaggttatcggggtccagccggttggaatacggccgaccgtcgcgcgcctgctgctgatgttgctgcatgcgcgtctgctggatgaaatggtaggcctcttcataggccgcgccatccttttcgtcgatgacctcgcgttccaccagttggcgcagtcggtcgagggtgttgcaggtcgcgatgccgtgacccagcgctagcaggcgggcgccgtcgacgaagggcgtgaggccctgcaccttcaggtccagggtcgccttgccctcgcccttgcgggtgactacgaaatcgcgaaaccgccccaccggggggcgatgccgcagcgcattttcggccagcatgcgctggaacaggcgattctcgccgatttcctcgagcatgccgcggcgcaactgctcgcagccttcgctcggcccccaaaccgcgcgcaggtcgaagaagatgctgctgctgagcagattttccggggtcgattcgcgaatgaacgaaccgaaacggcgctgccattcctggcgagacaggcacagctgcggattgctggccatgatgttgcctttgcacagagtgaagccgcaggtgtcgaggtcccggttgatgcgctcggcaaacggcagcagccgcccgcggatatgcgcggcttcggcggcatcgctggcttcgaacaggatgccgttgtcctggtcggtgtgcagggtctgctcccggcgtccttcgctgccgaagcatagccaggtgaacgcgatccccggatcgccgagcgcttcgatcgccagctcgatcacccgacagacggtgtggtcgttgagcagcgtgatgatgtgggtgatctgtgttgaggacgcgccgtgggcgagcatgttgtcgaccagctgcagaatgcggccgcggatgattaccagcgtctcgacgctgtcggcgtgggaaatggcctgggccaggtgcaccaggtcgacgcgctggagcgagaacaggtcgcgctcggaaatcacgccgcgcagcagaccgtcttcgacgacacagacatgggcgatatgccgttcggtcatggcgatcgcggcatcgaaagcggtggcatccggcggcagatggaacgggtcctgagtcatgaatccggcgatcggggctgacaggtcggttgtaccggtgccgatcacccggcgcaggtcgcgcagcgtgaagatgccctgcgggtgcagctccgcatcggtgatcaccacgctgccgacgttgtttccgtgcatcagggtgaccgcttcggccaatggcatcgacggcaagcaggacaccggatggtgcagggccagttcgccgatacgcgtctccaatgaatactgggcgccgaggttctccaccgcacgcatctgtgcctgctggttgaccagatcgagcaggctgctgacgccgcgcatggcgaagtcacggaacgcggcggatttggagaccagcttgacgaaggccggcttgttcagcagatagcagaaggtgtcttcggcagcaaagtgaccggtgcgagtggcgcgctcgcccatcagtgccgccatcgggaagcactcgccgacgatgacttcgaaggtggtttcggtgccgcgcttgctggtgtgcgggcgctggccgtgcacccggccctgcttgacgatatagaagtgctcgaccacgccgtcatccggcgaaatgatgcaatcgccttcgctgtagaagcgcagttggcagttttccaccagataggccaggtgccccggctccatttggttgaacggcggatacttgcgcaggaattccatggtgccatggatgttctgcagcacagcggtcttgcctgcctcggcgaaagcatcggctttgctcatcggtcgcttccatttttttgcgcccaatggtgggcggtggggctgtcagggcacattggacgtaagtctagtcgcgcgccggtcacgccgggctgatgcgggtcagcgcttttcgaggtctcgtaaagggtattggtgtcacgaaaagacaggacgctcgcgggattggggaagagcggatcgaaggcagggaagtgggtcttggcagccgccagacgaaccaaccccctgctgctaccgatgagccggcaaccggcctgccctaatacagaactcaggaagcccgaaaagcgccgcctggaagccggggcagctccatcatgcctggcgacgttcgtcgcttggttatggctcgggactcagactgcttgttcctggacatcaggatcgcatttcccgagaaaagtgcgatgaaccttatttaagggcggctttttctctatagaagcctccccggtgctttacgccggcggcgaatccgctgctacagcttgtaaataccttaggcgcacatgcctgaattcgaagctcaaggcaggcgcttcggcagtaaattcaggcaagcgcaggtcttagcgtgtcctgggtctgagccagccgtgctgctttacggtttgagtccaaagcgagccattgctctaccaggctcgggatatcctcccgcttccaaagatcgccgaaaacgtcttgtgcggtcagttttcgatccgcctcgtttagcagccggtgcttcgccagagccagcgcgtcacgttgttgggcgcttagctggcgtaccgcagtgattccttcctggtagagctgcatgagctccgtttcagtcttgttgtagaagcgcctgtcgtgacgtagccggacttcatgctggaattcggcaaaatttcgtggccgccaactggccagttcttcctcggcgtgttgtattactcggtgaatgtccagaatctctgtagacgtgaatagggctccgtcgcgctccgcgacgctggtatgccagcgcaacagcgtggtgagcatggcccggctgtaaccgccatcgctgtagtgctctggaaacgagatgagctgattggcgaaggctgcgcgctcaggcatatcgcctttcagattgagcgcgccggcataacgggcgcaggcttgctcgtcgataagcgcgcaattaggttgccacagcactgcgctagcgctgccgctgctaggtttccgtgacacgaaatggcgttgttcaccatggtgttcataattgtcgccctgcaggttcaacaagccgcccagaagtagagaaatgcccactgcaggggagctgaacaacgcgacgacgcccgcggcagcaagcttccattcagcgtccatccagatgaacgggacccctggaatcggatcgttgtggtttaccagtcgatggtgcgttagaccatttgcgccctggacgaaagcttgatctccagcacgtggcgcaccaaatgtataaagctgcgtatcttccgaccaacgttcgcttatccatgcagcgagaagtagcgcaaccgcaccgcctagactgtgtccacagacgattacggtctgcccgctgtagaaagcttccatatagcgctcaacgaagatcttggctgcgctgaatgcgttatagaatcctctatgtacttggccagcgccctccttgaacggtacttgtcgtgcatcagcgtctagcaaaaaatcttttagtccgagggtgccgcgcacggaaatcagcacgaccttatcgctgtgggtgatgaaaacctgtgtgtcggattgctcgtgattcagaaaatggacatcttccgggttgcgccagcctttcagcgcttcttcgcgatagcgctctgggtcgtatggcataacttccaagcgcttggagtaaggcgcttcctcatacagtaggtcatagcgcgcttcgccaaagagctgggatttctctaagcgggccagttgttcgcgcaacacatgccctatcgagcccggattggaataagggggcggattcgaggcgtagggagttcctgattcctggggcttgctgaacggggcgtaagcgaaggctcccatcaccgccagatgataggcattcaaggcgcagaatgccttatctctcgagagcagcgggctgtaagcgcggagtgctttgacttcgagcaaatggtgggcgtccgggaccagggcgatgcccggttgacactgcgcaagaccggcgttgcatttgagtctagccgtcgggcgaggtccccatgcagagtcactctccggtagatggcttttggcttcggcgaagtcgctaacttccacacggaagaactgagcgcattcctttgtagcgcgagcttccgctaggtaggttttaccatcggagcggcgggggcctgaaggcgattgttcggctgctatttgcagtgccgttaagggaagcatgaagttttcacggcttgaaatcgccgtgtaccattcatcgtttcctgagtagctctccgatagctggagaatcaccgccccatgatagagctgaagcacttcagcgtatccgtcctcgtctagttggccggcatatgtttgcccttggctatcgtgcagcttataagcgagtccggcgtacggtttcccacttccgtgctcgtctaccagccgaaaactgattcggttccggcggctaggacattcgaggctgacagtatttggcgagctgttcatccgtgatcactctgtgcagtttgggtaaacggagcattcgcggccgttcatcttaaaggtgcggaattgaggcggctctgtacagcgttcttcatagccggtaccccaccggcctgtgcaaggtttccaaccatgttgggtttctagccaatacccccgcatatatggtttgtctcgggtagcggtactgatatcaagttttacggttttgttttttaactcgtcgaatgcgaggtgagctcctgcccccttacagctcagcagcctactgacctctcctttcctggagtacgccttgctaagttggaacagccaagtgcattccgccgtcttgctgaatcttccgttggcatcgaatcccggcgcgccttcaggcagcacgtcgaccagcaccaggcctccattgtcgtaggtgcgctgccagtccttttcgccgtagcgaccgtgaatgaacaggccgacgcgggccaggcgcatctcgcaaagaccgtcgcggtagttgaccggtatcctgaatcgatactcgtgggtgccgtcctcgaagtcgctttcgaaggaacgcgtgcgggcgcggccattgcagtcgttggcgacaccatagtgagcctgggctataagggcgaagttcggtggcagctggccttctagtgtgaaactgtcgcccatgagcggggcgattgagctgcaggctgtaagcaaactgcccaagccgattgccagcagatgcgcgttgtgacgggtcatgagtgagtgtgctccatattggcaattgcgacttggcagcgaacaaagtgatgttcgggtgtctctgcggtatggacagaccagaacgaatgcgatgccagaacggggttcagacggtactgcaacagaaagcattgctgctccggcgcatgccatcgccagtgttcggcctggtcgagctgctcatcgagccactcatctagcaagacgtgctcggccagtttggcagtcgcagtcgggaattgctgccagagccactgtaataagttgtgatggcggatctgccgcgcggtcgtaggtggctcgggaagatcgagccagggcgttgcaaacggaggagggcagtaggcaggggttgggttgtcgaatctcgaccaagcactaccgttccagcacagtgcgctagccagagggcccagcagcaaatgatgctgctccagaggcaatccacacaggtggcgggcgattactcggctgtcctgcaaacggtatagagctcgttgatcctgctctacaatcagcattcgcgccctccagtgatcggcgagggcgggcatatcgatctggacggcgctggctagccaaccccagttgagttcgggcgcatcaagcatcggctgaatcttcgtgacgttcgagtcgctcaacgcaactagccaagggccggcatccgccatatcggcgaactcggtcccgtggtagagattgacgtagtcatgcatgagatccttggcaaacagctcctgcacggggttgggttcagctaaaccttcaatgatgagcagcaactgccgttgttgtccgtgctgatcgtcgagccattggcgtactggattattcatttgtttagcgctccggtttcgcaaacgccttctctgcacgcttcgcataccgggcagcggctggcgccgatctgtcgggctttgcgtgccagttgcagttgcgtattggccagtgcgagtttcggtttggcgccggccttgtcctgatccgccgcccagggaattaccggtgccagaatattcagccccgagcctttgcccggcgatccgcctgagttgatcttgatggtcgcaccgttcaacgtaacgccgcttggatcgagtttaaggaagctgccgccgcctgatgcggtgagctccatgcccgcgtcgatgacgactttgctgccggcgtagtagtggatttcgttgccggcttcgacgaactgcccggtgccgaccttcacatgctggttgttaacgacggtgaggtggtcgttggcgcgaacgtcggttttgcggtcggcatgggtggtgcggtgttcctcggccttgaactcgctatagctgtcggcctccaccgtgtcatgacgctcgtgtccgacgcgaatcttctggtcgtgctcgatgttctcgtcccagtcgcgctgggcgtggatatatatctgctcggcacccttgcggtcttcgatgcgcagctcgttgtagccgccaccgcccggggagctcagcgtcttgaagacggtacgggtcttgttcgctggcaggtcgtaggggacgacatgttccttgtggtacaggcagccagtgaccagcggttggtcgggatcgccttcgaggaaggtgaccagtacttccatgcccacccggggaatggcgatgccaccgtagcggtcgccggcccagctcgaggagacgcgtagccagcaactggtcttgtcgtcggcctggccttcgcgatcccagtggaactgcactcgtacgcggccgtattcgtcgcagtgaatctcttcgccggcaggaccggtgacgactgctgtttggctgccgagcaccttgggtttgggatgcttcagcgcagggcggtaggggatgtcccagggggtggcggtgaagtggttgcggtaaccctgcgtgaagtccgcgttattcgccgattgcgaaaccgactcatccaacacctgtggctgtttaccctcgtggaggacttcgttgagtagccagagctggttccagtcaccgcggggatgcccgctcagggcgaggaagtgaccggtgaccaacaggggttgatcgctctcgcctcgggccagttcatagtcgctgcggtggcgttccagcgcgcgttgcgacaggtgcttgccgcgtgcgcgttcggtgaatcggccggggtagtcgtagtcttccaggtccggctggaattcgctctggaaggcggcttccatggtcagccgcggtttctcgaagtcgtagtcgcggcgggtgacacggctggtgcgggtctccatgcgcaagtcgaaacgcttgatcaccggcgtgtccgcgaccagacctgaatcctgctgataaacgaccggtgcgagtttggggaaccctgtctggtcatcgccgaagaccagcacatgacccgaggcgctgtgctggaagtgatagtgaatgccttcttcctcgcacaggcgctggatgaaatgcaggtcggtctcgtcgtactgcacgcaatagtcgcgctcggggtacgccgagccgagcccgaagcgaaaggcatcggcctggatgccgtgctcctggagcacctgggcgatgatcctctcaaccgtgaggttctggaagatgcgctggttggtgcgatgctccaagtaggccagctgcgggcgcagagtgatctgatagcgcgtcagccgcttgcccgagtcgccctgagcgacgcgatggaccaggccatggatgccgttgccggccggtgagagcgcaaggaaagcacgctgatgcagcaggctttccaggtccagatcaggccgctcgctgacaagttcgagctcgaaggcgaagggctgggaaagggcctcgcggcccttgaattcaagaacctgcaggtcgtgctcgacgccttcgatggcgagagtgaaatgggtgtcgttggccgggttgaacatgtgaaatccttgttcggagcgcttccatgaagcccctcagagcgaagggcgaggctaccggttatcagtcggagcgtttgcgatgtagatcaggtcaagcggtagcaatgccgtatctattgccgctgttgcaaagccggctagagcagtcgttgcccgtatgtagcgtcggaaattcatgctcatatcagaggttgctggcgtgcacacccagccgctccatgcgatagagcagggtgcggcgtggcagcccgagctctcgagcggcctggctctggttgccgccgttcttgcgcaggcagtcgatcaacagattgcgctcgacccgctcgagccgtgcccgcaggttcagcgtgctatccagttcgttatccacggtgcgcaggctgaaatgttccggtaatagttcgccaccgtcgcacaggagcacagcgcgttcgaccagccctttgagctcgcgcacgttgccgggaaacgcataatcggccagttgttcgagcgccgcgtccgaccagcgcacggtatcgcgctgtagaaagccgcaggctttgtcggcgaaatggcgggctagacgaaggacgtcctgatcgcggtcgcgcagcggtggcaattcgatcggaaagatggacaggcggtaatacaggtcctcacgaaagcgaccctcctcgacacgcttgtgcaagtcctgatgggtggcggcgacgatgcgcacatcgactttgtgcgtgcgcgtgctgccaagcggtcgaacctcgccttcctgcaggacgcgcaacagcttggcttgcagggtcagcggcatgtcgccgatttcatcgaggaacaaggtgccgccgtcggcagcgtcgaacaggccctcatggtcgcgatcggcgccggtaaaggcgcccttgcggtagccgaacagctcgctttcgagcaggtgttcgggcagggccgcgcagttctgcacgatgaacgcctcgctgcgccgcgagccacattcgtgaatcgctcgggccacaagctccttgccggtgccggtttcgcccgtcagcagcacactgaccgggttgtgcaagaccttgccgatcagcccatagaccgtgcgcatgcgcgagctgtcaccgatcagcccgtacccgctggcgcaggggcgcggcgcggcgatttgcgcagggacaggttgcgctgcgccgcgcagtctattgagcagcgaggcctggccgaggccgaaacggccaaggttggtcaaggttgcggctgtgccggcgaggtcctggctggcggtactggccgccaccatcagcccgacggcatgaccttccgcatcctccagcggcaggcacagcaggctgcgccacgggcgcgacgactcggggaggaagcctgtctgatgcagactggcgtccagttgggcaatgctcagctggcggttctggctgaggcagtactgcagcagttgttcgtcccgatagtcgctgggcaggcttgctgtctcgtgccgccgcgagccttcgaaccattcggcagacagggtcaggtgcgtatgggtcgcatccagcaggtaaagctgggcgagggggcagctagccagttgcgccgccatctgcaccaccccgtccagccaactgctcgtatcggtcgcccaggccaactcggcgaatcgatccagtagcgctccggcaggcgaagagtgttcgggaagcactggcgggaccttaagcgaactcacagaccaccgccccgttgccgtcgagggttgcgtgtacgcgttgcagtgtctcgccacctgccatggcgtcgagaagacgatcgacgacctgtggttgcagatgctggtcgatcaggtgatcgatcaggcgtgcaccgctgtcgctgtgggtgcagcgttcggccaggtgttccaccagtgccttgcagtgactgaactgcagctggcgccgcgccaggcgctcgccaaaccgcgacagtttgagtgccaccaattcgttgagaacttcaccctgaatcgggtaatagggcaccacgcgcatacgggcgagcaatgcaggtttgaagtgctgggtcagtgccgggcggatggccagctccagatcttcggttgccggtcgttggccgctctggcacaggcgggcgattcggtcgctggcaaggttgctggtcatcaggatgagggtgttgcggaaattgatctcccgtccctcaccgtcattcgcgacgcctttgtcaaatatctgatagaagacgttcatcacctccgggtcggctttctcgacttcatcgagcagcacgaccgagtacggcttctgtcgaacggcctcggtgagcatgccaccctcgccgtaaccgacgtagcccggcggggcacctatcaggcgggagacagtgtgtttctcctggaactcggacatgttgattgtggtgaggaaacgctcgccgccgtatagcagatcagccagcgccagtgcggtttcggtcttgccgacgccgctggggccgaccaacaggaacacgccgaccggcgcatccggcttgttcagcccggcggccgtggcacgcatcgagcggtccagcgcttcgatggcttgctcctggccgcgcacacgctggcgcaggtcggtggcaaagctgagcaccttgctgttgtgctcgcgcgccaactgagagagcggtacgcccgtccagtggctgatgacttcggccaccaggcgtgggcaaacctcgaagctcaccaatcgttcggcggcctgcgcactggcaagctcggcttggagatcccgaagttcggcttcaagctgatcgagatccaggtgcgcttccgcggattcggtaggcgcctggcgtgcggcagcgcactgcttgcgcagctccagcaggcgctcggccaatgtgcgttgcacggaccagcgggtttccaactgctcgagttcggcacgggctgccgccaggcgggtctccagaccgtccagtatgtcggtgtcgatgctcagaccggcatcgagatcgcggcgcagtgcgagttcctggcgctcgccttcggcgatctcgccgcgcaagcgctccagcgcttcgggtgcggcggccaggctgatacgtacccgggcgcaggcggtatccagcacgtccaccgccttgtccggtaattggcgcccggcgagatagcgggccgacagctcggcagcagccaccacggcgtcgtcgcgcaggtagatgccgtggctcttttcatagaccggtgcgagtccgcgcaggatggtcaccgcttcgtcgacggtgggttcgtgcagctggacgggttggaagcgacgggcgagggccgggtccttctcgaagtacttcttgtattcgctccaggtggtggcggcgatggtgcgcagctcgccacgggccagtgccggcttgagcaggttggcggcatcgccgctgccggcttgaccaccggcgccgatcaaggtgtgggcttcatcgatgaacaggatgatcggcttgggcgaggctttgacttcatcgatcacgccttgcagacggcgttcgaactcgcctttgacactggcacccgcctgcaacagtccgaggtccaggcacagcagctcgacgcctttgagcgcgtccggaacttcgccattggcgattcgcagcgccaggccttcgacgatcgccgttttgccgacacccgcttcgccaaccacgatcgggttgctcttgcgacggcgcgcgaggatgtcgatcatctggcggatcgccgcatcgcggcatagcaccgggtcgagcttgccgtcgcgcgcctgctgggtgaagttgtgggtaaagcgcgacaggttggactcgcccgctggcgctgccttgcccggcgcggtctgcggctgctgcgccaaggcgaactcgcgcagccgttcagcgttcaggcgcgccagcggcggctggtaatggctgccggcgtagcgcatcggattgcgcaacagcgcgaggatcaacccggcctgatcgatctggctctgaccgagttcgagattgccgaccaacagggcgtcctgcagccactgcaccagctctgcggaaaacaccggattgcgcgattcgctgtgctcgcctcgcggttgtagggcctgggcgagcgtccccgcgtcgacatcagcatcttgcagcgcacgtgttagcaaaccttcgggacgctccaacaggcccagtagcaggtcttcgacgagaatcttgctgccgccacgcacgacgcagcgctcggcggccgcttccaggtcccgcttggtctcggcatccagcgcctggaccagttgttgaaggtctacgttgatcatttcatcttccttaatgagtctggctacccaaggtgaccatgccgtcggcgcgttcgctgccgagccagctggtccagccgaggcggcaggggttttcggagccgatgcgcaagtcgcggatttcctcgcgacgcagctccaggcgaatgtcgtagtcgagcgggtcgcgcagggtgaagcgaaccagtgcgcagagcggttggtagccgttgcccacgggcaaaaactcgtggaaacggtcccagctgagctggcgaatgtggatacggaatttgccgccgcgatcgcgaacccgctcgcccagcaccaggctttcgcccagttggctattggcacggccgaggcggttctgttgctcggcgagaatctcgacctggcgctccaggcattgctcgatacgcaggtcggcatgcttgaagtagtagcgcagcaccgactcgatcaaggcggccgaatgcgcgcgcaggctgagcaggcccaaataaggcaataggcgcttccagttgagctccgaggcggctcggatctgttcgccacccagcccaacgagggcgaatagttgctcggacagcgggtctcgtgcaccgctggtgaagcgcgcgcggtagcggtacttctgccagatcggcagcatcagacgttgcaagcggttgttgaacaggtcgagaaattcgcgtgtcgggttaccctcggcgctgtcgcccagggcctgctcgccgtagaacgctggcagcggcgacccggcgccaaacaggctgaccagattgatgcgcaaacgagcgcgcagctcgccgtgctcctgaaaaaactcgacgcggtcgacgtcgctaccgggaaagcccaggctcgggttggcctggaactccaggtgctcgtagagcgcctcttcgtccagctcgggatgcgcgactttcaggcggtccatcaccagcagcacaccctggaacaggctgtactcgcggatgccccggctgatccggtttagagcaggggctgctgccccatgcgcggcgtccattgatacacctctccctgtgtgctcctgacgcgcagctcgtgatacgagttgaggctggcgtacagcgcaaagaattcgttgagtatcgaggcgaagaggaacaggtctccctcgcccagataaccttcggggtccatcaccagctcggtgcgcacgccgcgcaccggcaggccacggtgtaaacggtcgacatgctggtgcccgatctgcttgagaccgcctagcagtcgcttgctgaccttctcggcgtgctggtcgtagtagcgcggcaggtcgtaggtttcgaggatgactttgagtgcctcgacgttggccagcgacaggtagttcagcgacatgttgctgatcagcttccagagaaagtcacgatgcagtggcggcgcgtagctgggcgtgaccgggctgatgttgcggaaagtaagaaactccggggtgtcttcgctgggaagacatatgtcgcccaggcgcagctgacgcggcaggttctggttggtgcacgtcagctcgatggacagcgtctcgtgttggtcgagattgcgcaggccgaagctgaggtaggtctccaggccatcgcccaacatcgacggctgctggcgtacgctgtaatgtgggcgcgccacggggacgtcgaaactcgggtcgtgctcgaaggactcgaacggcacgtattcttcgtagcccatgccgccgggcttccaaccggttacacggtcaaccgagaacacgccgcactggctgctgtcgagctcggacggcagcagcagatactggtcctgcttaccgtcgagacgaatcgggatggcgtcgtgctcgaacaggttgaccaccggcgtgcagtacaggcgcacattgtccagcgtcggccggatgcgctgcacgccggccttgtgaatgtcgaagcgcagctcgaagccgcggccctgctcgattacgtcttgcggaagacgcttgaggacatcgaggccgagcaggtcgacgaacaggaatttctcctgaaaggcgaagtactcctgcaggtagcgatagcctctgaaggtgttgagcgggtaggggatcagtgcctgatcttcggcaaatcccaccggttgcagctttgacggatcgataggaagtgcgggcagggttacgccgaagctgtcggtgaagggtttgccattggcatccaatgcgaccagctgcacgccagcgacattgcgcagcaggctcaggtagagcatctggctgatgtagcgctcgccggcaagatgaaggcgcagctgcttcaggttcaactcgccgagatgaccgtctgccgtcatctgcaggcgcaagctgagcagggctccgccccccttgactgaataatccagcccgtcgagcgccagcggcagcacctccgtggcataggcggtgcgaaaccggcaggtcacgccctggatcggcttggactcgaccggcgtattgcgcggcacgatgagcgctggccctgggcgtttgaccgggtcgaattgcagcatgctgaacgccggcagcgggcgcatatagttcggccacaacaggtgcatcagcgagtgggtcagctcgggcaactcatcatcgagcttctgccgcagtcgtcccgtgagaaaggcgaagccttccagcagccgctcgacatccgggtcgcgccccgcttggcccaggaacggcgccagcgccgggctgcgctcggaaaagcgtttaccgagctggcgcagggcggtgagttcgctctggtagtagtggttgaaggacatcaggctggagactccgtatcgttgtcggcagatgcgtcctgcaatctcacatagctacgccaagcttcgggatgagcggcatcatgcagccattcgttgcgctgcacccgagtcagggactgccaataaggccaccagtaatgccgccaccagtagtcgaggctgccttgtcggctgcccaggccgcttgcatcgactccgggaaatgcttgccatggcgcgggaggcgataagtcgggcagcgcttcaagcagctcaatgctgttgctcaccagcagaagggtgaatccaccgccgagcggctctgcttgcagcgatatcgcctcttggtcctgaaggtgggtctggaaacagccggtctgaaggcgtcccagaaaaccaaacttttcaatctgccgctgcacgctggaaattatgtcggcggtgacatgcgcatccagtgaataagcacccaagccgttggcggctagagagacgactctcgggtaacggcgcatagctttaggaatgaacagcctgcgaggagggtaaaaaggccgcagtggcttgagcttgatatcgacttctggacccagctctcgctgagcagaagctttcttctttaggaggcgtgcaaaaatgttcatttgtcagaacgccccaccgccgctcgtaccgattactaccgtcccggaccctgcggtcaccggattgccgtgatctccggtggtaccgaccgtagtggccggtttgccgttgatgagaaccgtggggatagtcgcgctgaccagcgcgctgccacaggaggtcggttcgcccatgcgcgcggcgggcatgccgtcgaacaggacgttgggagagccggctgctatcgggttggtgccgtggccctttttcgggcaatcggtggggtcgcccaggcgggctgcgggtttaccggacatcaggctctccttagtggactttcacttgtccgctgccatccaggctcgcggaaaaactcacatgccgcctgaaatcgtcgacttccagcaggccttcgatggcaaacgacaggcttagcgggtcgtggtcgcggggtagcgatatcacccggacctggctcaagcgtggctcgtacgcttcgatgaagcgttcgatggcgatacgcgcttgttgcagcgagtcgtgcagcgacaggcgcatatcgttcagatcgggcaacccgtaatcaggcaacgtttgcacgctgcccgcccgggtgctgagcattttggccaaatgggcagccaccgaagccattgccgcaacttcgcgactccagccggcgcgcttggcggcgtcgccgccgaggcgttcgaaaaggctgccgtaggccatgtatgcttattccttgtccagcttgcctaccagcgacagggtgaaatcggcacccatgtacttgaagtgcggacgcacgttcaggctgacgcggtaccagcccggctcaccatcgacatcgctgaccaccacttgcgcggcgcgcaacggacgacggctacggacttcggagcttgggttctcctggtcggccacgtactggcggatccacttgttcagctccagttccaggtcggtgcgctctttccaggcgccgatctgctcgcgctgcagcaccttgaggtagtgcgccaggcggttgacgatgaacaggtagggcagttgggtgccgagcttgtagttgagctcggcgttcttgccttcttcgctgttgccgaagaacttcggcttctgcgccgagttggcggagaagaacgcggcgttgtcgctgcccttgcgcatggtcagggcgatgaagccttcttcggccagttcgtattcacgacggtcggatacaagaacttcggtcgggatcttggtttcaatctcgcccatgctctcgaaatggtgcagggggaggtcttccaccgcgccaccgctctgcgggccgatgatgttcgggcaccagcggaacttggcgaagctgtcggtcagacggctggcgaaggtgtaggcggtgttgccccacaggtaatgctcgtggctgttggcgacgttttccttgtagacaaaggatttgaccgggttgtcttccgggtcatagggattgcgcagcaggaagcgcggaacggtcaggccgacatagcgagcatcttcctgctcgcggaagctctgccatttggcgaactgcgggccttcgaaatgatccttgaggtccttgaggtccggcaggccggtgaagctttccagaccgaagaacttcgggccagccgcggcgataaagggcgcgtgggacatgctggcgaccgaggcgacgtattgcatcgtcttgatgtccggtgcgctcggatcgaagaagtagttggcgatcagggcgccgaccggctggccgccgaactggccgtactcggcggtatagatgtgcttgtacaggccggactggaccacttccggactgtcctcgaagtcgtcgagcagatcctgcttggaggcgttgagcacttcgagcttgatgttctcgcggaagttggtgcgatcgaccagcagcttgaggccgcgccaggaggattccagagcctgaaactgctggtgatggaggatctcgtccatctgacggctgagcttggcgtcgatttccgcaatcatgcggtcgaccatcgccttcttcaccggctcgtgctcgttctgtggcttcagaagctcttcgatgaaggccgatacgccgcgcttggcgatgtcataggcctcgtcatcaggcgtcaatttggtttcggcgatgatgcggtcgaggatgccgacctcggcgaggttgttgccgctttcgacggctgctgcgctagtgctcattgtgttggctttccttgtcggatgattcaggcgtccagttgttctttcgcggcgaggcccagctcaccgagtacgcggtcgcgcgagtcgtcgtcagcaagaacgctttcgatcgctttgcggaaggctggagcgttacccaacgggcctttcagggcgaccagggcgtcgcgcagttccatcagctttttcagctccggaacttgctcgaccaggttggccgggttgaagtccttcatcgagttgatgttcaactgcacggccagttcttcatcggtgggctcgtcctgcaaacggttcggcaccgagaaagtgaggttcagctcttgcttggccaggacctcgtcgaagctgttcttatcgatggcgatcggcttgcggtcctcgatcttgcgatcgttggcgcgctgggtgaagtcgccgagcaccatcaacttcagcggcagttccagttcctcctgagcgccgccggtggctggcttgaaggtgacattgatgcgttctttgggggctaccgagccttctttggccatgggtcatctcctttgcgtttacggcccgggggcctaatcgagtaccacttcgagatcgaggtggcacagcctgcggtaaatctcatccttgctttcacgcacggcgtggttctgcggcagcagctcacaacagctatgcaacaggcgcagcacctcaagggcgagatcgggttcccagtcgccgaggccggaggcctgcagcgtctgatcgagcgattcgagttgggtcttggccagatcgtatttcttggcttggaagcacagccgggcgagggtcagctgccagaagaaacgttcacgcccgcctcgtgcctggttaagcccgagcttgagcttctgcactgcgctcttgaggccgtctttgcgcaggtgtggcagaacttcctgcaaggcctcttcccagacgggcgtcgtgccgccctggttgttaagcgcttcgcttggtggctgtgccggttgtaggtgcggcatcaccctggcgctgatccaggcgcgggtttcagcgtcggcgaagggaacgccgtcatggaaacgcaactcgtcgaggcccggcatgcgctgcaggaacaacgcaagctggatttccacctcacgcatcgcctgttcggcgtcaagttcgctcaggcattcccaggccaggcgctgcccatcgagccagaagggcgcgcgagcgatgctggcttccagatccgccagaaggtcggcatagagtccttgggcgaagcgttcgcgatagctggcgagtttgtctgccggaacgccgcgcagggcagtgatttgttcggcgttgcgttccggtaggctgtcgattgacagccatagcaacgtacgggccaagcgcaatggcttgagatccgtggctttctgcttgagccaccagctgcataaagggcggccctggtcctgcagactacgcaagctcttgtgcgcgtccttctcgtgctcgaccggggtggtagcggtgaacacttgcgccgctgcctgcttgacctgggcgatggctgcaccaacagggccgggctgcggatgggcggcaccagcgcgcttgaccatgtcctccaggcgacgacatagaggtaaaagaagcggcgcctgtgctccgaggtgtttggctagagaggtttcgaggccacgcagctcgagcgtaatctgctcgaacagagggagctgttcgcccattggcacatggtcagccagcacctgctccatgcgcggcaccaaccagctgatcgccgccgcacgggtgcggtccttgcggggatggatgtcttcccaatggtcgcggcagagaaagcccagcatggcgatgccggcatgcagcccgaggaacgaatcgcgttggtaaaggccccaggttagccacgcagcaatgcgcaaatccttcgtctgggtgcttagcaggctttcgctaccctcacgcacagcttcccagtcgacggtgccggccgcatgcaacgacgctgctttggctaactcatgctccaggacctcgtactcggcagtgtagcgaatatcatcgcctgcgaaggaggtcgctgtgattggagcttttgctaccgccataatctgggcggctagcttgctagaaaacgtcattccatgactcaactaaagcctgctcttatgcattgctgcagcaggggcgcttcatgcgcaacggcttgcgacgtgccatgcctgcacgtccgatgaggggcgaatgttaagcagcaaggcgcgggtcgactgtgaagcagtttacaaccagggcgttgtggcggccggcggggctgggtgggcgtccaaactgaggagtggttggctttttgagatgagctgttggtgaacttaggttccgaattctggtccgcctctcgtatgtctgagttgccgcaagcggtctggcgagacagctccgcgccaagaaccgctcctcacatatatagaggcgagataattttccaagaaggataaaacaaccgttgacgtgataatcagagcccctataatgcgcaccttctccggcgcaggccttaggcgaaacctcttgtaaatcaagaagttagcgaaaattaagggttgcacggacggcgaattcgagtagaatgcgccgggctgacagggcggtggttgagcgctgttggcagcttcggtcgggttgatcggaggcggtaaaagaggtggttgacagcggttttgaacgctgtatgattcgcctcccgctgacgagagacgccaggttgatcggaagcgcaagcggttgagaagaaagaaaaacttcttcaaaaacagcttgacgagaaacaaggctgctgtagaatgcgcggcctcggttgagg

SEQ ID NO: 17 - DNA, 511162 bp, Pseudomonas sp.
tctgcatcgcatcgagcaccgactcatgctcccagcgactcacccggcgctgtgcgctcggtgtgcactgatctttcagcgcacacctttggcagttcgagctccagtaacggtgcagctttagccctttctcgacgtgtgagaagcgccagatatcgccaacttcctttttggaagaatcatcccctagcgaggccctcattagacagctcccgcttcatacgctgggtgtcgtgctggcccactgggcgatgaactcgccgattctctccgtgattcggctctcgaccgtgcgaaggcgcaggatgggaatgtcgcttttcgccaggatgtcattctttagcgtgtcccgcgctacctgatcggggtggtcgtgtgagccgccatcgacctcgattacccccaccggggtcttgcccaccttgaaatagatcacgaagtcgcaactggcgcgcttcatgaaggtccgctcgggttgcgtaaaatccgggttgctcggtgatgcgacctgatccagcttgacttggtcgtgatacgtcaacgcctgacacgacggatcggacagcgcctcgcgcagcagttgcgctacgatctgctcggatctgtagcgtgaatcctcgggccgcaaacgggcgttcaagcgcgccagggattggtcgtactcgcgatacagcaggtcgaaagccgataccacgggcgcgcgtacgacctgttcgtcctgcgcgtaataggtgacgtagcgcatcagcgccgcgatgtggccgttattagcggtgaacacctcgtcgcccgttaccagggtgaagcggtgcttggcccgcgataccgccacgttgatcatgcgtgggtcatcgacgaagtccaggcgcttgcgatcctggttgtagcgtttcttgtccagtacggtggagaagacaatttcgtcgcactcccggccctggaacttatgcacggtgtccttgacgaaatccgtcggcaggcgcgtaccggagaggttgacctggtctcggaacggcgcgatgaacccgcgcccgtcgccgtccagcccgaccggctcgccctcgtcgtcgagcagcttgagcagggagtccaactcgcgcaagttggtgttctggcgggtgtgattgcccttggcggtcaccactaggcgcagcggcgcttcgaccttgtcctccgtcatgggtaccaactcgttgtcgtagaactgctggttgcagaactggatgatcctgggatggcagcggtaatgctctttcagcagggttctgggcagcgcctctttgaacacgccgatgcacgaatcgagcaggctgtagcgctcgcaatcgtaggccgcggcgggcgccggcaggcccagaaccacgggaatgtgcgccaactgacggttgtcgccgacgacgatcaggttcttcgcgcagcccagcgccagaatgcctggcacgatgtcctgcaacgaggcctcgtcgatgatcacgtagtcgaggatcgcccccggcgcgatcgagttgatgatggagtgcgtgctgctgcccaggatcgggaaacgccgcacgaaggcatcgaactgttgcggatgccgatacgtcttggcatcgaagctgtctgacggccgtgcctgacgttgcaggtgctgcttcaggtggcgcatagacgccgtcttcaatgcctctagcgaggcttcgaagttcccgcgcgccaacgattcgcggcacgcctgcaactccgcttccttgtctcgcagcgccttgtcgtaatagtgcatctgcagggcatggaaaacggccaggcgcgcatcgccctgggcaaacggcttggtgcggaaaatcctgaagttgaacagcagctcgatgcgatccttgaggcggatgcgctgctcacccagatgggctaggtaggccatcaggtcagctgtcttgcgcggcgacagtccgtatctgtccagtgaggcggcggtctgcacgccgttgtctgcctgccattgctgcaggtagcgtcgctcgatggtcagctcatcgagttcgacctgcagttgcgccgcccgattatgatcgtgcaagtgctgcttcacgtgggccagcagggcctgaatctcgtccagcgtcggtgcgggctcgggctcgctcaatggccaaggcggcaggtcggcgaaaaagtccttgcggttgtcctgattgccgagtttggcaatcaggtggcccaggtcgcatttctccagcttctcgtagacgttttccaccgccgcattgttgttggacagcaccgccaccgtctgtccgcgcagcaggatattggcaaggatgttgaggatggtttgggtcttgccggttcccggtgggccctcgatcacgctgatctgcgcacggaatgcttgctcgaccgccgcgagctggctctcgttcaggccgaacggatagatcagcctctggcccggcgccagcgtaccgttgcgcccggtagagtaggcctgcaaggcagtgtcggcgctggcgggtagcttctccagttggcgcacgacattggcggcgatctcacggtcggttttcgacgtggcgcgatcctgccgggcattcgccacgaccgagaagtagtggaagaccggcgtgtccttcatcgccgtcggcgcggcaaaaccgatgccgtccatcttgtggacataggacttgtcggcgtccggatagtgtacgacggcataccgctcgccgtagatcgtcgccttggcgatgggcgtgacgattgtactgccgggcttggtcagtaacatcttgcccaactcgcgggtgggtgaaacatggcagtcgctgagcgggcgcgtgtaggttttcttggaggggtaataacaggtcagttgcagggattcgtacttgtcgctccagtaaatcgaccagtcgctgatcttggcggtcttgtcctcaccacacacctgaattgaaaccatacatcccttatccgtatgcatacgacatcctgccgcctctcgcgccgagcatcgaatgccggcatttctccaattgggatcatcttgccatcgttgcgtgcatgatcgatagcatggctcatgcggctggttatggtcagcctgcccgtggccgctgaccatcagcaactgatcgaatcctctgcgggagcgatggtgctcaggtggcatcttgagtggcgtactctgctaggtcatgagcatgattttttataaaaacccttttataaacaatatattgtctgttttatatggttaggtgagagacagcatgattgccgaggaacgcttgaaaagggccatcgcgttgcgcaaggacaatgtattcctgcgttccgagttcgctcgttttggcagcccggcccagctctcccgggccttgaggcaactgattgctgaaggtgtgctggtcaagctggggctgggtgtgttcgccaaagctaagcccagtgcgttgaccggcaaacccatccctgtgcaacccctcgaggtgttggcaccgccggttctgcaaaagcttggcgtcaaggtgagccttctcaggcagtttgcgattacaactcgggtacttcccagcaactggctgctggcattgtgctggacaccgggcgccgccggattacccgtaagctgggtttcggcaagcagacggtagcatatgaaagcgggacgcggcgttcggttcgtaaccgaagccgacaagtacttacctgagtgggcgtggcgttcagcaagtgtcagccgggcgtccagccggcgccggcctgggcgggtggtgcatcaacgggcagtggcggcgcctcggctgctgctcagccaaacacggcagatcttcatccttggttcattggaagtcccggctgcgtacatcaagcccggttagtagctgcgatagatcactcaagcgtccggcgatgacatggcgcaccccgcttgccgattccagatggccgtcgattcgcaacagctgcgactgaagcagcactcgccgctgtcgctcggccagatcgcgccagaccacgacattgaccatgccgaattcgtcttccaaggtaacgaagatcacgccgctggccgtctgcgggcgttggcggccaatgaccaggccggcaacgctgaccatcctgccatgcgccatatcggccagctcgcgcgagctgcggcagcgccggctcctgagttgatcgcgtagcaagctcagcgggtgtgggcccagcgtggtacccagggtggcgtagtcggtcagcaggtcttctccgacgctgggctgtggcaggggtacaggcgcttccggcgatacgctgtggttggcgaacagcggcaactgcggctcgaccccggctacggcccagcgtgcctggtaacggtggccggcgaggcactgcagggctccagcgtcggccagccgttcgcgggcgcgggcatccagcctggcgcgaaggcacaggtcatcgatcgccacgaagggttgcagctggcgcgcagcttcgatgcgccgtgcatcctcttcgcgaaagccgcgcaccaggcgtaggcccaggcggatcgccggttgctcgccggcgctcggttcgaggctgcaatcccagtcactgtgctgcacatccacaggacgaatttccaggccgtggcggcgagcgtcctgcagtatctgatcgggattgtagaaacccatcggccagctgttgatcaaggcgcaggcataggcggccggctcatggcatttcaaccagcagctggcataggtgagcagtgcgaagctcgctgcgtgcgattccgggaagccgtagctgccgaaccctttgatctgttcgaagatgcgtgcgatgaactccgcctcgtagcccttggcgagcatgcgttcggtcaggcgttggcggtggtgttccaggccgccgtgacgcttccaggcggccatggagcgacgcagttcatcggcttcgccgggcgtgtattcggcggcgacgatagccagttccatcacctgttcctggaacagtggcacaccgagcgtgcgctcgaagaccggtttcaactcatcggacgggtatttaacctcttcttcatcattacgtcggcgcaggtagggatgaaccatatcgccttgaattggccctggcctaacgatggcgacctggatcaccaggtcgtagaactccttgggccgcaggcgcggcaacatcgccatttgtgcccgcgattcgatctggaacacgccgacggtgtcggcgcgactgatcatttcataggtcggccggtcattctgcggcagggtggcgatggtccagcgggtaccgcggtagtgttcgatcaggttgaaacagcggcgcagcgcgctgagcatgccgagcgcgagcacatcgaccttgagcagcccgactagatcgaggtcgtccttgtcccactggatcacggtgcgctcggccatgctggcgttttccaccggcacgagggtttccagcgcgtgctcggaaatgacgaagccgcccggatgctgcgaaaggtggcggggaaagccgatcagctcacccgtcagcaccagcacccggtgcagcaccggactgctcggatcgaagccggcctcgcgcaaacgctcgtcgtcaggaatccggtcgctccagcgtccgcagcaatcggccaaggcgttgatctggtccggcggcaggctgagcgccttggcgacgtcgcgcaaggcgccggtggcatggtaggtactgacaacggccgtgagcgcggcccgtccgcggccgtagcggcggaatacgtactgaatgacttcttcgcggcgctcgtgctcgaaatcgacgtcgatgtccggtggctccttgcgctcgcgggagaggaagcgctcgaacaataacttgctgcgtgacggatcgagttcagtgatgccgagcgcgaagcacacggtggagttggccgccgagccgcgtccctggcaaagaatatgctggtcacgagcgaagcggacaagatcgtgcacggtgaggaagtaactctcgtattcgagctcggcgatcagctgcagctcatgctcgatctgcgcgcgcgccttcgccgcaatgccgtccggccagcgccagcgcgcaccttcttcaaccagcttgcgcagccaggaggtggcgttatggcccgccggcaccagctcatgcgggtatcggtattgcagctggtcgaggtcgaactggcagcgttcggcgatgcgcaaggtttcggcgagcaattcgggagggtacagctggctcagctcctcgggccggcgcagatggcgttcgccgttagggaacagatagtgaccggcttgcgccaccggcaggtggtggcggatcgcagtcatgcagtcctgcaaggcgcggcgaccacgggcgtgcatatgcacatcgccgcaggctactgcaggcaggttcagacggctggccagtgcctgccattggcgcaggcgcagggcgtcatcgggcccacggtgcagttcgatgcccagccagaggcgttgcgcaaagcgttcacgcagccagtgaccttcggaatctgcgtcgtgttgtcgggcaatccagagggccaataatccctccagtggtttgttcaggtcttcagccagcaactgatagcgacctttctcggcgcgacggcgagcgcgggtgatcaaacggcacaaggtctgatagccgatcagattctccaccagcaggaccagcttcggcccgccttcgatctgcacctcgctgccgatgatcaatggcaggccgacatccttcgaggcctgccaggcccgtacgatgccggccagggtgcattcatcggtgatggccagtgcccgatagccaaggcgtgcggcgcgctcgaaaagttcgcgggcgctggaggcgccgcgctggaagctgaagttggacaggcaatgcagttcggcgtaaccggcgatcatgcgaaccagccgtgcaacagcaacggccctccatcggtcgggcggaaagcccagccacgttggccggtgcgagtctccaccaggtaatagtcgcgccgcacatcgccgccatcccaccagccggactcgatgcgctcgggaccggcaaggacgcgcagagaggcttcgtgcaggggcttcggttcagccagtagccagccggggcggggtgtgatgtccgatggcaaggcattgcgagtgacaggctgcgattgccaggcgcactcggggcgatggtcggcatgtgcggcgagcccctgcacggcgtcgtcacccagccgggcgcgcaaccgctcgcgcagctgctcccagggcaacgactgctgtgggcgttcgtcgaacagttcacggtgctcggggacgaaggttggcagttcacgcgcgatcagacgcaccgccagcacgggcgctggcagttgcagatgttccaggcggccgcgggtcagttcgaacagcatggctgggtcacgctcggcgctgagcaaaccgaccggcacctggctgtcggccagttggcggtgctccagatgcagagtgaagcgttgtacgccgctgtcgcgaccagccagataggcggctagatcggcggtcagacggcgcagcgggaacagtaatgcctgatgcgactcgacctcgaagttcagttcgattcgggcatcgaagaggtctggggggcggtggaactcaagcgccaagggacgatgcccgagcaaggtatcgagatgcctgagagtttctgcgcaaaagcgccgggccaggccatcacggggcagggcgaggatctgcttcagcgttcgcaggcccattcgggcaaaagcggacgccacgtctcgtggcaggccgaggcgctctaccggtagtgattcgagtacgtgatacagcgaatcggtatccgttacggccaagccgtcatgcacgttggccagcacccgcgcggcggccgggttgggcgccaaggtaatgcgatgaccaaagcccagtgcgcgcaactcttcacgcaaacgcgcttccagacgcggccaggggccgaacagggcaaggctggagtgcacttccagcagcaggcagcgcgggtaatgcaggctgacctgcgaactgaaaccgtaagcccaggcggcgaggaattgctgccagcgctcgatcaaggccagatcatattcagccgtcgtgaaggcacgggacattgcctgggcggcaatcagcgattgcccgggtttcagtccgagcgcccgcgccgccggattgaccgcctgcaggacccggcgctgtggcgtcccgctcaacagggccagcggtgcgtcggcgtcggtgcggttgcgcaatacaccgtccagggccagttgtgggaatagaacgcagacccagagcatgaccatctcaatgccacgccgcggcagggatcggccgcgccggagccaagccgccacgacacttgagcacgcgcaattgtgccggttgagcttcaactgccaggcgcagagccgctggtgaggaattgactgcttcacgtagggggcgataggcgaaggccagcgtctgacccgtctctgcagcgacttgcaggcgccgcagggcacggtcatcggcctgttgcggccaacacaccaccgcgccgcagcttcccgaacgcagacattgctcggcagcccacaaggcctcgcgcccttctgcatggatgatcgataactgatgcaaggccacaccggctgccagccaggcatgggggtagggcacatgtgggggcgctaccaatgccacgcgttcaccggctgcggtcaatcgcgccagggttggccagagcaggcgcagttcgccgataccggtcgtggcgatcagcagctcgctcagtgccgattcaggccagccgccgccgggcagcgcggcatccagggcggtatgcccggtcggctggttgctggtcgagacgaggctggactggccgcgccacaaacgacgcgcatcgagcagttgactgagtgcgaccacggaggccataacggtaggtctttccaaatactgtatatggatacagtatttgggttcgcgaaatatcggtcaagtcgctgcgatgaaaagcgcagtgcaatgccgtcgttcgaatttttggctcttcgcaaaaggctgccaaacgataaaaacagcagcggaggtatagcaggcgaggctcgatccaaaatacgttatcttcattaatatgaaaattaatggattaaacgacaatccgtattcgttagaagtatttaaagccatgcgagagactgttcgacgttcgctttttcaggactcgcgaggcgctgaatggcgggcaccactcatctgtctccaggaaatgtcatggctgatgctgcagttctcgatacacccgactacaactacgacgtcgtccgtcgcttcaccttgatgaccctgttctggggtgtgctcggcatgggcatgggcgcggtcatcgccgcccagttggtctggccagagctgaatctgggattaccctggaccaccttcgggcgcctgcgcccggttcataccaacctggtgatcttcgcgttcggcggcggtgcgctgttcgcaacctcgttctacgtcgtgcaacgcacctgcaaggtgcggctgatctccgacgggctggccaatttcgtgttctggggttggcaggcggcgatcgtggcgatgctggtcagttatccgctgggtattacctcgtctaaggaatacgccgaaatggaatggccgatcgcgctctgggtgacgctggtctgggtggcctatgcctatctgttcatcggcaccatcgcgcgtcggcagacccagcatatctatgtcgccaactggttctatggcgccttcatcgtcgtgacggcgatggtccatgtgatcaaccatatcgctatcccggtgaccttgttcaaatcctactcggcctattccggcgccacggatgccatgatccagtggtggtacgggcatagcgtggtgggcttcattctctcggtgggctttctcggcatgatgtattacttcgtaccgaagcaggccgaacgcccggtgtactcctatcgcctgtccatcgtgcatttctgggccatcatcagcctgtacatctgggctggccctcaccacctgcactacaccgcattgccagactgggcgcagagtctcggcatggccatgtccgtggtgctgctggcgcccagctggggtggcatgatcaacggcatgatgaccctctcgggcgcctggcataagctgcgcaccgacccgatcctgcgcttcctggtggtctccctggcgttctacggcatgtcgaccttcgaaggtccgatgatggccatcaagaccgtcaacgcgctgtcccactacacagactggaccatcggccacgtgcatgccggcgctctcggctgggtcgcgatgatttccatcggcacgctctaccacatgattcccaagctctgggggcgcgagcggatgcacagcgtcgggttgatcaatgcacacttctggctcgccaccatcggcaccgtgctctacatcgcctcgatgtgggtcaacggcatcacccaggggctgatgtggcgcgcgatcaacgaagacggcacgctgacctattccttcgtcgaagcactggaggcgagtcatcccggctatgttgtgcggctgatcggcggcggtaccttcgttctgggcatgttgctgatggcctataacgcctggcgcactgtgcgtgcggctgatcggcgaccgatcggggcggctgtcatgcgggtcgcctgaggaaacctgccgctcgggagcggcctgttagaactctatcgttggcctggaagattgttctaagcaaagaatttcttattctttttatggtgaaggcacatgtggctagactggcttccatcctgtcggaggccacctcgatgatccgttatctgatagtgccaggctggaagggctcacctgcagcccactggcaaagccattggcagcacaacctttccggtagcgcgagggtagagcaggccgattggctgaaccctcgccgcgatcgctggattgccgagctggatcgcactattgcgatgagcgcccagccgaccatcctcattgcgcacagtctgggctgcatcaccattgcccactgggccgcacaagcatcgatggacacattgcagcgggttcgtggcgcactgctggtcgctccagcggatgtgccgcgtgatggctgccccgatgcgctacgcgatttcgcgccgattccacgccaggctctgccatttccgagcctgttgatcggatccgacaacgatgccgctgcaacagccgaacgggccattgaactggggcaggagtggggaagcgaaaccgtcatactgaagggtgttggtcacatcaacacgcaatcgggccatacccggtggacgtcaggcttcgcctatctgtatcgcctgcagcatcgagtcgctcaagaagcccggaaatcggcctgagccacgtaacaggactggtcgcatactgcggccgagatcagcaacacccatagaggaaagaagccatgagcatccgtctcggtgacatcgcccccgatttcgaacaggactccagcgaaggccgcattcgttttcatgaatggctcggcgacagctggggcgtgttgttctcgcatccggcggatttcacgccggtctgcaccaccgagctcggcttgaccgccaagctcaaagacgagttcgccaagcgcaacgtcaaggccatcgcgctgtcagtcgacccggtagattcgcatgtgaagtggatcgatgacatcaacgaaacccagagcacgcgggtcaattttccgatcctggctgacgccgatcgcaaggtctccgagctgtacgacctgattcaccctaatgccaacgacaccctgacggtgcgttcgctgttcgtcatcgatccgaacaagaaggtgcggctgatcattacctacccggccagcaccgggcgcaacttcaatgagattctgcgtgtgatcgattcgttgcagctgactgacaaccataaggtcgcgacaccggccaactggcaggacggcgaggaggtggtgatcgtgccgtcgctgcaggacgaggaggaactcaagcgccgcttcccgaaaggctatcgcgcgatcaaaccctatctgcgcctcacgccgcagcccaatcgcgattaaggagtggcccagctgccaaagccgccgaaggcctttgcttgtgctggaaaaatcagtcgattaggattcgcgcccgggtatggacgcgtgagtgccgagcaccgcgcatgaccctatcgaatgttgcagcccggttcggagacggccgggctttttcatgccccggttcgtgcccgctgaacgaccggccccgctcctgatgatcaggggcgccagtgaagagaggaatgtcatgcgcgaacgcttgttggccgcggaaaaagtgaaggctatcgagtggcaggacgggctgttgcgtttgctcgaccaacgcagactgccactggaaacgatatggcatacctatgattccgcggaggcggtggctacggccattcgtgaaatggtcgtgcgcggcgctccggcgatcggtatcagcgcggcgtacgggctggtcatggggctccgggtacggcttgccgaaggcggcgactggcgcgcggcgctggaagcggacttcgcggtgcttgccgactcgcgtccgaccgccgtcaatctgttctgggcactgaatcagatgcgtgagcgcctcgatcgcttgaagccgggcgaggatccgctgacagcggccgaagcccaggccgcttccattcatgccagcgatcgggaagcgaacctgaccatggcgcagttcggggtcgacttgattcgcaagcatcagggcagcccgcagaacctgctcacccattgcaataccggcgcattggccaccggcggcttcggcaccgctcttggggtgattcgtgccgcgcatctggagggcctggtcgagtgcgtttacgccgatgagacccgcccctggttgcagggctcgcggctgacggcgtgggagctggcaggcgagggcgtgccggtcatgctcaacgccgactcggcagcggcgcatctgatgaaaacccgtggcatcacctgggtcatcgtgggggccgaccggatcaccgccaatggtgacgtcgccaacaagatcggcacctaccagctcgccgtcctggccatgcaccatggcgtacggttcatggtggtcgcgccgagctcgaccatcgacatggacctggaaaccggtgaggacatccctatcgaagaacgtgccggcagcgagttgctggaggtcaatggtcagcggtttgcggcgcaggtcgatgcgttcaatccggtattcgatgtgacccccgcggacctcatcgacgccatcgtgaccgagaagggcgtcgtggaacggccgaataccgccaaactggctgccctgatgagccgcaagcggcttcattgagcgcagaaagggcgcatgcaagctgttggaggctgagcggggaagaaccgcagccatgccctgcgtccttctgtgagccagcgagcggctcgggctcgaaacgcgttgttcgttaagcccgcagcctccagcggcctccctccttgtgataccattccgcgcttaatcgcaggaccctgctgactataaggaaccaggcttccatgggcgaactggccaaagaaatcctcccggtcaatatcgaagacgaactcaagcagtcctacctcgactacgccatgagcgtaatcgtcggacgagcgctgccggatgcgcgcgacggattgaagcctgtgcatcgccgtgtgctgtatgccatgagcgaactgggtaacgactggaacaagccgtacaagaaatccgcccgtgtggtcggtgacgtgatcggtaaatatcaccctcatggtgactcggcggtatacgacaccatcgtgcggatggcgcagcctttctcgttgcgctacatgctggtcgatggtcagggcaacttcggttcggtcgatggcgacaacgccgcggccatgcgatacaccgaagtacgaatggccaagctggcgcacgagctgctggccgacctggacaaggaaaccgtcgactgggtgcccaactacgatggcaccgagcagattccggcagtcatgccgaccaagatcccgaacctgctggtcaacggttccagcggtatcgccgtgggcatggcgaccaacattccgccgcacaacctgggcgaagtgatcgatggctgcctggcactgatcgaaaacccagacatcagcatcgatgagctcatgcagttcatccccggccccgactttcccacggcgggcatcatcaatggtcgcgccggcatcgtcgaagcctaccgtacgggccgcggacgcatttatatgcgcgcgcgctcgaccatcgaagacatcgacaaggtcggtggccgtcaacagatcgtcatcaccgagctgccttaccagctgaacaaggcgcgactgatcgaaaagatcgccgagctggtgaaagagaagaagctcgagggcatcaccgagctgcgcgacgagtcggacaaggacggcatgcgcgtggttatcgagctgcgtcgcggcgaggtacccgaggtcatcctcaacaacctctatgcccagacccagctgcaaagcgtattcggcatcaacgtggtcgcgctcatcgacggccagccacgtacgctcaacctcaaagaactgctcgaagccttcgtccgccatcgccgcgaagtcgtgacccgccggacggtctatgagctgcgcaaagcgcgcgaacgtggacatatcctcgaaggccaggccgtcgcactgtccaacatcgatccggtcatcgctctgatcaaggcgtcgccaaccccggctgaagccaaggaagcgctgattgccgaggcctgggagtccagcgccgtcgagtcgatggtcgagcgcgccggtgccgattcctgccgtcctgaaggcctggatccgcaatatggtctgcgcgacggcaagtattacctgtcgccggaacaggcccaggccattcttgacctgcgtttgcatcgcctgacgggactcgagcacgagaagctgctcagcgagtatcaagagattctgacccagatcggtgagctgatccgtatcctcaccgatccggtgcgcctgatggaggtcatccgcgaggagctcgaaggcgtcaagcgcgacttcggcgatgcgcgtcgcaccgagattctcgaggcgcgtctggatctgaccttggccgacctgatcaccgaagaagagcgcgtcgtcaccatttcccatggcggctatgccaagtcgcagccgctggcggcctaccaggcgcagcggcgtggtggccgtggcaaggcggccactggcgtcaaggaagaggattacgtcgagcacctgctggtcgccaacagccacaccacgctgctgttgttctccagcaagggcaaggtgtactggctcaagacctacgagattcccgaagcttcgcgtacatcgcgcggtcgtccgctggtcaacctgctaccgctgtccgaaggcgagcacatcaccgccatgctgcaggtcgacatcgaggctgcgcgtcaacagcagctcaacggcgaggacgatgtcgaagatgccgaaatcatcaatgaagtcgaagaggcggaagaaccgctcgacggcgatgagtccgatgagtcggcagacgagccgaccggcacctacatcttcatggcgaccgccaagggcaccgtgaagaaaaccccgctttcccagttcagccgcccacgcagcgtcggcctgatcgcgctcggcctggaggagggcgataccctgatcgccgcagcggtgaccgacggtgcgcgtgaagtcatgctgttctccgacggcggcaaggtgatccgcttcaaggagaagcacgttcgcaccatgggccgtaccgcccgtggcgttcgcggcatgcgcctgccggaaggtcagcgcctgatctccatgctgattcccgagcccaacgcgcagatactcaccgccagcctcaatggttatggcaagcgcactgtgatcgatgagtttccgcgtcgcggtcgcggtggccagggcgtgatcgccatggtgaccaacgagcgcaacggcccgctggtcggtgccgttcaggtgcagcagggcgaggaaatcatgctgatttccgatcagggcaccctggttcgcacccgtgtcgatgaagtgtcctcgctgggtcgtaatacccagggcgtgacgctgatcaaactgggcaagaacgagcacctggttggcctcgagagagtccaggagccctccgaggaggacgtgctggaagacatcgaggcggttctcgatgacgaagcactggacaaggaaatgcccgttgtcagcaccgagcccagcgaggacgagctgctcggtggcggcggtgatgtgccgccggacgtagtgcccaccgacgacgattgatcatgaggtgcgatacctgcgggtatcgcacctcggttcgatcggaacccgctgtggtaaggattgcaagcgctggacctgagcgccttggcgacgggcggagcgagcatggtatcgaccgtttttgagagtacgaagatgagcaaacgcgcctttaacttctgcgcaggtcccgccgcgctccctgaggccgtgctgcagcgcgcccaggccgaactcctcgactggcaaggccggggcctgtcggtcatggaaatgagccatcgcagcgacgagtacacggcgatcgccgagaaggccgagcaggatttacgcgacctgctgagcattccgtcgaactacaaggtgctgttcctccagggcggcgctagccagcaattcgccgaaatcccgctgaatctgctacccgaggacggcgtcgccgattacatcgacaccggcatctggtcacgcaagagcatcgaggaggccaagcgcttcgggcatatcaacgtcgcagccagcgccaaatcctacgattacttcgccatccccgggcagaacgagtggaacctgcgcgccgatgcggcctatctgcactacgccagcaacgaaaccatcggcggactgcagttcgactggattcccgagctgggcgacacgccgctggtggtcgacatgtcttcggacattctttcccgcccgctggatgtgtcgcggttcggcctgatctacgctggcgctcagaagaacatcggcccgtcgggcctggttgtcgtgatcgttcgtgaagacttgctgggtcgtgcccgctcgagctgcccgaccatgctcgattacaagatcgctgccgacaacggctccatgtacaacacgcctgctacgttctcctggtatctctccggcctggtcttcgagtggctgaaggagcagggcggtgtcgaggcgatggaacgtaccaatcgcgccaagaaagacctgctctacggcgtgatcgactccagcgacttctactccaacccgatcgccagcaatgcgcgctcctggatgaacgtgccgttcaggctcgctgacgagcaactggacaaggccttcctggccggagctgatgcacgcgggctgctcaacctgaagggccatcgctcggtgggcggcatgcgtgcctccatctataacgcggtcggcctggatgcggtcgaggcgctggtggcctacatgcgcgaattcgagaaggagcacggctgatgagtgatgtcgaccggctgaaggcgctgcgtctgcgcattgacagtctcgacgagaagattctcgagctgatcagtgagcgcgcccgttgcgctcaggatgtggcacgggtcaagacggcttcgctggccgaaggcgaggaggctgttttctatcgccccgagcgcgaagcctgggtactcaagcacatcatggagctgaacaaaggcccgctggacaacgaggagatggcccgcctgttccgggaaatcatgtcgtcctgcctggctttggagcagccgctgcgcgtggcctacctcggcccggaaggcaccttttcccaggccgcagccctcaagcacttcgggcactcggtgatcagcaagccgatggcggcgatcgatgaggtcttccgtgaagtggtggccggtgcggtcaacttcggcgtggtgccggtggagaactccaccgaaggcgcggtcaaccacaccctcgacagctttctcgagcacgacatcgtcatctgtggtgaggtcgagctgcgcatccaccatcatctgctggtgggcgagacgaccaagaccgatcgcatcactcgtatctattcccatgcgcaatcgctggcgcagtgccgcaagtggctggatgcccactacccgaacgtcgagcgcgtcgcggtttccagcaacgccgatgcggcgaagcgcgtcaagagcgagtggaattccgcggcgatcgccggcgacatggcggctcagctctacggcctgagcaagatcgccgagaagatcgaggaccgtccggacaactccacgcgcttcctgatcatcggcagccaggaggtaccgcccaccggcgacgacaagacctcgatcatcgtttccatgcgcaacaagccgggcgcgctgcacgagttgctgatgccgttccactccaacggaatcgacctcacgcgtatcgaaacccgtccctcacgcagcggcaagtggacctacgtgttcttcatcgactgcatcggtcatcaccaggagccgctgatcaaggacgtgctggagaagatcggccgcgaagcggtcgcgctgaaggtgctggggtcctatccgaaagcggtactttaactgcggcttccaggctgcaggttgcaggcgacaggcgagcggcttgtgcctgcggcttgaagcctgcagcctgaggcctttttatgagttgtgatttcctcgccctggctcagccaggagtgcaaaaactgtcgccctacgtgccgggcaagccggtagacgaactggcgcgtgagctcgacctcgatccggcaacgatcgtcaaactggcgagcaatgaaaaccccctgggtcccagccctaaagccatcgaggcgatcagggcgcaactcgacgagctgacgcgctatcccgacggcaatggtttcgtactcaagcagaagctggccgaacgatatggcgtcggtatcgaccaggtgacgctcggcaacggctccaacgacatcctcgaactggtcgcgcgcgcctacctcgcacccggtttgaacgccgttttcagtgagcatgcctttgcggtctacccgatcgcgacgcaggccgtgggcgcgcaggccaaggctgttccggcccggcaatggggccacgatctaaacgccatgctggcggcgatcgatgccaatacccgcgtcgtcttccttgccaaccctaacaaccccaccggcacctggtttggtgctgatgcgctgagcagctttctgagctgcgttcccgagcatgtgctggttgtgctcgacgaggcttacatcgagtatgccgagggtagcgacctgcccgatggtatggcgttcctggcggcgcatcccaacctgctggtatcgagaaccttctccaaggcgtatgggttggcggcgttgcgtgtcggctatgcggtctgttcggcacagatcgccgatgtactcaatcgtgtgcgccagccgttcaacgtcaacgcgctcgcgcaggcagccgcctgcgcagcgctcgacgaccatcgttttctgtctcagagcagggcctgcaacgcggccggcatgcttcagctggaggcaggcttcagtggattgggactggagtggatcccgtcgaaaggcaacttcatcgcggtcgatatgggccgtgacgccgcgccggtcaatcaggcattgctacgcgatggcgtcatcgtgcgaccggtcgcaggctacggcatgccgacctttttgcgggtctccatcgggaccgaagcggaaaacacccgctttctggacgccctgcgcaaggcgctcggacgttgagccgaaacgtcgaacagcactccgattcgccaatggtgcgccgtttggctgttatcggtctggggctgatcggaggctcgttcgccaaggggttgcgtgaaggccgccactgtgccgaagtcgtcggcttcgatctcgatccgcgctccagggaactggctgtcgagctcggagtggtggatcgctgtgctgacagcctcgaggaggcctgccggggcgcggacgtcattcagctggccgtgccgatcctggcgatggagcggttgttggctgagcttgcgtcactcgaccttggcgaagccgtgctgaccgatgtcggcagcgcgaagggcaacgtggtgcgtcgcagtcgtgaattgttcggcgcgatgccgccgcgcttcgtgccgggccatccgatagccggctcggaacagagtggcgtgacggctgcccaaagcacgctttttcgacggcacaaggtcattctgacaccgctggaggacaccgacccggctgcgctggcgctggtggatcggctgtggcgagcgttaggagccgatgtcgagcacatggatgtccagcatcatgacgaggtgctcgccgccaccagccatctgccgcacctgctggcattcggtctggtggactcgctggccaaacgcaacgagaatctcgagattttccgctacgcggcgggcggatttcgcgatttcacccgtatagcgggtagtgatccggtgatgtggcatgacatctttctcgctaatcgcgaggcggtgctgcagacgctggacgattttcgtgccgacctggacgcgcttcgcgccgcggtcgatgaaggagacgggcatacattgttgggcgtgttcacgcgcgccaaggctgcccgtgaacatttcagcaaaatactggctcgcagagcctatgtggacgttatgcattccaaagatctgatcttcctcgccaaccccggcggcagcctcagcggtcaactgcgtgtgcccggtgacaaatccatttcccatcgttcgatcatgctcggctcgctcgccgaaggcaccaccgaagtggaggggtttctcgaaggcgaggacgccctggcgaccattcaggctttccgcgacatgggtgtggtcatcgaagggccgaatcagggacgcgtcactgttcacggcgtcggtctgcatggcctcaaaccaccgccaggcccgatctatctcggcaactcgggcacctcgatgcggctgttggcaggcctgctggctgcacagccattcgacaccacgctgaccggcgatacctcgctgtccaagcggccgatgaatcgtgtcgccaagcccttgcgcgtcatgggcgccgtgatcgagacggctgccgaaggccgtccgccgctgaccattcgtggcggccagaagctgtcgggcatgcattacgagatgcccatggccagcgcccaggtcaagtcctgcctgctgttggcgggtttgtatgccgctgagaagacgtcggtcaccgagccggctccgacgcgcgatcacaccgagcggatgctgcagggcttcggctacccggtgcaggtggagggcaacactgcaactgtcgaatcgggccacgcgctgcgctccactcagatcgaagtgcctgccgacatctcctcctcggcgttcttcatggtcgccgccagcatcgcgccgggttcggacatcacgcttgaacatgttggcgtaaacccaacgcgcaccggcgtcatcgacattctgaaactgatgggcgccaatatcgaattgagcaaccagcgtgaggtcggtggcgagccggttgccgatatccgtgtgcgcgcagcatcgctgcggggtatcgatattcccgaagacttagtgccgttggcgatcgatgagtttcctgtgctgttcgtggccgccgcctgcgccgaggggcgcaccaccttgcgaggtgccgaggagttgcgggtcaaggagtccgatcgcatccaggtgatggccgatggtctgcaggccctgggcgtgaaggccacgccgacgccggatgggattatcatcgagggcggcaacgccatcggtggtggcgaagtctgggcgcatggagatcatcggatcgcgatgtctttcagtgtcgctgcgcttcgtgccagtgcaccgatccgcattcatgattgcgccaacgtggcgacctcgttcccgaacttccttgcgctggccgagcgcgccggaatgcgcgtgggtgtggagggtaactcatgaacagagatgtcccggtcatcaccatcgatggcccgagcggctccggcaagggcacggtcgcggcgctgctggcggcgaaattgggatggaattttctcgattccggcgcgctgtaccgcctgctggccttcgcggcccgtaaccacggtgtggatctgaccaacgaagaagcgctgaagctgctggccgcgcatctcgatgtgcagttcggcgccgccaaggatggccatggcatgcagatcattctcgaaggagaagaagtcaccagcgccattcgcaacgagcaggtgggtgctggcgcttcccaggtcgccgcgctgccggccgtgcgcgatgcgctactgcagcggcaaaaggcgtttcgcgaaccgcccggccttgtcgccgatggccgtgatatgggaacggtggtatttcccgatgcaccgctgaaaatatttctgactgccagcgccgaggaaagagcgcggcgtcgttacctgcagttgaagggcaagggcgatgatgttaatctcgcgagtcttctcgatgagatacgggcgcgcgatgagcgtgatacccagcgtgaagtggctccgctgaagccggcagacgatgcggttcagctcgattccaccgatctctcgatcgagcaggtgctaggacagattctgagcgaggtcgccaagcgcgattttgcctgaagggcgaccgccgagaggcgggctgacggttcctcgatatcgagggctgttaacaaggaggcatgtgggagaccagatctagtcccacaggcctttttttatatgaatgaacccacttctatctgggatgtggagattgggcggatcctcgcccgaaaacagcaggaataaacatgagcgaaagctttgcagaactttttgaagaaagcctgaaaaccctcgacatgcagccgggtgcgatcatcaccggcatcgtggtcgacatcgacggtgactgggtcactgttcatgccggtctgaagtccgagggcgtcatcccggtcgagcagttctacaacgagcagggcgagctgaccatcagcgtgggtgacgaagttcacgttgcgctggacgcggttgaagatggcttcggtgaaaccaagctgtcccgcgaaaaagccaagcgtgcagagtgctggattgttctggaagcggctttcgcagctgaggaagtggtcaagggcgttatcaacggtaaggttaagggcggcttcactgtcgacgttaacggcatccgtgcgttcctgccaggttccctggttgatgtccgtccagtgcgtgataccactcatctggaaggcaaggaactcgagttcaaggtcatcaagctcgaccagaagcgcaacaacgttgtcgtttcccgtcgtagcgtcctggaagccgagaacagcgccgagcgcgaagcgctgctggaatcgctgcaggaaggccagcaggtcaagggtatcgtcaagaacctcaccgactacggcgccttcgtcgacctgggtggcgtggacggcctgctgcacatcaccgacatggcctggaagcgcatcaagcatccgtcggaaatcgtcaatgttggcgacgagatcgacgtcaaggtgctgaagttcgaccgcgagcgtaaccgcgtatccctgggtctgaagcaactgggtgaagacccatgggttgccatcaaggctcgttacccggaaaatacccgcgtcatggcccgcgttaccaacctcaccgactacggctgcttcgccgagctggaagagggcgtcgaaggtctggtgcacgtttccgaaatggactggaccaacaagaacatccatccgtcgaaggtcgtacaggtcggcgacgaagtggaagtcatggttctggacatcgacgaagagcgtcgtcgtatctccctgggcatcaagcagtgcaagtccaacccatgggaagacttctctggccagttcaacaagggcgaccgcatctctggcaccatcaagtcgatcaccgatttcggtatcttcattggtctggacggcggcatcgacggtctggttcacctgtccgacatctcctggaacgaagctggcgaagaagccgtgcgtcgcttcaagaagggcgacgagctggacaccgtcatcctgtcggtcgatccggagcgtgagcgcatctccctgggcatcaagcagctggaagacgatccgttctccaactacgccgccgtcaatgacaagggcagcatcgttcgcggtaccgtgaaagaagttgacgccaagggcgccatcatcgatctgggcaacgatatcgaagctacgctgaaagcctccgaaatcagccgtgaccgcgttgaagacgcgcgtaacgtcctgaaggaaggcgaagaagtcgaagccaagatcatcagcatcgaccgtaagagccgcgtcatcagcctgtccatcaagtcgaaagacgtcgaggacgagaaggacgcgatgaaggaactgcgtaccaagcaggacgtagaaccggctgccggtccgaccaccatcggtgatctgatccgcgcgcaaatggaaaaccagaactaagttctgcaatccagaaaaagggcgacttcggtcgcccttttttgtgcctgtgtttcgggtggctgagctgctagagcctcgcatgcgaggagttaggtcgctatctggctgatgcaggtcggctttctgtctcgtacaaaaattgggccgctaattgctccttccgttcagcgtttgtccgatcagttgcgtgcggcgttggttgcaagcgtctgattcacggccagccagccagcaacggcatcatcccctgcctgtatgaaggcccgctcgagcaaccgtacttgctcgcgtcgcagcgcctgctccagcttggcgccttcgggggtgaagcgcagcatgcgcttgcgcttgtcgtccttggccgtccggctttccaccagatgcatctcgataagctgccgcagcggcgtgttcagcgcctgcttgctgacgccgagatgggcgagtagctccttgacgctcaggtccgggtagctggcgatgaagaacaggatgcggtgatgcacgcgagacaggccccggcgggccagcatctcgtccggcttggcggtgaacgcctgatagccgtggaagaagttctccatgatctgtcgctgcactgtgcttttttttaggtcatgcatattgacgtattcgctggcgagggcgtaatttcggtcaaagagtttgacccatttttttccttattgcacccggtgtcccaatggccttctccgaacgcgtcgaccgcctcaaaagctcactgatccgagaaatactcgccgctgcgcagaagcccgaggtgatgtcgtttgccggcggattgccggccgagtcgatgttgccgaaggtcgagtgggctgaaatgcctgccagcatggggcagtacggcatgagcgaaggggagccggcgttgcgcgaagccatcgcggccgaagcgcgtgcgctcggggtcgattgttcggccagccaggtaatgattgtcagcgggtcccagcaaaccctcgatctggcgtccaagttgtttatcgatcgcgggacggaggtgctgctcgaagcgccgacctatctggctgcgctgcaagcgtttcagctgttcggagccgactgccttgccgcgccccaggacgcggatggtccatcgctagccgccttgcgtctgcggctggagcagcacaagccggcttttgcgtaccttattccaacctttcagaatccgtctggcacccgttatagcgaagagaagcgcgatgccgttgccatgctgctcgatgagttcgacgtgaccttgatcgaggacgagccctatcgtgacctggttttcgatgagagcagcgcccagccaatcgtcagccggatgcgcaaagccagctggatctataccggtacagtctccaagacactattgccggggctgcgggtcggttatctgatcgcgactcccgatctgttcccttatctgctgcgactgaagcaatcggccgacctgcacaccaaccgcgtcggccagtggcaggcgctgcagtggctgggcagtgggcagtaccattcgcacctgagcgagctgcgccgattctatcgtctgcgtcgagatgcgatgcaggcggccttgctggagcatttcggcgatctggccgattggcagctcccgcagggagggctgttcttctggttgcggctgaagcagccagtggatacgcgaacgctgcttcagccagcgctggcgcaggacgtcgccttcatgccgggcgagccgttcttcgtcgatccggagcgaaaccctggatatctgcggctcaatttcagccacgttgcaccggatcgtttggatgaaggtgtgcgccggctggctaacgtggtccgtgatgccgttgtagccgacgcggcctagacggcggctggcgcttgcgtgcccaggagggaggtgatggtgtacaaggtctatggcgattaccgttccggcaattgctacaaggtaaagctgatgctgcatctgctcggtcgggaatatgagtggataccggtggatatccttcgtggtgagagccgcgaggaagcctttctgaagaagaatcccaacggcaagattcccgtcctcgagctggaagatggcacctgtctgtgggaatcgaacgcgatcctcaattttctcgcagagggatccccgttcctgccagcggagccgcggctacgcactcaggtgctgcagtggcagttcttcgagcagtacagccatgagccattcatagccgtggcgcggttcatcaaggtttaccttggcttgccggatgatcgtctggacgaatacgcggccaagcagctcgacggctatcacgccctggatgtgatggagcagcagctgctgcgcacaccctatctggtcggcgatcggtattcgattgcggatgtggcgctatatgcctatacgcatgtcgccgaagagggcggttttaggctgaacgattatccggctatctgcgcctggctgctgcgtgtcgccagtcaccctgggcatgtaggcatgttcggttaggcgcatgtagcgggaagggcggcgaacaaagaccggagagcagccgctgtgctgcctctccggccgttcgagttacttgaccaagccgagaaactcgctgcgggtggcggcgttttcgcggaactggcccagcatgaccgaggtgaccatcgaggagttctgcttctccacgccacgcatcatcatgcacatgtgctgggcttcgatgacgaccgctacaccccaggcgcccgtgacggtttgaatcgcctcggcgatttcacgtgtgaggttctcctgaatctgcaggcgacgggcgtacatctcgacgatccgcgcgaccttcgatagccccaataccttgccgttgggtaggtaagcgacgtgagccttgccgatgaaagggagcatgtgatgctcacacagcgaatacagctcgatattcttcaccagcaccatttcgctgttgtcggagctaaacagcgcgccgttggtgacttcctcgagcgtctgctgatagcccttgcacaggtactgcatggctttggccgcgcgcttgggcgtgtcgagcaggccctcgcggttgacgtcctcgcccaactggccaaggatcgcggtgtaatgagtttccagggacatgtgactacctgtcaggcttgcgaaatagcgcgaatgcgaaggttaggggctcggccgctgggctgcaagcggcatgcgccagaatccagcggaacggcgcgaccggtgtgccggttactcgtcccggccttcgagcatggttcgtttgagcatcacatagacggcgccggtaccgccatgtttcggaaggcacgaggtgaaaccgagcacttgggggtgttgccgtagccaggtgttgacgtggcttttgatgagtggccgcttgccatcgattcgtgccgccttgccgtgggttacgcgcacgcagcgaatctcgaacttgcaggcctcggcaaggaaatcccagagcagctcgcgggccttctcgacgctcagcccatgaagatccaggctgccttcgaaggagatctggccgcctttcagcttccgcatctggctatcctggacgccgtcgcgtacccaatacagttcatcttccgctgcaacgtcgatgacgaactgatcggaaagcccatcgatgcgggtttcgccgtcacggatcacggcattggctcgccgtgtcgctatctgtgccttgttgctgcggggtttaccggtatcggcgcgatcgtgctcgatcggcttgacgccgcgtacggcggatttgaacagtgaaaagtcatcgtcttgcatgaggcctcccgcatttgacggcgattttatcccaaagcatttagcgggagtttgtccgtgcgccgagagcaacgatgctgcgctcaacgtttccctttcaggcgaggcgacatgctcaagcctgcaggtccacgcaggcggcgcttcactcgacgtctgatgagcatacccagcgccagcaaaaccaggcccagcaccaatagcgtgattgccgcttcgcgatcgagcgccacatcgaccacccactcatggtgactgaacaatgcggcagcaccagagccggccagcaggatgccggccaggatcaacagcaggccgaatgccgaggccagccgtgatccccagctgcgcggctgacgagggcgaaggcggcgtgcatcgaatccatcggttcgtttcatggcggttacctcgtcagaacaggctgaggccgggctttccggccaggttcattcagtgtcaggtaacgctgtattgctatgagcgcttattccagcgctgcggcatcggctacacaaacggcgaagttgtccgcgaggatggtcatctccatgcgatgcacctgtgccgcctcgattgcaccgtcccccatcggtaggtcgcgagtggcacaagccttgtccaccagggtgcagcgatatccatagtcctttgccgcacgcactgtggtgctcacgctggaatgggtcatgaagccgcagacgatcagatcgaggcggccatgctgctgcagcagttcgtgcagctcggtaccggcgaatgcgttgggaagggtcttgccgatcaccgtttcgcctgcgagcggcgctgcttccggcatgatctgcccacgcagcccctgtgggtcgaacaaacctcctggaatccccaaatgatgcacgtggacgacaggcgcgccggccgcgcgtgcagcggtcaataccttgctgatttcctccagcgcggagttcaggttcggcagtgcaagggtgcccgtccgatattcttcctgaacatcaatgaccacaagggtcgcgttagccaaagtcgccggtgcataactgcggccactgagctgaagcatggtctgtggcttggacatgactgactccttgttttgaggggggcatgattgtggcgccagatgaccaatatgtgaactgcccagggtgatgaattagcgatctgaattgcagctatcaggctataagccatcacagacgaagcgtattcgccaggaaagtcaggacgccatcggctaaacttccgcgcttttgacaggagatgccgccgtgaccgcttcgccttcccgcctgcgtaccttgcgtgactatattcggtgggccgtcagccgcttccaagccgagcaactgttcttcggccacggtacggacaatgcctgggacgaggcgcgccagctggtgctcggcgctttgcacctgccttgggaaatggctgacgcctacctggattgccggctggaagacgatgaatgcgagcgcctgcagcagttgctgcgccgacgcatcgagcagcgagtgcccacggcctatttgcttgggcaggcgtggttctgcgggctgccgttcatcgtcgatgagcgcgtgctgataccgcgttcgccgatcggccagctgatcgagcgtcgtttccagccctggctggcacagtctccggcgcgaattctcgatctgtgcaccggatccggctgtatagggatcgcctgcgcctatgagtttctcgaggccgaggtggtgctggccgatctgtccttcgaggcgctcgaagtggccaaccgcaacattgaacaccatggcctggaggagcgggtctacaccgtgcagagcgatggcttcgacgggctgccgaagcaacgcttcgatctgatcgtatccaacccgccgtacgtggacgccgaagatttcgctgacatgccggacgaataccatcatgagccggccatggggctggcctgtggcgatgacggcctggaccttgtacggcgtatgctggccgaggcggctgatcatcttagcgaaagtggtgcgctgatcgtcgaggttggtaacagccaggtgcacgtggaggcgctctatcccgaggtggacttcacctggctggagttctccgagggcggccacggggtgtttctgctcgccgccagccaatgtcgtgagcatcaggcattgttccgtgagcggctgaaacgggcctgagcaacggcccggacggcatcgtgctgatcagcgggtcgcgatccagatgagcagacccgcctgaaacagggcgaaggcgaccaggcaggcgatcgtgaatctgagggtgccgtcttcgcgtcgaagtcggctcaaccggtcctggatgtcgcggatgcggttttcctgctcaagcagattacgatccgcctgctcaagcatcgctgccgcgtccttgagttcgatgatctgtactttctcgagattccagtcgggccgcagggcgctgacgcggggcgcgctataggtcgccttgagctgttgcggctcggggtagagcacatcgaagccttggctcagcaggcagtgatcacgccgcaagcgcatatcttcgccggttatgtcctttgccggcagcgcgccgccctctaccaggtagtgtgcccagcgtttctgcgcccagagagcgccttgcgccagcaggaaacgcccgaggcctcggttggcaggctcgatatgcaagccggtgtccgggccgaaacgcagctctttggcgcgatgatcagcccatatttccagcacgttctgcttcttggacaacacctggcccgggagccgaacgaacaacttcagcaggctccgttggggggtgtgtcgttcgacctgcgccagttcgacgaaccgcagcggccgcgggccggtatcccgatcggtcggcagtggggccaggcgcagtaggcgaaaacgatccggagcgagggtcgcccaagggtctgcctgcgcagtcgcgggcgcttgaggctcattgtcgttggttgatgctgggctgtcggtcatgctggcgtccagggcctgccgggttggatcggtggtaggcaaggaacgtatcggccgacgggcggctaactggatggtggcaatatgccgtgtcggcgcaagaactggctgatccgttccgtcagcgcatgggcgatcgggagctcgggctgattgtaggaggcggtctggcggtcgtgattcatcgcaacgatgcgcagcacgtgattcatccccggtatcagcgccagctcggcatccgctcgggcgcgctgtagcgcctcggcatcctcgggctcgacctggatatcgtgggtgccttgaatgatcagggcaggtgcgcgggtcttggcaaaggcgctcgccggatcctgctcgaacaatgagatcagatagggctgtacgcttgggcggaacaacaccttcaacggctccggtacctgctcatgagtcctgcccgccttgagttcatcgatcaggtaatgggcggtcgccagcaagggtgggggcaggcggccctggagttgctcacgcagcaacaggtcgatggggcggccgctgccggcgatgctgatcagggcggccggtgccacgctcggcgcggcgaggctggcaatcagtgcgccctcgctgtggccgatcaggattacgttggaaaggcgcgggtccgcttgcagcagtcgcgcccaggcgacggcatcggcgacatagccgtccacgctcaactggcgttcgtccggcgctgcggcacggctttgcccgaccccgcgcttgtcgtaccgcaggctggcgactccgtgcttggcaagcgcctgcgccagccgcttgaggctatcgttacgccccatgggattattgccgtctcggtcggtggggcccgagccgggaatcagcagggcgaccggcagtgcccggtcagccttcggaagcagcaggctgccgtacaggcggccttcgggaacctggacggtcatcgtctggttcagcagcgtcgtggcctgtacgtgggatgcgagcatggcgagcagggtaaccagcaaaaggaaacgcattggcagggttcaatcactgacgaagcgggtttgatacgaggcgggccgtttggttcggcatactcgagtatgcgccgtcaccgaagacagtgaaacctgcggccgctcgggtatacttccggccccttgtttaggtcgatcgcggagcgccctgcatgtccggcaacacatacggcaagctgttcaccgtcaccaccgctggtgaaagccatggtccggcgctggtcgccatcgtcgacggttgcccgccggggctggaactgaccgctgctgacctgcaacgggacctcgatcggcgcaagccgggcaccagccggcataccacccagcgccaggagccagacgaggtggagattctttccggcgtgttcgagggacgtaccaccggctgcccgatcggcctgctgatacgcaacaccgaccagaaatccaaggactattcggcgatcaaggacctgtttcgtcctgctcacgccgactacagctatcaccacaaatatggcctgcgcgattaccgcggcggcggccgtagctcggcccgtgagaccgccatgcgcgttgccgcgggtgccatcgccaagaagtacctggcgaccctgggcatacaggtgcgtggctacatgagtcagctggggccgatcgagattccgttcaagacctgggacagcgtcgagcagaacgcctttttcagccccgatccggacaaggtgccggagctggaagcctacatggaccagctgcgccgcgatcaggattcggttggggcgaagatcaccgtaatcgctgacggcgtgccgcctggccttggcgagccgatcttcgaccgtctggacgccgagctggcgcatgcgctgatgagcatcaacgcggtcaagggtgtggagataggcgccggtttcgcctgcgtcgcgcaacgcggcaccgagcaccgggacgagatgaccccgacgggcttcgtctcgaacaatgccggcggtgtgcttggcggaatttcctccggtcagccgctcatcgcgcatctggcgctcaagccgacatccagcattaccacgccgggccgctcgatcgatgtcgacggcaatccggtcgaggtgatcaccaaaggccgtcacgacccctgtgtcggcatccgtgccacaccaatcgccgaagcgatgatggcgatcgttctgctggatcatctgctgcgtcatcgagggcagaatgccgacgtgctggtggcaacaccggtgttgtggcagatctgagcctgaagctggaggacgagcaacgcgcccgcgccgtatcgcatggctttgcttccagctcatgacgtctagcctatgactgcttcgcttccatactggcgcctgtccggcttctattttttctatttcgcgctgctaggttccgctgcaccctttcttggcctttacttcgatcacctcggtttctctgcggcacgcatcggtgagctggtcgccattcccatgctgatgcgctgtgtggcgcctaatctttggggctggcttggcgatgcgaccgggcagcgcctgatgatcgtgcgtctcggcgcggtctgtaccttgctttccttcggcttgatcttctacggcaagagctatgcctggctggcgctggtgatggcgttacacgcgttcttctggcacgcggtgctgccccagttcgaggtgatcaccctggcgcatctgcgcgagcaggcgtcacgctatagtcagatccggctgtggggcagcatcggtttcatcgtggcggtggtggggctcggtgcgctgttcgaacgtctggggctggatgtctatccggtggcggtgatggcggtcatggttggaatcgtgatcagcagtatctgggtgcctgacgcagtgccggagcagcggccggagctggacgggcagggcggttttctccggcagctgtgccgtcctggcgtgctggcgttcttcgtcagcgtcggcctgatgcaagtcagtcatggtccgtactacacgtttttctcgatccacctcgaagcgctcggctatggccgcagcacgatcggaatgctctgggcgctgggggtggtcgccgaaatcctgctgtttctggtgatggctgcactgttggcgcgtttctccctgcgccaggtattgctagcgagcttcgcactggcggcgattcgctggctgttgctgggcacgttggccgatcacctgggcgtgctgctcgtcgcgcaactgatgcatgcagccaccttcggcagttttcatgcggcagccattcatttcgtccagcgcagtttcggtcaccgacagcagggccaggggcaggcgttgtatgcgacccttgctggtatcggcggcgcgctgggggcgctttattccggttacagctgggccagcctcgggccgttgtggaccttcgccatcgccagcctggcagcgctggccgcagccgttatcattgccatcccccagcaggagaaccgggcatgacagccactcgtgaacatttgtcgcaggccatcatcgatgccgggcgttttctctacggccgcggctggtcaccggccaccagcagcaactactcggcccgcctgagcagcgccgaggcgctgctgacggtgtcgggcaagcataaggggcaactgaccccggatgatctgctggccgtagacatggacgggcgcagcctggaggatggcaagaagccgtcggccgaaacactgctgcacacccagctgtatcgctggcggccggagatcggtgcggtgttgcacacccattcggtcaatgccaccgtgctttctcgcctgtgcctgagcgactcgctggtgttcgccgactacgagctgcagaaggccttcagcggtgtcgcgactcacgaatcgcaggtcaccgtgccgatcttcgacaacgatcaggacatcgagcggctggcctcacgtgttcagccctggctggaccggcatcccgattgcgtcggctatctgatccgcgggcacgggctctacacctggggtgcgcagatgcgcgatgcgctacgccagatcgaggcgttcgaattcctcttcgaatgcgagctgaagatgcgcatgctgcagcggtcatgaccgagcatcgcttccaacgcacgttacgcatgttgccgaaccattgacgagaagccgggccgagcgtcccggctggagaccacactatgagcatcctcagcgtttatcaggacagcgtccccgagcagccactcaaggtgctgacgcacatcgacgacatcgccgccacactggccgaggtcggcgtgcatctcgagcgctgggaagccagcgcgccgattggcgcgggagccagttcggaggaggtgattgcagcctatcgaccacagatcgaccggctgatgagcgagcgcggttatgtcaccgtcgatgtgatcagcctgaccagcgatcatccgcagaaggccgaattgcgggccaagttcctcgaagagcatcgccatgccgaggacgaggttcgcttcttcgtcgccggccgcggcctgttcacgctgcatatcgaggacaaggtgtacgcggtgctctgcgagaagaatgacctgatttcggtgccggcaggtaccaggcactggttcgacatgggtgagcatccccacttcgtcgccattcgcctgttcaacaacccggagggctgggttgcgcagttcaccggcgaggatatcgccggacgctttccacgcctggaggattgaagatgccgatcaaagccattctgaccgacatcgaaggcaccaccagcgcggtgagcttcgtcttcgacgtgttgtttccatatgcccgcgagcaccttcctgcgtatgtgcgcaatcatgcggagcagccgtcggtcgcggctcagatcgaggcggtacgtcgggaaagcggcgagttggatgccagcaccgagcgcgtcgcggcgatcttgttggagtggatcgcggccgatcgcaaagccacgccgttaaaagcgctgcaaggcatggtgtgggcagaaggctaccgtgcgggtgagctcaaggggcatgtctatcccgatgcggttcgcgcgctgcgccgctggcacgagcaaggctacgcgttgtatgtctattcatcgggatccgttcaggcccagaaactgatcttcggctgcgccgaggtgggcgatctgacgccgctgttctccgggtatttcgataccggtagcggccacaaacgcgaagtggattcgtatgtgcgcatcgccgccgcgatcggcttgccgcccgatgagatcctgtttctctccgatgtggtggacgagctggacgccgcgcgcctggccgggatgcacacctgcggcctggctcgcgagggcgacacgctgccaggtcaccaggtggtggacagcttcgatatgatcgatccggcccgtttctgacgccccggccgggctggcagtgaaccctcataccgcccaggcatcctaattacgaacccaccgtaatttggagttttgccatgaccgatgcctttggcggtattttcggcctgcttatcctggcactggatatctgggccatcgtcagcgtgctccgtagcgacagcacaacgggcaagaaagccctctgggtgctgctgattgtcatcctgccggttctcggactgatcatctgggggatcatggggccgcgcggtaaccgtcctgacgaccgcaacctgaggccttgacgcgtggcgacctggagtacgctgctggccctgatcgtgctggtggtcgatgtgattgccatcgttcaggtctggcgcacgcgtatcgagatcggccgcaaaatcatctggagcctcgtcatcgtgctgttgccggtggtgggtttgatgatgtggttcattgcggccgggcacctcggcaaggtccgtttgtgaatcgcgcgcggcacgcaaggcgctcaggctgcgcgcggtcgcgccttgattgagaggcgcataccgcgattttttcagatctggttaagggtttggcttcggtccgtagctcccgtcctgtctggttcggacagccattcaacagtccagaagagctcgactttgcgtcactccgccgagggctgcgtccggctcgtcacgatggggctggcgcccgttcgcatcgtcttgattgccttctgcttcgttaacgccaatgcgttttcatagtccgcccaaatgtgcacggcagcataagctcgccgaggtcgccaggcctctgcgcgcaccagcaactgtctggcagtgatgccctggcttccccagagtggtgctttcagcaggccaagatcggcggcgggaaacgcatctgcatcgccgaacccacgcaggacgatgtactcggcggtccagggaccgattccgggcagttcgcagagccgaccaatgagcgcgtcgacgccatcgtcgatctgcaaggtcagggtgccatccgccaccgcagccgcgaggcgttgcagcgtcgcgacgcgcttgcccggcatgccgatgctgtccagccgggcttcggcaatggcctgcgggctgggaaacagtttgagcaggccgctcgcgcggtcggacaaatcctgtggtagttccgtgccaaggcgttccaccagccgccgggttatggtgaccgcagccttgaccgtaacctgctggccgacgattgcccgcacggcttgctcgaacgggtcgaaggcgctgggcaagcgtaagccggggttcgcgcggactaacgggccgagcagaaggtcatcggcgaaatgccgtgtcgtggcagcgggatccgcatccaggtcgaacatcctgcgaacccgcgcggtcaacgcagcagcgtgaccctgtagcgaatcgctgagggtgagcgcgagagccgtctcgtccgctagcggctggacactgaaccagccgacatcggcgcccatccgtaccgtgcggctatagcgcatgggctcgagcgcctcgatgccgggaagcaggcgcagtgcgaaatgctcgtgaaactgcgaccagttccacggtgccaggtaggggagatgaatgggcgtcatgacgtgacgatagctgccattgataggcgcgtcttcaccggatgcgctttcaaagcagatggttccaacctgtcatgggaccaaagtagaatgcgactctttgccaaacgggcgtgcgctgaccgtgcgccgcgtgtctgttacgccatccatcagggagacaccccatgagcgattatcaggaaactctctacgagggatacggccagcgcttcagtatcgacaaaatgctgcatgaggtgcgcaccgagcatcagcatctggtcatcttcgaaaatgcccgcatgggccgcgtcatggcactcgacggggtgattcaaaccaccgaggcggacgaattcatctatcacgagatgcttacccacgttccgattctcgcccacggcctggcgcggcgcgtgctgatcatcggtggcggcgacggtggcatgttgcgcgaggtcgccaaacatcgtgacgtcgaaagcatcaccatggtcgagatcgacggcaccgtggtggagatgtgcaaagagttcctgcccgagcattcgaagggcgccttcgatgacccgcgactgaatctggtgatcgacgatggcatgcgcttcgtggcgaccaccgaagaaaaattcgacgtgatcatttccgactcgaccgatcccatcgggccgggcgaagtgcttttctccgagaatttctatcaggcgtgccgccgttgcctcaacgatggcgggattctggtcacccagaacggcaccccgttcatgcagttgaccgaggtgcagaccacggccaagcgcatggccggcctgtttcctgactggcatttctaccaggcggcggtgcctacctatatcggcggcgccatgacgttcgcctggggcgcatgtgattccgacagccgcaagctgtccctcgaaaccctgcaccagcggttcatcggaagtggcatcgtcactcgctactacaatccgcacatccatctcggcgcatttgcgctgccgcagtacgttttgcaggccatcaacaagcccagcaacggctaagctggttggtgcgcggccatggattggctgcgcccgagtccggcggctattgcagctagatgcgccattgcagtggcgactcgtacgccgtatgttcggaacgtgactgcgccgtccgagctgaaggaggcagcgatggtgatggacttcaatccaggactcatcgaactccctggtcgagcagtggcctattaagagaccgtaaggtttttccgcttcgtaattccggttaatggcaaaccaaggttggcgctgtccaaccgatccccgcaacgaggtagaacaaaggctttccattcctgaaaatcgtcatccatgggtgagaggaggttgttttatgagtaccaccttccatgaggatgtaagcagcaatgtgcttctaaggatgaaagagggcggtttcgatttcgcccgggtgcacccgatcgagttctacgcagtatttccagaccgtgagcgcgcctgcgctgctgccagcaattttcgtggcgagtcggtcaacacccagatagcgccgcgcgacgacggcgcctgggatctgcaggtcagcaaggtgatgtatgccacgttcgatggcataggcgatttcgagcaggacctggagaacctggtcgagccgttgggtggtgtagtggatggctggggcgtgacgcaggagctgtcgggctgcgccgtctgatcactgttccattgagttgaaacgaagtccgctttgcagtgcctggtcccatggcgggaccgggccgaagcggcgtttcagaaattccagcaacagccggctcctggagtcggcttcacgtgtcaggcgcaaggcgtagatgccgcttggttctggtgcgggcaagccctgttcgcagaatagcggcaacagctccccacgtagcaggtgctcgctgaccaaccaggtcggcagatgcgctatgcccaggccagctagcgcaccgcacaacagcgcctcggcattgttcgccaccatgcgcaggcgcttgggtcgcagcacctgtcgtctgccgccatgctcgaaacgccaggcatgttgcggtgccagcgcatcccaatccaacccgtcgtgagcgggcagatccgctaccgtccggggcatgcctcgttgctgcagatatcccgggctggcgcagacaatgcgcgtcatcggcgccaatggcgtggcgaccaggcgtgtgtcggccagcggaccgatacgtagaaccagatcgacctcgcccagatgttcaccttccagatcgacgaagctatcgatcagccgtagctgaatgtccactcccggataggcctgcaggaactcggacagcgcgggcgccaggtgcctgcgcccgaacggcgccggcgcatcgatgcggatgcgaccttccggtgcgctttgcaaagaggtgatttccacccgcgccagctgcagctcctgaacgatgcgcctggcgcgctcggcgaatacctggccggcggtggtcggcttgaccgaatgggtgttgcggctgaccagctggcaaccgagcgaacgttccagtgaatcgatacgccgcgcgacggcggagggggtcagggcatgcaggcgagccgccccggaaaagctcccgctatcgagcacgtcgagaaatagcctgaactgactggtcagggcattggcgtccatggttgtctttctgctttgctaaaaaggcaaagccattgtgcgcgcttgtgcatatgcctgctagaaggcgctgagtagcatggcgttttttcttggaacgcgatcatgggactcgtcgaattcgggctgaacgtggtattgggcctagtgctgggaacgcttggcgggttgttcggaatcggcggtgggctgatcgcgattccggtcctgggcgtactgttcgatctggatcaacaagtggcgcaaggcacggcgctggtaatggtggtgcccaatgtcatgctggctatctggcgttatcaccagcgtaaccgcatcgatcctcgccacgccgcagccttgggtgtcgccagtttctgcttcgccattgccggtgccgccgtggcggtctctctggacgccggacgcatgcgtgtcggtttcatcggttttctggtcgccctggccatctacacgctgtcacgcgtgttcatacggccacagcccggcgggaccgagctgcgccacccttggccgtggctgggcgtgttgggtgccggggcgggtgcattgggaggcttgttcggtgtcggcggcgcggtgctggccacgccggtgctgaccgctgtgttcggcacgtcccaggtcgtagcgcagggattgtccctgtcgctggcggcacccagcacggctgtcacgctggtcacctatgcaacccacggacaggtcgattgggcgttgggggtaccgctggccatcggcgggctgctgagcatcagtcttggggtgaagcttgcgcacgcgctaccggagcgtctgctgcgtcttctgttcagcggtttcctgctgctgagtgcggccatgctggcgctcgagatctgagcgccagctccctcatggccggctcatggcggcctgacccggctgccgacgaatttcacggcgggcgctacgcgccaggcggatggtcaagaggatagcggcgcaactcaggccggcgatcaggccttgccagagcccggctgggccgctcggttcgccaaacatatcggtgaggcccaacgcatagccgaccggcaggccgatcccccaataggcgaagagggtgaagatcatcgtcatgcgggtgtcctggtagccacgcagtgcacctgccgcggtcacctggaccacgtcggagaactggaacagcgcggcgtagaagaagaggctggcagcgacggcgatcactgccgggtcgggggtgtagatacgggcgatctgctcgctgaacagcagcatcgagcctgccgagaagcaggcgtagaccaggctggacacgattccgaccccggcggcgaagcgcgcatcgcgaggcgcaccacgtcctagcgcctggccgatccggatggtgattgccatgcccagcgacagggggatcatgaaaatcagcgaagtgaaattgagcgcgatctggtggccggccaccaccgtggcccccagcgcgccgatcaacagtgcgatgacggagaaaatgctggcctcggcaaacacggcgataccgatcggcacgccaaccgaaagtaggtgactcaggactgaccattgcggccagtcgaagcgagcaaagagctggctgggttggtaatactcggctcgccgtacccagaacagcatcgccagcagcatgaatcccatgaccagcgcagtagaccagccgcagccgacaccgcccatcgcaggcaggcccagcttgccgtagataaagatgtagttcagcggaatgttcagcgtcagcgcgagaatgcccaccaccatgctcggtcgggtatggccgagcccgtcgctgaaacagcgcaacacttgatatagagccacggcggggaacccgcaggcgaccgccctcagataggccatggtggggtcgatcagaaccggctcgacctgcaacaggtgcagcaccggctcggcattccacatcaggacggcgaacagcaagccaacgccaaaccccatccatagcgcctggcgcaccagcggaccgatctgttcgtattctgcgcggccaaagcgctgcgccacgttcggggtggtcgccaggatgatcccggtcaccagcaggaacaccggtacccagaccgaattgccgagggcgaccgcggcgagatcgtacgggccgacgcgtccagccatcagcgtatcgacgaagcccatggcggtgttcgccagctgggcgaccatcatcggcagggcaagggcgaagagggtgcgcagttcaacgcgaacccgtctgagtttcgactcagtgggcattgcaggtgtaccggattgtatacagaagcgcgctagtctacgccgcgaatgcgcctttcgggaaggcagcagagtggcgccgcccggtctagaatgggcccatcaatgacggagcccgctgatgcgaatccttgccgacgaaaacattccactggtcgacgccttttttgccgagcatggcgacattcgccgcatgccgggccgcagtatcaacagagcagtgctggagcaagccgaggtgctcctggttcgttcggttacccgggtcgatcgcgagttgctggagggaagtgcggtgcgcttcgttggcacctgcaccatcggcaccgaccatctggacatcgactatttcgacgaggtgggcatcgactgggcgagcgcgccgggatgcaacgcgcgtggcgtcgtcgactacgtgctcggcagcttgttggcgctggccgagggcgagggtgtggcgctgcacgaccgtcgttatggcgtgatcggtgccggagaagttggcggcaggctggtggaggtcctgcgtggcctggggtgggatgtgcgtgtctgcgatccaccgcgccaggcgcgcgaagtcggtgagtttgtcggcctggatgaaatactcgaagaatgcgatgtcattagcttgcatacaccgctgacgctggaaggcgagcattcgacattccatttgttggatggcgcccggctggcgcagttacgcccgggcgcctggttgatcaatgccgcccgcggtgcggtcgtcgacaatgccgccctgcgcgaacaactggcccgacggcctgacattcaggctgtgctcgacgtttgggaaggcgagccacaggtcgatgtcgagctggccgagctgtgctggatcgcaacgccgcacattgcgggctacagcctggacggcaagctgcgcgggacggcccagatctaccaggcgctctgtgccagcaagggcatcgaacccaaggtcgatctggctgagctgatgcctgccgcgccgctgcgcgggttggcgttcgatgcgtcggtcgatccggcagacatgctctcgaccatctgccgcgcggtctacgatcctcggcgcgacgacgccgcgttccggcgcagcctgggtggcgacgagggccagcgccgcgtcgacttcgatcagttgcgcaagcaatacccaccacgccgggaaatcgacagcttgcagatcgagatcagcgccgccgagccaaagctggaacggatcgtagacgccctcggtgcgaccttgaagcgctgaccgaacgatggagcgatgcgacggacgtcgggtgccggatgacaggctggatgcaatttccggcctgctccgctagcattacgcgtcctctgctttgtcccgcgatggtgttatgagttatcaggtactagcccgcaaatggcgtccgcgctcgttccgcgaaatggtcggccagacgcatgtgctcaaggccctgatcaatgcgctggacagccagcgtctgcaccacgcctatctgttcaccggtacgcgcggggttggcaagaccactatcgcgcgcatcattgccaagtgcctgaactgcgagaccggcatcagttcaacgccttgcggcgagtgctcggtctgccgcgagatcgacgagggccgtttcgtcgacctgatcgaggtcgatgccgcgagccgcaccaaggtcgaagatacccgcgaattactcgacaacgtgcagtacgcgcccagccgtggtcgctacaaggtttacctgatcgacgaagtgcacatgctgtcgtcgcactcgttcaacgcgctgctcaagaccctcgaagaaccgccaccccacgtcaagttcttgctggccacgaccgacccgcagaaactgccggtcaccattctttcgcgctgcttgcagttctcgctgaagaacatgccgcccgagcgcgtcgtcgagcacttgactcatgtgctcggcgtcgagcaggtgcctttcgaggaagatgccctctggttgctcggtcgcgccgctgacggctcgatgcgcgatgccatgagtctgacggaccaggctattgcgttcggcgagggcaaggtgctcgcggccgatgtacgcagcatgcttggcacgctcgatcatggtcaggtttacggtgtgctgcaggccctgctcgaaggtgacgcccgagcgctgctcgaggcggtgcgccacctcgctgaacaggggcccgactggggcggtgtgttggccgaaatgctcaacgtgttgcaccgtgtcgctgtcgcccaggcgttgccggacgcgatcgataacgggcagggcgaccgtgatcgagtgctggcgctggctcaggcgctgccggccgaggatgtacagttctattaccagatgggcctgatcgggcgtcgtgatttgccgttggcacctgatccgcgcagtggtttcgagatggtcttgttgcgcatgctcgcgttccgtcccgcagacgctgaagacgcaccgcgaacaccgctaaagcacttgggaatcagtccggccacgactgattccggaacgaccaaggtggccggtccagcaccgtcggctgcgccggttcgtgatgcgcaaacgccgcgtgcggtgccgccggccgctacgcccgcaccttcatcgcgtgagcagccggaccctatgccggcgacggttggcccgcgcgctgagccggagccagagcccgcgaggcaaagcatgcccgctgagccgcccgagcctgccggtccgagcttggagccgccggtcgtcgacgttccctggaatgaaccgcctgccacgcctcccgtcgcagtcgagggcgaggcgctggaacagcgaaccgcatccatcgccccccccgagcatgtggccacagtcgtagaggtgagcgagccggatgacgacgagccgccgctgaccgacgaggattacttcgaggtcgaaacccaggccgaggcgttcctcgatgggctggatgacctggcccccgagccgcaggctcctgccgagccgatgcctgcggtcgagcctgccactggtctggccgcagaatggcaagatatttatctgaagctggggctgggcgggctgacaggaagcatcgcggccaattgcacgctagtgtccgtcgagaatgatcgctggcttatgcacctggatccggcgcaaagtgcgctgttcaacgccactcaacatcggcgcttgaacgacgccttgaatcaatatcatggacgcaccctgcaactggacatcgagttgcaggcgccacagcaggaaactcccgcccaggctgcatctcggcgccgtggcgagcgccagcgggcggcagagcaatcgattcaagccgatccagtcgtgcagcaactgatgcaacagttcgccgccgtcattcgcgacggtactatcgaacccgtcgaacactccgaaagctgatccgaggtatttctcatgatgaaaggtggcatggccgggctgatgaagcaggcgcagcagatgcaggaaaagatgcagaagatgcaggaagagctagccaatgccgaagtcaccggccaatccggagccggcctggtgagcgtggtgatgaatggccgtcatgacgtcaaacgcgtcagcctggacgacagcctgatgcaggaagacaaggaaattcttgaggatctgatcgcagcagccatgaacgacgcggtgcggaagatcgagcagaacagcaaagaaaaaatggcggggatgaccgatggcatgcagctgccgccaggcttcaagatgccattctaaaaaagcgtcttgaagtctgcaggctgaagagagatgtcgacggccacgcattcgtgggaggcccgaccccggggcgaagcttttgaagcaccgaaccccgttactcgctgcgggaatgcctcccaagcatgggcgccacacgcgacccgctttgtgggaagccctacccggggcgaagctttttggtgaccgaacccgcgccactcgctaaggggcgcctccaaagcatgcgcggcacgcacggcccgctttgtgggaggccatacccggggcgaagcggacggaacccacgccactcgctaaaggggggacttccagagcatgcacggcacgcacggctcgctttttttgggaggcccggcctcggggcgaagcctttgagcaccgggcccgcaccgctcgccgcggatggcgcgcttcctaaacacgcgcgccacgcacggcctgctttcgcaggcgcatcgacctcgaaattgtcggtgtaccgaccactttcgctttatagaccttggcttccagccttactcctacatcgagaccctcatgagcttcagcccgctgattcgccaactcatagacgcgctgcgaattctgcccggagtcggccagaaaaccgcacaacgcatggctctgcagatgcttgagcgcgaccgtagtggtggtctccgcttggctcaggcgctcacccgggccatggaggaggtgggctactgtcgccagtgccgcacgttgagtgaggatgatctctgtccgcaatgcgccgacccacgccgggacgattcattgttgtgcatcgtgcagagccccgtggacgtgtttgctgtggagcagaccggctttcgtggacgctatttcgtgctcaaggggcatttgtctcccctcgatggccttggacccgaggccatcggtattcccgaactgctcgctcgcgtcgcggaaggcgagttccatgaggcgatattggcgaccaatcccaccgtcgaaggtgaggcgaccgcgcactatatcgcccagctgttgattcccaagggtttgacattaagccgtattgcccacggggtgccgctgggtggcgagctcgatctggtggacggtggcacgcttgctcacgcactggcagggcggaaaaccattactttgtaaccatgcctgcaaaggcttataacccgctgtttatgtcttatcactgctaagtagtgccgaactgcccgagcttcgtgtaaagttctaagccagattaggttaataaccaaaagaaattatatgcttccttttggttataacctgcatgctaagaacgcgaggtcgagatgaaggcgaaactctggctggttcccgctctgttgctgttgagcgcttttgcgcaagcacaggagaaactcaaggttggttatatccgtgtcatggacgatgcccaggcgatggtggcttacgagggcgagttctataaaaagcacggcctggatgtcgagctcgtcgagttcagttcggggaccgatctgatcaaggccatcatcggtggccagttggataccggtgttctcggcttcaccaacgcggtggcctgggcgtccaagggcgccgacctcaaggtcgtgggcggcgcgcagcagggttatcactccatagtcgcgcgcgaaggtaccggcatcgaaaaagtcgctgacctgaaaggcaagatcctcgcctcgcagaaagaaggcagcaccgctgacgcggtcctgcgtggcgtcaccttgaaggacgccgggctgtcgcccaacgatgtgaacatcatgggtaccagcccggcggtagcggtccagtccctcgtttcggggcgcaccgatgcagcgttcctcttcgaaccctatgaccgcattgcccagctcgtggcaccggtgaagcagatctatgagatcggcgaggtatggccgttcccctgcatggtggtgatcacgtccggggaaaccctggagaagcgcaaggacgtcgtctggaaatcgctggacgcccagcgcgacgcgatcgagttgctggaaaagcagccggccgaagccgccaagctaatcgccgactacttcatcgcagagccgacattgaagaccctcaaccgtggtgacctgccgcgtgaagtcgtcatcgaagaagccatcgccacccagacgttcagcgcgaaactggacagtgacgacctggcccgtatccagcaactggccgacatcctccaggacctcggctcactgaaaacccgtgacggcaagccgttcgacaccagcgcgattctcgacctgtcgtggcagcaatctcgcgaactctgacgcgaggtggttcgtccatacctgcccggccccagtgccgggcagtgtcattgaagcttgccgtaccggcagatccttaaggacctcaacgcgttatgcagctccggtttgaagcagtagacaagcacttcgggcagctcgaagtcatcaaagggtttagcggggagttcgcccagggcgaactggtcgctctggtgggcccctcgggttgtggaaagtcgacgttgctgcacctggtcgctgggctggagaacccgacggcgggccgcgtgcttgccgacggcacgccaattcccggcccaagcccgcgccgtacccttgtgttccaggaacatgcgttgtacccctggctttcgctgcaagccaacgtcgccatggcgctggagttacagggcgtcgccaaggccgaggcattcgaccaggccaaggcatggctcgcccgggtgagtctggacggcttcgagcagtactacccgcatcaggtctccggcggcatgcgtcagcgcactgcgctggcacgcgcattcatcgccaaaccggaagtgctgttgctcgatgagcctttcggcgcgctcgatgcactgacgcgcatggccttgcaggatgtactgcgcgaactgatcgacgagcatcaacccaccgttctgctggtgacccatgacgtcgatgaggcgttgtacctggctgatcacgtgctggtgttcagcgcgcggccagcacgggtgctgaaaaccttcaatttcacccattgcgagaaaagtcacgatctttccgaattcgcagcggaacggcgcgagattctgcgcttgctgggtatcaagacggaggtaggacactgatgagccagggacgacgtcttaccggtccgaaaaaatacctcgccgtggtactggcgatcctgttcattctgctgatctggcagatcgcggcttggagcctgcctgcgtttctgatgcccggcatccccgtcgtgttcgagcggctattgaccacggtccaggagccggcgtttcgcgagggactctacggcagcatgagccggctgggcagtggttacagctttgcactgctgttcggcatcggtttcggtctggtgggcggggtgctgttcttcttccgcgagatcctccgctcggccatcgtgatactgcagtcgatcccgtcgatcgcctgggtgccgctgtttctgatagtgatgggcttcggcaatctgccgatcgtcgtggtggttgcgctggcagcgttctttcccatggcattgtcggtgatgaacgcgacagaaagcgttcaaccggttcacgtctccgccgctcgggttatgggcgcctcgcgctggcaactgctgcgtcgggtctatctgccggccgtgatgcccgaattgatcaccggtgcgcagctggccttcggtaacgcctggcgggcgctgatctccgctgagatgctgatcggtttcggccagggcctgggccgctcgctggcgtactccggcgagatcgccgacatggtcggcgtcatgatgaacattctggtcatcgccatcctggcgacgatgatcgaccaggtggtgctggagaaattcaaacaacggatgctgcgctaccagtacgtctgagggcttttgtgaacgcacgtctgctgcggctgatactcctattgtcgatcccggctagcgcgctcggggcgccgctacaagctgtgctggtcgatggatatcgaccgctcagcgctgcagcggcggagtcgatggacgaagggttcgaagcggcgtggctgaaggtgctggccgacaggctggggcgcgacatagagctgacgaattcggcaacccaggctgatctgcgtatgggggaccttgcatcaggtgccgtctattacaccagcgaggtcgcagcgctcacttcaaccgaagcaggcccgaccgattgggcgcagctcgctgacaagccgttctgcgtcactggcgggcatccttatgccgccacggtggcttctcgcttcggcggtatcgcgcgcgcctacgacagcgcagcgcaggccctgatcggcttgaagctcggcgaatgccaggcggtagtcggtgatcagcgattgctgcgacagctcgccgagctgccggaatggcgtcgctataaccggctattgcctgcgctggaggacgttgcactgaccttgcgaatcgaagcgtcagacgcaacgctacagcagcggatcgagcaggtggtatccagtgatcagggacatcaggccatggccggtgtcacccaatactggatcgacgaagtcgcgtttcaggcctatgtgctggctgacacgctggattgccactgatgcggtaaaacgcgtcactcgccttcgatcagctgcgccaaggcttggcgcaacccgtccaccttgagcggggcgcggatgtggccacgcaaacgcccttgcgggtcaacgaccgccagattgccgctgtgactgacgctatagtcgccttcggtttcatgcgctgggatgaaaggcaggccaagcgccttggacagaacctgcagctgtgccagttcgcccgtccagcctttgaatcccgcgcggtaatgaccgagatagctgcgcaaggcttcgggcgtatcgcgcgcgggatcggcgctgaccagcaccagctgcagctgttcacggacgtttggtggcaattgccccagcagctgtcgcatgtcactcagtgtcgtagggcatacatccgggcaggcggtgaagccgaagaacaacaggtgccagcggccacgcaaggcttcggtcgtgaccgcctcgccctgttcatccaccaggcccacgctcggcagaggccgttcccgcggtagcagcaacaggttcgcctcgtcgagcaaggcgttgcgatcgagcgcgaacgacggcgaaccacaggccagcagcgccagcgcggcggcaccgatgatcattgcggtggtgcggcgcacgttagcgctcgttcagctcgaatgcggtcagggtaaaggtggggatgcccatgtcctgcagcttgcgcgatccgccgagctcgggcagatcgatgatggcggcggcctcatgaatctgcgcacccatccggcgcaccagctgagcggcggcaatcagggtgccgcccgtggctatcagatcgtccagcaacaggaccgaatcaccttcgcagaggctgtcggcgtgcacttcgagataggcttcgccgtactcggtgcagtacgaggccgccaagacgtcggcagggagtttgccttgcttgcggaagaggatcagcggtctgttcagctcgtaggcaatgatggagccgatgatgaagccgcgggcgtcaagtgcgccaacatggctgaaaccgctttcgacatagcgttggatcaggctgtccgccaccatgcgcagcgccttgggcgactgcaacaggggcgtgatgtcccgaaacaccacgcctggcttaggaaagtccggtaccgggcgtatcagcttcttgatggaaaattcgtcaaagatcattacgggctccagacgcctcaggcgtccatgtttccgcccgccagggcacaaagacgaatggaatcgaggatgcgcacttccttgccttcggcttccagcaggccgtttgcctggcagcgcgtgaatacgcgggacaccgtttcgacggccaggcccaggtagctgccgatttcattgcgcgacatgggaaggcggaactggttggcggaaaaccctcgtgcactgaagcgtgccgaaagattgaccaggaatgtcgcaatccgctcatcggcggtcttcttcgacaacagcatcatcatttgctgatcgtcacgaatctcgcggctcatgatgcgcatcaattgacgacgcaactgcggcaacagcacgcttagctcgtcgagacgctcgaacggaatttcacagaccgatgtcgtctcgagcgcctgggcagaaaccgggtaggtctcggtgtccatgccggacagcccgaccagttcactgggcaggtggaagccggtgatctgctcttcgccggcatcggtgacgctgaatgtccgcagagcgccggaacggatggcgaacaccgaactgaacgcatcgccctgacggaagagcatttcgcctttcttcagcgggcggccgcgcttgacgatgtcgtccagcgcttccatgtcctgcatattcaatgaaagcggtaagcacaggccggaaaggctgcagtccttgcaatgcgcttgcggctgcttgcggaccttgatcgactcggacattggcggttcctgaaaaaaccctacgggacgcgcaagattaactcaggcaggggccataggccaattggcgctagggtcgcaggcgacgcttgggctagatcgcgcggctcatgtaaggaacaggttgtggcggcaggtagtgatcgaactgcatgcagaccacattggccagcagacgcccggccggcagaatgcggatggcactgtcctcgagggcgatgagctcgtcagcggccatctgttcgagggcggaccagctgctttgaaagtaggttttgaagtcgattccatacagctcttctatttcaccgaagcgcagctcgaagtcgcagatcagcgcctggatgacgcgtcttctgatctggtcgtcctggttgcagcgcaagccgcgcaccgtgggcagttggccctggtcgagcgcttgctcgtattgggtcaggtcgctgctgttctgaacgtgcaggtcgccgatctggctgattgccgaaacgcccaggccgatcaggtcgcaatggccatgcgtggtatagccctgatagttgcgctgcagcgtgccgtcttcctgcgccatagccaactcgtcatcgggcattgcgaagttatccatgccgatatagcggtagccggcaccgcccagccgctttacggcgtgctgccgcatcgccagcaactggtcgtacgttggcagatcggccgcgttgattcgccgttgcgccatgtaacgctctggcgaatgcacgtagctggaaacggatacccggtccggctgcagtgcgatcaccgtctcgagcgttcgcgcgaaactgtcaggcgtctgcagcggcagcccgaagagtagatcgatgtctatcgtgcggaattgcagcgtccgggcggcctcgatgatcgtttgggtttgcctgagcgtctgtaaccgattgatcgagcgctgcacgtccgggtccaggtccggcaggccgatgctgacccggttgaagccaagctcgcgcagcaaccccatcgttggccagtccgcctcgcgtggatcgatctcgatgctgaagtcagcgtgatcgtcgtcctgaagatggaaatgcttgtgtagatacgtcatcagtcgacgcagctcgccgtgactgagaaaggtcggcgtgccgccgccgaaatgcagctgctcgaccacctgatcagcgcccagatggcaggcgatcagttcgatctccttctccagccgctccaggtagggcagtgcacggctgcgatcatcggtgaccaccttgttgcagcggcagtggtaacaggccttgatgcagaacggcagatggatatacagcgaaaggggccgactggcctgccggctgcgacgcagggcgtgcagcagatcgaaggatcccagcttgccgctgaattggagcggggtcgggtaggtcatgtatcgcggcgcaacctgatcgtaacgatggatcagatcggcatcccagcgaatggcgtcgagcatctcacgttctcggttgagtgcggtgaggggattctagggcgcacgccgctgcgcagacttgacctgtatcaagcgagtccgggccgacaggagatgccgggattagcggtatgcagcaggagatttattcgctcgattgtggtcgattagtcaaactagagttccgaatcgctcactcgcacaggagacactcatgcacgcccgccagcaagagatcgctgccgcactcaaggtctgcccaccctttgatggtccagccgctatacaggctgaaatcgaccggcgggtagccttcatccagtcgtgtttgcgcgactccggtatgaagacgctggttctcgggatcagcggtggcgtggactcgaccaccgcagggatgctcgcacagcgcgcggtcgaaggcatgcgtgccgcgggggagggtgatgattaccgcttcatcgcggtccgcctgccgtatcaggttcagcatgacgaagacgaggcgcagctggcggtcgatacgatcaagccggacgagtgccatacggtcaatatcggtgccgccgtgctggggctgtcgcgggcgaccgaggcgctcgaagcgctgacgccggagaagcgtgatttcgtgctcggcaacaccaaggcgcggatgcgcatggtggctcagtacacgatcgccaatgcgcgccaggggctggtgatcggcactgaccatgcggccgaagcggtgatgggttttttcaccaagttcggcgacggcgcctgtgacctcacgccgctggcggggctggtcaaatatcaggtccgtgagttggcggccgcgctaggcgcacccgagcaactggtcaagaaggtcccgaccgccgatctcgaggacctgtcgcccggcaagccggacgaagccgcgcatggcgtgacctaccagaacatcgatgcctttctgcagggccagccggtaccggacgaggcggcgcgcatcattatcgacacctacgacaaatcggcgcacaagcgccagctaccgaaagaaccttgagcgagagcgggcaggcggctggccgggggcgtattggcgtccgcctgcgcgcgggccttcaatggtgatgttgggtggccggctgcgattcggcggctgcgccaccatggcccatcaaccattgctggtgcgggccggggagcgtccacaagccgaaaaggattaccgtcacgccgcccgctatccgcacaccgcgcttgcgtagcaaggccatgagtcgttcagcggccaggccggtggccaggagcacgggccacgtgcccaggccgaaagccagcatcaacagcgcgctttccgtcgcactgccctggctcgccgcccatagcagggtgctgtagaccaggccgcaaggcagccaaccccagagcgcgccgagcaacagagcgcgaggcacgctcttgaccggcataaggcgactggcgaacggttgaatatggcgccacaagccgcggcctatggcctcgacacgcgtcaggccgctccaccagccagccagataaagccccatagagatcagcagcagcgcagcaacgatgcgcaaggccatggccgccgggctgttggctaccgcccatccggcaaggccgatgagcaggcccgcggcggcatagctgagcacccgccccaggttatacgccaccagcagacgtaagcgcttgccgcgctgctccgccgggatcgccatggtcagggcgcccatcaagccaccacacatgccgaggcagtggccgccccccagcaggccgagtaccagtgccgaaaccagcagtggcaggaggtcagccacgatcggatttctcctcatcgcgtccgtcggcctgttcgatgccggcgcgatgcttcgggtcttcctcgtcgaacaggatgctgtgcgccgggccatcgagatcgtcgtactgaccgctgtcgaccgcccagaagaatatccagatggccaacgcaacgagaatcacggcgacaggaatcagtatgtaaagcgcggccatggggcctccagtaacggtacggcagggatatcggaacaggcctatcctacgccaggctaggtcaactgtcggttgctgggcgtgcgggccaggcgcaaggcgttgagcaccaccaacagggagctggccgacatacccagcgccgcccagagcggtgtgacccagccgatggccgcgaacggcaggaccaagccgttatagagactcgcccaggccaggttctcgatgatgattcggcggctgcggcgcgctaccacgaaggcctgcgccaggctgtcgaggcgattgctgagcaggacggcatcggcgctcgtctttgccaggtcggtcgccgagcccatggccacgctgatatcggcggcggccagaaccggtgcgtcattgacgccgtcaccgagcatcagcacccggtgtccttcgtcttgcagccgctgtagatggttaagcttgtcggtcggcgtcataccaccgtgcgccgactcgatgccgagttgtcgcgcgatctcgccgaccattggcgaactgtcgccggacagcagcacggtcttccagccgcggcgcttgcaggcttgcagcagggcaggtgcgtcctcgcgcaaacggtcgctcagtaccagccacgccagcggctctcgtgagtcgcccagcaacagccactggccctcgtcgcctggaatggccggagcgctccctccatagccggccgcgacgaaatcgggctggccaatacgcagcgtacggccgccgaccgaaccctgcaggcccaggcctggaacactctctaccgtgtcggcggcttgcggtgcccggccgaatgccttggcgatcgggtgttccgaacggttttccagcgcagcggcaagttccaggcaagtatcggcgtccagcccagccaaaggccgcacttcgcccagggtcaggcggccatcggtcagggggccggtcttgtcgaaaatgaccgtgtcgatgtgattgagcccttcgagcacatggccgcgcgtaagcaacagtccgagcttgtgcagcgttccggtggcggtggtcaaggcggtcggcgttgccagcgacagggcgcaggggcaggtcgcaaccaacagggcgaggacgatccagaaggcacgctgcggatcgatctgccaccagacgatgccgacgatggcggcactcagcaggacgatgaccagaaaccactgcgcgacccgatcggccagttccgccagtcgcggtttatccgactgggcccgctccagcaggccgacgatggcagacagacgggtatcgtcacccagcgcctggacctccacggtcaggccgccctcaacgttaagcgtgcccgcggttacggtatcgccgctgcttctggcctgtggcaggtattcgccggtaagcaccgattcgtcgatgctcgattgcccactgacgatacggccatcggcagggatcagtgtgccgggctgtaccagtacccggtcgccgacctgcagctcgctgagcagaatccgcgtcgtttggccgtgctcatcgagcttcaggcaggacgccggtagcaggttgaccagctgcgcggttgcggcggcagtgcgctcgcgggcgcgccgctcgagaaagcgaccggctagcaggaacagcgcgaacatgcccaccgcgtcgaaataaagctcgccctgaccggttacggttgaccagatacccgcaacgtaggcgccaccgatagccagtgaaacggagacatccatggtcagatgccgggtacgcaggtctctcagcgcgcccttgaaaaaatcggtgcagcaatagaaaacgatgggtgtggtcagcaacagcgccgtccagcgcaggatactggccatgccggccgacagatcgatgttgaactcaggccaggtggccatggttgccatcatcacctgcatccatagcagcccggtcactcccagctggcgcatgctgcgccggttttcctgggcgagacgctctgccgcctggtcggcctggtaagggtgcgcggcgtaaccgatgcgtctcagctcggcgagcagctcgctgagcggcatggacgcatcgttccagcgtacccgcagacggtgattggagaggttgaggctggcctcggtaatggcgtcgaggccacgcagatgcttttcgatcagccatccgcaagcggcgcagctgatgccttctatcaacagggacgtactggcctgctcgccttcgtgctgcacgaacggttgctgtacgtcctggcgatcgtaaagcgccagctcatcggtcagtgcttgcggcaaggcgccaggattggcggaggtgtcgctgcggtgcaggtagtagctttccaggccgccctggacgatggcctccgcaacggcctggcagcccggacaacacagcgcccgttgctcatcgagcacacgggcgtgaaaggcactgccggcgggaaccggcagcccacagtgatagcagggggttgggcttgccatcgaccggtcagtagctcagttcgagcttctgtccggtaacgatttccttctcttcgaacagacgccagtcctggtcgccctcacgaccgagcagttcgacgaaacgtctgccggtaaccggctcttgcatctggccttggtaaaagccgttgccctggggctgcagcacaatgcggcgatcgcgttcgggctgcgtcggcgaaatcaggttgagcaccagttgctggggcccgctgttaccactcagttgcacttcggccagcccgcgatcgtcgttgagcgtcacctgcgcgtgcacttgcaggcgctcggcgagcttttcgcgctccagcgactggttgatgcccttgccggcgtcgtagtaattgtccgacaccaaagtgtcggagttgcggatcgcgacggtcagcatcgtcgtgccgaggactaccgagagcagcaggatgccaatgacgaaccaggcccagaattgcgtataccaacgggtgttctcgtggtctgaggtgctcatgtactacctattcagcgaatgctcgggccgatgaaacggctgtccgatgcatcttctatggatgagtcatctgccgatcttacgtggaagacgatttcgttggtgctggagcgaagctgctccggtgccaccgacagttccaccgggatggtgacgagttcgccggcttcggcatgaacttcgcggcgcccttcgtactgcaggccatccagcccggtggcttcgatgatgaacgtctgctcgttttgcgccttgttcatgaccttcagcgtgtacacgttctcgatcctgccttgctcgttctcgcgatacagcacacgatccttgagcacgtcgagcttgaccagcgaacggtcgctgaccgcgtagccgaacacgctcatcatcgcgatcagcgcgacggcatagccgatcaggcgcggccgcacgaggtgggtcgtctgtccggacaggttgtgttccgtggtgtagctgatcagtccgcgtgggtaattcatcttgtccatgatggtgtcgcacgcatcgatacacgcagcgcagccaatgcactcgatctgcaggccgtcgcggatgtcgatgccggtggggcagacctggacgcacatcgtgcagtcgatgcagtcgccgagccccatggccttgtagtcggcgtccttcttgcgcgggccacgacgttcgccgcgacgcgggtcgtaggagacgatcagcgtgtccttgtcgaacattacgctctggaagcgtgcgtaggggcacatgtagatgcacacctgttcgcgcagatagccggcgttgccgtaggtcgccagggtgaagaaacctacccagaatgccgcccagccgccaatctgaagcgtgaacagatcgggcaccaggtcgcgtatgggggtgaagtaaccgacgaaagtaatgccgatcgccaacgagacgaagagccagatcgagtgcttggcgagcttgcgcaggaatttgttggcattcatcggcgccttgtcgagcttcatgcgctggttgcggtcaccctcggtgactttctccgcccacatgaatacccaggtaaagacgctttgcggacaggtgtagccgcaccagacacggccggcgaagacggtaatgaagaacagtccgaaggcgcagatgatcagcagcgccgagagcaggatgaagtcctgcggccagaacgtggcgccgaagatgtagaacttgcgctcgggcaaatcccaccacaccgcctggcgaccgttccaggtcagccatacggttccgaaatagagaatgaaaagcaggccgccgccaacgagccgcaaattgcggaacaggccggtgaaggaacgggtgtagatcttttcgcgagcggcgtagaggtcggatgaagcattgaccttcgaggggggcgtcacatcacgaacgggaatttgctgggacatcgattacgtaccacggcggaagggtgagtgtcccggccgatacatgccgaccgggatctttgcttacctgctgcgaatggtacgcctcgacagtcgaaggcaggtgcgaccgtcggtcgcgcctggatcgttcggatcagttctccgactggtgggagaggctgtacacgtaagcggccagcaggtgcaccttgtcgttgccaaggtggtcttgctgggctggcatccggccgttccggccatagcgcagggtctgttggatctgtccgaagcttgaaccgtatagccagatgttgtcggtcaggttcggcgcgcccatggcgtgcgtacctttgccttcaggaccatgacaagctacacaattggttgcgaagattttttgaccctgctcaacgtcggcgttgatcccttctggaacatcacgaccggaaaggctgcgaacgtaggctgccacgttgcgaataccttcctcgccgatcacgtcgcgccatgccggcatggctgcctgacggcctcccatgatggtggtcttgatggtctcaggctcaccgccgtacagccagtcgttatcggtcaggttggggaagccataggcgcctttggcgtcggagccatggcataccgagcagttggaggcgaacagacggccgcccatcttcaacgcttgcggatcctgggcgacttcttccaccggcatcgctgcgaacttggcgtacagcggaccgtattgctcgttcgccttgtccatttcgcgttgccattccttcacctgggtccagccaccttcgtagcccggcagcatgcctttccagttacccagccccggatacagcgccaggtagccgagagcgaaaagcaccgtggcgacgaacagcatgaaccaccagcgtggcagcggattgtcgtattcctcgatgccgtcataggaatggccaacggtttcttcggtactgtcgtggcgttgtcccttgcgagtcgcgagcagcagccagaccagtgcggcaatggtccccaggctcagcagggtgatgtaccaactccaaaacgtggtcatttatttcttactcctggaagcttcttcatcacgcttgttggtgtcgggctcgtccgcgaagggcaggttggcggcttcatcgaagcctttcttgcgcttgctgctataagcccagagcacgacaccgacgaaggcgacgaaaacaagaacggtgcccagaccgcgaagagtcccgatatccatggtgcgttaccgtttgttggtgagaattgtgccaaggctctgcaggaaagcgacaagggcatccatttcggttttgcctttgaccgcgtccttggcaccggcgatgtcttcctcggtgtaaggcacgccaacgctacgcagggcaatcatcttgtcgccagtgtgcttgccgtccagcttgttctctaccagccaggggtaggaaggcatcttcgactccggcacgacgttgcgcgggttgtacaggtgcgcgcggtgccaatcgtcggaataacggccgccgacgcgtgccaggtccggaccggtacgcttggagccccacaggaacgggtggtcgtagacgctctcgccggcaaccgagtagtggccgtagcgctcggtctcggcacggaacggacggaccatctgcgagtggcagccaacgcagccttcgcggatgtagatgtcgcggccttcgagttccagagcggtgcggggcttcatgccttcgaccggctcgttgacggcgtcctggaagaacagcggaacgatctgggtcagaccaccgatacttaccgcgaggaccatgaacagggtcagcagaccgacgttcttttcgagtatttcgtgattcttcatttatccgttccttcaggcgatctgcgcagcggcttcgaattcagccggcttggcggcacgcacagtgcgccaggtgttgtaagccatcagcaacataccggtgaggaagaacgccccgcccagtgcccgaacgatgtagccgggatggctggcttccaacgcttcgacgaaggagtaggtcagggtgccgtcttcgttgatcgcgcgccacatcagaccctgggtgatgccgttgacccacatcgaggcgatgtagagcacggtgccgatggtggcgagccagaagtgcgcgttgatcaggccgatgctgtacatctgctcacgagcgaacaccttggggatcaggtgatacatggagccgatggagatcatcgcgacccagccgagggcgccggcatgtacgtggccgatggtccagtcggtgtagtgcgacagggcgttgacggtcttgatggccatcatcggaccttcgaaggtcgacatgccgtagaacgccagggacaccaccaggaagcgcaggatcgggtcggtgcgcagcttatgccaggcgccggacagggtcatcatgccgttgatcatgccgccccagctcggtgccagcaggatgatcgacatcaccatgcccaggctttgcgcccactcgggcagcgcggtgtagtgcaggtggtgcgggccggcccagatgtagagggtgatcagcgcccagaagtgcacgatcgacaggcgataggagtacaccggacgtccagcctgcttcggcacgaagtaatacatcatgcccaggaagccggtggtcaggaagaagcccaccgcgttgtggccgtaccaccactgcaccatggcatcggtcgcgccggagtagatcgagtaggacttgaaccaggtgaccggaacttccaggttgttgacgatatgcagcatcgccgtgaccaggatgaagccgccgtagaaccagttgcccacatagatgtgggcgaccttgcgcttcatgatggtgccgaagaacacgatcgcgtaggagatccagacgatcgccaacaggatgtcgatcggccattccagctcggcatactctttcgagctggtgaagccttgcggcagggtgatgacggccagcacgatgacggcttgccaaccccagaacacgaacgacgccaggccatcggagaacagccgggtctgcgacgtacgctggaccacatagaaggacgtggccatcagtgcacaaccaccaaaggcaaagatcaccgcgttggtgtgcagcgggcgcaagcgaccaaagctggtccagggcaggtcgaagttcaattgaggccataccagctgtgcggcgataaacacacccaggcccattccgataattccccaaaccaccgtcatgatggcgaattggcgaaccaccttatagttatatgcagtctcacttattgctgtgctcatgcaaggcttccacgctaatggcatatcaagggggcaaaaacggcggcaagtatggagaaaggaggggggcaatgcaatcaacgcccaggccatctcgtgccgttcggaccctgattccaggcgttttccatacgctttgcagggtcgtttttcacatcaggccgatgtgtcgagtcgagggtttcgccttgtagttctgggaagtccggcgaatggggaagaactatagaagccaacaggcagaaggcaaaccggggaaggattggacggtgtgcgacagagcgtcgcatggacgcgttttagagcggaagttgttttcgcgcagggcggcgtattgcgccgccctggtaaggggagttactgcttcgccagccgttctggctgttgcgagaggctgtacacgtaagcggccagcagatgcactttatcgttgcccaggtattgctcctgtgccggcatctggccgttgcgtccgtgacggatggtttgttgcaactgaggcaggctggagccgtatatccaacccgccggattggtcaggttaggtgcgcccatggcggccgttccggttcctttttcgccgtggcagaccgagcaggtctgggcatagacctgggcgcccgcaccgacatccgcggcggtgccctccggcagcggtagcccggccagcccattgcgcacataggcggcgacgttcttcacgccttcctcgccgatcacctggccccaggccggcatggccgctacgcgaccgtgcaggatggtggtcttgatcgtctcggcatcgccgccccagcgccattcacggtcggccaggttaggaaagccgacggcccccttggcgtcggatccgtggcaaaccgcgcaatggttggcgaatagacgaccgccgatcttcagggcgcgttcgtcctgtgcgacctgagcgacctccatggccgaatagcgggcgaaaatcgggccgaatttggcgtcggcctgttcgacttcgcgctgccattgcttggtctgggtccagccgtcctcgtagccaggcaatacgcctttccagttacccaggcccgggtagagcgccagatagaggatgccgaatacgagcgtgccgatgaacagcaagaaccaccagcggggcagcgggttgtcatattcctcgataccgtcgaaggaatgccccatggtcttgtcggtagtaccggcggactcgcctttgcgggtggcgaagatcagccagaacagagcgacaatggtgcccagcgtcagcagggcgatgtaaccactccagaaagcgttcatttgttactcccgggcagcccgaacgctcgagctgccccgcgatgtttattccctgacggccacctctgcagcgcgtcgttctcgatagcctggtcggtctcagcgcttgctctgcagcgccgtgccgagtacctgcaagtaagccaccagagcgtccatctcggtcttgcccttgaccgcgtcgcctgcggcggcgatgtcttcgtcgctgtagggcacgccgaccgagcgcagtgctttcatcttgccggccgtgtccttgccatcgagggtgctttcgacgagccatggataggagggcatcttcgactcgggcaccacgttgcgcgggttgtagaggtgcgcgcggtgccagtcgtcggagtagcgaccgccgacacgtgccaggtccgggccggtgcgcttggagccccacaggaacggatggtcgtagacgctttcgccggcgaccgaatagtggccgtagcgctcggtctcggcgcggaacggccggatcatctgcgaatggcaacctacgcagccctcgcggatgtacagatcacggccttccagttgcagtgcggtgtagggcttcatgccttcgaccggctcgttgaccacgtcctggaagaacagcgggacgatctgggtcagaccgccgatgctcaccgcgagcgccatgaacagggtcagcaggccgacgttcttttcgagtatttcgtgcttcttcattatcggctcctcaggcgatctgcgcggcggctgcgtattcggctggcttggaggcgcttacggtgcgccaggtgttgtaagccatcagcaacatgccggcgaagaacaccgcgccgccgatcatgcggaccacgaagcccgggtggctcgcttccagcgcttcgacgaaggagtaggtcagcgtgccgtcttcgttgatcgcacgccacatcaggccctgcgcgatgccgttgacccacatcgaggcgatgtagagcacggtgccgatggtggcgagccagaagtgcgcgttgatcaggccgatgctgtgcatctgcgggcgaccgaagaccttcgggatcaagtgatacagggcaccgatcgacaccatggcaacccaaccgagggcgccggcgtgaacgtggccgatggtccagtcggtgtagtgcgacagggcgttgacggtcttgatggccatcatcggaccttcgaaggtggacatgccgtagaacgccagggagaccaccaggaagcgcaggatcgggtcgctgcgcaacttatgccaggcacctgagagggtcatcatgccgttgatcatgccaccccagctcggagcgagcaggatcagcgacatcaccatgcccaggctctgcgcccagtccggcagcgcggtgtagtgcaggtggtgcggaccggcccagatatagacggtgatcagcgcccagaagtggacgatcgacaggcgataggaatacaccggacgttcagcctgcttcggcacgaagtagtacatgatcccgaggaagccggcggtcaggaagaagcccaccgcgttgtggccgtaccaccactgcaccatggcgtctgtcgcgccggagtacagcgaataggatttcatcgcggtgaccggcacttccaggttgttcaccacatgcagcagggcgacggtcaggatgaaaccaccgaagaaccagttgccgacatagatgtgcttgaccttgcgcgtggccagggtgccgaagaacacgatcgcgtaggagacccagacgatggtgatcaggatgtcgatcggccattcaagttccgcgtattccttggaactggtgtagcccagtggcaggctgatcgccgccaacaggatcaccagctgccaaccccagaaggtgaaggccgccagtttgggtgcgaagagggtggtctggcaggtacgctggaccgagtagtaggacgtggcgaacaatgcacagccaccaaaggcgaaaatcaccgcgttggtgtgcagagggcgcaagcgaccgaagctggtccagggcagatcgaagttaagaattggccaggccaattgcgatgcgatgaaaacgccgagccccatcccgacgattccccacaccaccgtcatgatggcgaattggcggaccaccttatagttgtaggcggtactggttgctgtgttcatgtatgggcttccatccacggtaatgagcatgttttttgttgcgttgagcagacagttctttcattgaaaagcgggggcaaggatgggcaatgggcaactggccggtattgacgccgatcaatactcgcaaggcggtgaaatcccgttcgtccgggccgatcggccgcagggcgagacgttcgccagcctgatattggcgcatggtgcgggtgcaccgatggacagtccgttcatgcagcaaatgaccgagcggctcgtggcgcggggcgttgcggtgcttcggttcgagttcgcctatatggccgagcgacgggctaccggggccaaacgaccgcccaatccgcaggcccagctgttgcagcaatggcgcgaggtttaccgggtggtgcgacagcaaaccgcgggtcgattggcgattggcggaaagtcgatgggcggtcgcatggccagtttgctggccgatgagctcgttgccgatgccctggtctgcctgggttatccgttctatgcagcaggtaaaccggagaggccgcgtgtggcccacctcgccgagctgcgctgtccaacgctgatcgttcagggcgaacgcgacgcgctaggtaaccggcagacggtctcgcactacgcgctgtcgcctgcgatacgggtcgaatggctggaggcggccgaccatgacctcaagcccctgaaacgctccgggctgacccatgaacagcatctggaccgagcagccgatctggtttcggcatttctgcgtcagccgcggcctggccagacgtaaccgaacgcctggcgctgcccgtcagtgaacgccgtggctcagcggttgaagcgctccaccaggctgtattgcgactgtgcggttgctgccaggtcctcagaaagcagcgccgagctttgcgcatctccagacgtctggtcggcaaggctggcgatgttgccgacgttgtggctgatctcgtctgccaccgcgctctgttgctcggtcgcggaggcgatctgcgcggtcatgtcgatgatccgggccacggcgtcgctgataccggtcagcgccttgtcggcatcgatgacccgttcgacaccgcggctggcctgggcgcgaccttgctcggtggtgtcgacggcttgccgcgcctgctgctgcagcttgtcgatcagctggtgaatctgcccggtggccgtcgcggtgcgctgggccagctggcgtacctcgtccgccaccaccgcgaagccgcggccgctttcaccggcgcgagccgcttcgatagccgcgttgagcgcgagcaggttggtctggtcggcaatgctcttgatgacgtcgaccacggtgccgatctcgtcgctgttctgcgccaaggcattcaccgcatcgccggtttctgtcacggagtgggccagcagctcgatggccttgcgggtctgggcgctgatttcctggccctgagcggtaagctggctggcctgctcggtcgcctcggccgtcagcgctacattgccggcgacttcctgtgtggtcgcggccatctggttgatcgccgtcgccacctgctcggtttcatgatgctggcgagccaagccgtccgaacagctgtgcgccaattcgtcggcacgcttggcctgttgttgcagctgaacagcgctatcctgcaggcgcgtcaggcaggttttcagacgcgcgtactcgctgagcatggccatttccaggcgggcttcaacgccatggctgtcggtatacatctgggcgatcaaggggtcgctggtcgactgctcggccaggtgtaccaggcggttcatcccgcgcatctgccagtgacggccggcgaggcccaatggcacggaaagcagtgcagccagcgcaaagccccaggcatgatcgaaccacgcgccgatcatgaaaccgatctggctgatgacgatgaagggcagccagttgatcgccacgggcagccacgtgtcacgccgcggcacaccgctcttgcctgcattgaggcgcacatagagcgcctcggctcgctgcacctgctcgcgggtgggtttggtgcgcaccgactcatagcctatgacgttgcgctgcatgtcgagcactggcgttacgtaggcgttgacccagtaatggtcgccgtccttgcgccgattcttgacgatgcccatccagggccgaccgtccttgagcgtgctccacatgtgcgcgaacacggcggacggcacgtccggatgacgtatcaggttgtgtggagcgccgatcaggtcggcgcggtcgtagccgctgacttcggcgaaggcgtcgttgcagtaggtgatcttgcctttcaggtccgtggtagaaatcagccgttgctgatcgggaaacgcgtattcgcgctgggtaacgggttggttgtttcgcatgacatacgcctggcagtcgaggtggccctagccacgagatcggtccggtccgctcgaagcggcacttctaggaatgatggcaaattgacgccaattgggtgaccgttgtgttgacatgcataacggccaattcttcaaggacttaaatgccaaggcgagatcgcactgcacaaaaaaagcccgttgcagtctggttgcaacgggcctgtcgggagggctcgggttgagcgtcaaccctcgatcagttgacgaagcacgtagtgcagaatgccgccggccttgaagtactggacttcattgagcgtgtcgatgcggcagagcacctggaagttctctcgggtaccatctgcccgctcgacgtctacggtcagcaactgacgaggcttgatgtcggcgctcaggccgcgaatcgagagtttttcgttgccggtcaggcccagcgattgccggttctgatcaccaacgaactgcagcgccagcacgcccatgccgatcaggttcgagcggtggatgcgctcgaagctttccgcgataaccgccttgacgcccagcaagttggtgcccttggcggcccagtcacggctggagccggtgccgtattccttgccggcaaccactaccagtggcacaccttcggcctgatagcgcatcgcggcatcatagatcgacatccgttcgccgcttggctgatgaagcgtattgccaccttcttcgccgccgagcatctcgttcttgatacggatgttggcgaaggtgccgcgcatcatcacttcatgattgccgcgccgcgagccataggagttgaagtcttccggctggacgcccaactgctgcagatacagacccgccggcgaactcgccttgatgttaccggccggtgagatgtggtcggtggtgatggagtcgccaaagagcgccaggatccgcgcattctccacgtccttcggcggagccggaggctgaccgatgtcttcgaagaacggcgggttctgcacgtagctggagttgctgttccacttgtaggtgtcacctgcggtcacggcgatcgattgccaatgctggtcgccgctgaagacgtccgcatagcgcgtgcggaacatctgcccgtcgatcctgcttaccgcctcgttaacctcggcgctcgacggccagatgtccttcagatagaccggctgattctgttcgtcatagcccagcggctccttatccatgttgatgcgggtcgttcccgccagggcgaaagcgaccaccagcggcggcgaagccagccagttggccttgaccagcggatggacgcgaccttcgaagttgcgattgcctgaaagcacggacgaaacgatcaggtcgttgtcggtgatcgcctggctgatggcgtcgggcaggggcccggagttgccgatgcaggtagtgcagccgtagccgaccagattgaagccgagttggtccaggtaggtcgtcaggccggcgcgctccagataatcggtgaccaccttggagccgggcgccagcgacgatttcacccagggcgcgcgcttcaggccgcgttccagcgccttcttggcaaccaggcctgcggccatcagcacgttcgggttggaggtgttggtgcaggaggtgattgccgcgatgaccacggcgccgtgtttcagcttgaaggtctccccggccaccgggactgcggtgtcggcttgctgcgtcttgccgctggtatccagcagcagatcgaagctggcgccgatgtcgccgagcgagacgcgatcctgcggacgcttggggccggcgagcgacggttgcacctggctcagatcgagctccagcgtggcggtgaacaccggatcgggggattggctgtcgcgccacatgccctgggctttgctatacgcctcgaccagcgcgatgcgatccggatcgcggccagtcaggcgcaggtaatcgattgtcacctgatcgaccggaaagaagccacaggtggcgccatactccggtgccatgttgccgatagtggcgcggtcggccagcggcaggtggtccagccccgggccgaagaactcgacgaacttgccgaccacaccgtgcttgcgcagcatctgcgtgacggtcaggaccaggtcggtcgcggttacgccttcgttgagcttgccggtcaggcgcatcccgatcacctcgggtatcagcatcgagaccggctggccgagcatggccgcttccgcctcgataccgccgaccccccagcccagcacgccgagcccgttgatcatcgtggtatgggaatcggtgccgaccaaggtgtcggggtaagcgatggtttcaccgttctcttctttggtccacaccacctggcccaggtattcgaggttgacctggtggcagatgcccgtgcccggcggcaccacccgaaaattgtcgaacgcctgctgaccccagcgcaggaactcgtagcgctcaccgttgcgctgcatctcgatctcgacgttctgctcgaaggcctgatcgctgccgaatcgatccaccattaccgagtgatcgatgaccagatccacgggtgacagtggattgatccgttgagggtcggcgccggcgcgcgacaccgcatcgcgcatcgcagtcaggtcgacgacggcgggtacgccggtgaaatcctgcatcagcacccgcgcggggcggtactggatctcccgttcggacgtatgcgtcttcagccagacggccagcgagctgaagtcatcggcacgaaccgtgacgttatcttcccagcgcagcaggttctccagcagcaccttgagcgaggtgggcaagcggctgatatcaccgagctgcttggccgcttcggggaggctgtagtagtgataggttttgccgtttacctcgaggcttcggcggcaattcagactgtccagggatggcattcgtctctccttgtgcccgcacggtcgggctgactgagtagggagcgttctgttgaaactagcttctggcgattcgtttcgccaagaaaccgggtgccaattcggttggcaatatggagtcggggccatgggcgcgatgggccaatgcggcgcagtcacgctcggcgcatcgaactcgagctgactgttcactggaccgaggcagcaagcctggggttccccactcggctatcatgtgcggctttggctgcgggacgcttcggcgccaggccccttcgggacgataaggttcgtacatgaaaacactgctgctgcattgccgaccgggcttcgagaacgaagtctgcgccgagatcagcgaccaagccgcccggctcgatgtggccggctacgccaaggcgaaaccaaacagcgcgtgtgccgagttcatctgcagcgaggacggtggtccggagcgcttgatgcgcggcttgcgcttttcacgacttattttcgcgcggcaatgggcgcgcggcgaatacctggcgctgccggaaaccgaccgcatcggcgtcttgctcgaacagctcgaaggctatccgccgtgtggcagtctctggctcgaagtcctggataccaacgacggcaaggagctgtcgaccttctgccgcaagttcgaagcgccgctgcgcaaggccctgatcaaggccgggcggctcaaggaagggcacaacgggccacgcttgctgctgacgttcaagagcgggcgcgaggtttttctcgggattgccgaagcggacaacagcgcgatgtggccgatgggcattccgcggctgaaatttccccgtcaggcgccgagccgttcaacgttgaaactggaagaggcctggcatcacttcattccccgtgagcaatgggacacgcgactggcccccggcatgaccgccgtggatctgggcgcgtcgcctggcggctggacctggcagctggtcaaccggggcatcgaggtgatggccgtggataacgggccgatgaatgagcagttgctggagtccggcctggtcggtcattaccgtgccgacggtttcgcattccggcccaagcgcccggtggactggatggtctgcgatatcgtcgagaagccggcaaagaacgccgccttgctggaaacctggatcggcgaagggctgtgtcgcgaggcggtggtcaacctcaagctgccgatgaaacaacgctatgccgaggtgaaacgcctactggaacgcatcgccgccgggcttgccgaacgaggtgtgaaggcgagcatcggttgcaagcagctttaccatgaccgtgaggaagtgacctgccatttgcgtcgtctgtgacgcgccagcgggtgaccgcacgatccgtctcggcgacaatgccatccgtttaaggagcctgtgatgactcaatttgctgaactgactgtcgacgcggtgctcgacgccagcggcctgaattgccccgagccggtgatgatgctgcacaacaaggtgcgcggactgggcggcggcgaactgctcaaggtcatcgcgaccgatccgtccacccagcgcgatatcccgaaattctgcgttttcctcggccacgagctggtggagcaacaggccgaagagggcacctatctctactggatccgcaagaaggccgattgaccctgcgggttgtctggatggatgtggcccgctgagccgatgggttgcacatgcgcggcccgacccatcctacggcgggcgtgatgagtcggttgtctggggcgctgacgtaggatgggtgcaacacaccgctgcccctcgctcggcggctcacccttcggccgatcaaacgcagggcggcaggaacgccaactgcagaccgacgaatgccgttgccagcgcggctatgaaatgaatccccgacgccaccttggtcacgaatacctggcgttcattcaggtcgtgcggcgggcgcgagagcttccacgaacggcgcccgagccatagcagcagtacgatgacaaacagcgagacagcgccgaagctgacgttcagccagttgaagatgccttgggccggatccggtggtgcgatggagcagaccaccgcgtgcgagccgtacatggttgcgaaccagacgctccagatggcgagcccgaaggggatctgcatcgggtgaaagaccgacgtgcggcggtactccatcagacacctcccagtgctgggggtaacagcacgaccgccgcgtaggcgctccagaccaccgccaggttgtagtaccagagctgctcgaccacgacgatttcatacggcgctttgtcgccgacgtagccgtatttcacccgcagcgcctgcaggaaagtgagaatcgtcgccagcccgcaatggatgaggctgtaggcgagaatcacgaagatcaccgcgtcgtgggcggtttcggtgacgtgcaggttcgcagtcaacagcagccataacaacatggcccactgcactgcgccgatgaccgtgatggcgccgagattcaacatcagccggccgccgttgccgcgccgaagtcggccgggaagcagccgaatccagacagtgccgaaactcagcaacaccgcgctggcaaacattagccagccattgaggccggattgcgcaggcacctgccattgtggcgagacagtccatagatagaaccagccgaacagcagcgatagatatagggtgccgtttgccagcagggttacgcccatgccccacagcccggggccgtcgaacgtgcgcgaatgcagcggcggttcgtctggctgagtgcgcgcatccggtgccgccgccgggtgtgcgccattctcccatgaccacctgaacagcacgatcagggtcgcgacggtagtggccagggctaacaggtagaccttgttcaggaggctcaggcaaagcaccgcgagaaagaccgaggcgacgaacggccaccagctgttgccgggtaggtggatcacctcgcgcacttcaccggtcagcggatcggagccccaggtttcccggcggccatggtcgatggttttgagcgcatgttcggcccgggcgatgctgtggggcagattcgggtcctgccagagcggatgacgatcagtgacgtccggcaggctgacgaagttgtacggactgggcggcagggcggtggcccactccagcgtatcggcgttccaggggttggtcttcgctggctggccgaaacggaaatgcagcacgatgtccagcaggatggtgccgatgccgatggccatgatgaagctgccaaccgacgagaccaggttgggtatgtcccagcccaggcccgtgtcgtaggtatagacccggcgcggcataccgagcagaccagtccagtgcatgatcagaaaggtggtgttgaagccgatgaacaccagccagaaaccccagcgccccagacgcaccgagggcatacggccagagaagtgcggcagccagtaatagaggccggccatcaacgggaagaacatcccaccgaccagaacataatgcatgtgggcgacgacgaagtgggtgtcgtgcacctgccagtcgaacggcaccagggccaccatcacaccggtcagcccgccgcagacaaagacgatcaagaagcccaccagccagagcatcggcacgtgatagaccggcttgcccagccagagcgtggcgatccaggcgaaaatctgtaccccggtcggaatcgctaccagcatgctcgccgccgaaaagaagcccagcgccagcgccggaataccgacggtgaacatgtggtgtacccacagcccgaagctcaggaatccggtggtcagcacacccagcaccacccagcggtaacccaccagcggccgctggcagaacaccggtagcagcgtcgagacgatccccgcgccgggcaggaagatgatgtatacctcggggtggccgaacagccagaacaggtgttgccagagcaccggatcgccacctttggcggtgtcgaagaagggcaggccggcggcgcgctccagttccagcagaatgctgccaaggatcagtggcgggaaaccgaacacgatcatcaacgccattaccaggatgtaccaggcgtagagcggcatcttgtgcagcgccatgccgctggtgcgggtgcgcaggatcgagaccaccagctcgacaccggcgctgacggcggatatctcgacgaaggtgatacccagcaaccagaaatccgagttgacgccgggcatgtgtgacgcgctggaaagcggcgtgtacatgaaccagccggctttcggcgcgaccccgaggaacacgctggacagcagaatgatgccgccgaacaggtagcagaagtaacccagcgaggagagccgcgggaagatcaggtcacgggcgccgatcatcttcgggatgaggtataccgccaagccttccatcatcggcacggcgaacagaaacatcatcaccgagccgtgcatggtgaagacctggttgtagacctcgggctccatcaatacatagccgggcatggccagctgggtgcggatcagcatcgccatcagcccgccgataaggaagaacacgccaccggtgaccaggaagcgcagaccgatgctggtgtggttgacgatggtcagcgcgcgccacccgcgcggattgccccagacctcgttgaactggtcgtgcaactgatccggatcggtgcagggagcgttgtccctgatggatgaattcatggggctaacgtctccagccaatcggcgatctggtcgagggtatccggcggaatgtcgtcgtgtgccggcatgccattgccgaacttgagcgtcttgtgttcccgcagccaacggcgcaggccctcggtgtcgttctcgatgacccccgcgcccaggctcggacggcttgccaggtcggtgagatccggcgcacgcccgccttgcgaaatacccgcaacccggtggcagcgtccgcagcgctcgtcgaacacccgaccggcgtcgccgggtgcacgctgtgtgatgctgagactgtccctggcgccgacccattcgctgaacgccgcttcgtcgagcgcttcgacatggagcttcatgtgggtgtgctgcagaccgcaaaactccgagcactgcccatgaaagatgccggtgtgcccggcctgcaggcggatgacattggtgcgcccgggcagcatgtccatcttgccgccgagccgcggaatccagaacgagtggatgacatcggcgctgctgacctgcacatcgaccaagcggccggcggggatgatcagctggttggcggtgatgatgccgctgtcgggataacggacctcccaccaccattggtggccgatgacctccaccttaagcggctgctcgccctgtaccggtagcggcagcatgctgcgcccggtcgggatgccgaatatcagcagcacgacgatgctcaggctgggtagcacgatgcccccgccgataacccagcgacgattgattttcagtgcctgctgttcggaggtttcgcgcggtttgcgtgcgagcgcgtagatccagatcgcgctgaccgccaccaggaccagcgtggcgaacgcaaacatgccccaccagacgttcgcgacctgccgggccatggggctggccgggttcaaggtcgatagcggcccgtcacatgcgctcaataaaggaactgccagcgccaggatggtccatttcaagaagcctccggttcgttccgatcgttgcgctgcctgcttccccatccgctgctggagggccgaatggccaactaccgagactctattcatagccgcgcggcgattgccggccacccgctgcaccccatgctgattcacttcccggtcgccgccttgaccggcctgttgccggtcgacctggcccatctctggacgctggatgagttctggtggcgagccgggctgtggctggctggtgtgggcgcgctgggaggctgggtcgcgagcattttcggtctgatcgatctgctcacggtgcgtgagattcgacagaaaatcaccgcctggtgccatgccattctggccgtgatgatgctctcgctggcctcgctcaactggctgctgcgctttcagaaccagggaggcggtatggagctttgggcgttgtacctctctgccgtcaccgcggcgatgatcgccctggcggcctacctcggcggccggttggtctacgagcatgccgttggggtcgacctggaaaaggcctgaatcgggggctgcatgcggcttggatcgttcggtcatgagcattgatcggttctgtcgaacgtttgggttagaacggcttggccagcaccagccatagggttgcagtgatgaaggcggcaatcgccgcaccaaggaacaggcaacgaaggttcacgctctgctccggtgagcgctcgatatgcagcaccatgactccgcagagggcgtggcagagcaccatgcccgccaccgtgctgagcttgaccaccaaccagccggccatgatgccgtcgcgcagaaacaacgccgtacccgagccgatcgtaatcagcgcggcgggggtgccgacgagggtgaacaccatgcgcgtcaggtgcgcgtggtcacggtagaagagggcgctggtttggcgggtgccggcagcaacgagcgccggcagatacagcagcgtgccgcaccagcacagcaagctcgcgaagtgcagcagtttgagcaagggcattcgcgtctccgtccggcccgcggcaagtcagaggttgtgacagtccgctgccaggccggttcggctggggcgcacctgcaggtgtgaccggcagtgtcaggtgccgctactcagcgcgaccggtgcgtccgctccgtcagttgtcctcggcggcggcctgctggaacaactgcgtgccgcaacggctgcagaacgccgcattgggctcatggctgagtttttcgcacgtcgggcagcggtgctgaaggctgtcggaccgcatggcggtggccagctctgcggtgaagatgccggtcggcaccgcgatgatcgagtagccagtgatcatcgtcagggccgccacggctttgcccagcgctgtctgcgggacgatatcgccgaaacccaccgtggtgatggtcaccacggcccaatagatgctcatcggaatgctggtaaagccgttcgccgggccctcgatcacatacatgagcgtgccgaagatcagcaccatggtggtcacgctgagcaagaacaccacgatcttctgcttgctgccgcgtagcgccaccagcagaaaagtggcctggctcaggtaatgcgtcagggccagcacgcggaatacccgcagcatacggattgcacgcacaacgatcaggtactgcgagtcaggtaggaccagtgcgatgaaggccggcaaaacggacaacaggtcgatggccccgtagaagctgaagatgtactttcgcggctccgggtggcaataaatgcgcagcaggtattcgatggcgaatattgcggtgaagccccattccagacctgccatcaaagcgccgtagcgttcacggtagctcgcgacgctgtcgaacaacaccaccaccaggcttgcgaagatgatgacgagcagccaggtatcgaagcgtctgcctgccgaggtattggtgaagaagatgatgacgtagaggcgctcgcgccagcccatcgagcggagggcttcattgtccattgcatagctcctggtgaaccgatgaaagcgaggttatcccagtgtacgaacccgcgcggtgaaacatggttgcggtgacagctaagaaagtgacggttttgtcgttggctcgttcgccgccgcggggtgacaataccggccattgccgatctcgccagtcgactggaccattcggctccatacctttgcctcgcatcacgttccgacttagtcttaaggggcatcaagcctcggagagcgacatgccagattcccagttggtcgatccgttcggccgacgcatcacttacctcaggctgtcggttaccgaccgctgcgattttcgctgcacctattgcatgagcgaggacatggtcttcgcgccgcgtgcgcagatcctctcgctggaagagctctacgccgtggcggacgccttcatcagcctgggcgtcaagcgcattcgcgtgaccggtggcgagcccttggtgcgcaaggggctgccgaccttgttgagtcgtctgggagcgcgtgaggaactggaagatctggccatcaccaccaacggctcgcaattgccgacccttgcgccggtgctgcgcgacgcgggcgtcaagcgtctcaacatcagcctcgattcgctcaagcgtgaacgtttcgctgagctgacccggcgtgacaagctcgaccaggtgatcgaaggcatcgatgctgcgcgcgaggccggcttccgccgaatcaagctcaacagcgtgatccagaaaggccgtaacgacgacgaagtgctcgatcttgtgaacttcgccgtcgaccggggcctggatatcagcttcatcgaggaaatgccgctgggtaacatttccagccatgagcgcgaaattaccttctgctccagcgacgaggtgcgcgaacgcatcgaggtcggccaccgactggtacgcagcagccataccactggcggaccttcacgctattggcaagtcgcgggtagtgaaacccaggtgggtttcatttcaccgcacagcaacaacttctgtggcagctgcaaccgggtacgggtcacggccgagggcaagttggtgctgtgcctgggtcatgaaggcgccttggacctcaagacactgatgcgccgttatccgggcgacagcgagcgtctgcgtcaggcgctgatcgacgcactgcagctcaagccggagaagcacgagtttcgtaccgacgagcaggttcaggtggtgcgcttcatgagcatgaccggtggttgagcccaggtaggggcggacaccgcaccaccggacatcctgtttccgcggttccgtcgaggagggcgacggcgtccgcatcggcccaccaagtgcccttccaatcagtcatgtgcgtgctacatctatcctcgcggccgccacgacgcgcctcgccattggtactgaaacggaccattgcctcctgcttcggcacctgatcagccccgcctgcctgcgttcggtactgcgtgccacgattggcctctggcggcgtgataaactccgcggctttgcgccagcactcacccgatgtaggaattccgatgttcacggcgaccctgcttgttcatcctcatgctgattgccacggatagggcctcatgcgactgaaaagcatcaagctcgccggcttcaaatccttcgtcgatccgaccacggtcagctttccgagcaacatggccgccgtcgtcgggcccaacggctgcggcaagtccaacatcatcgacgccgtacgctgggtaatgggcgagagctcggcgaagaacctgcgcggcgagtcgatgaccgacgttatcttcaacggctccaacacccgcaagccggtgacccaggccagcatcgagctgatcttcgacaactcagacggcacgctgacaggcgaatacgcggcgttcgctgaaatctccatccgccggcgggtcacgcgcgatgcgcagaacacctatttcctcaacggcgtgaaatgccgccgccgtgacatcaccgatatcttcctgggtacgggcctggggccgcggagctattcgatcatcgagcaggggatgatctccaagctgatcgaggccaagccggaagagttacgcaacttcatcgaggaagcggcgggcatctccaaatacaaggaacgccgccgggagaccgagaaccgcatccgccgcacgcacgaaaacctggcgcgcctgaccgacctgcgcgaggagctcgaacgtcagctcgaacgcctccaccgccaggcccagtcggctgagaagtatcaggaatacaaggccgaagagcgtcagctcagggcccagctgtcggcgctgcgctggcaggcattgaatgctcaagttggccagcgcgagcaggtgatcggtggccaggaagtcagcttcgaagcgctgaacgccgaacagcgcaatgcggatgcgagtatcgagcgcctgcgcgacgggcaccacgagctgtccgagcgcttcaacctggtccaagggcgcttctattcggtcggtggcgatatcgcacgggtcgagcagagcatccagcacggccagcagcgtttgcgccagttgcaggatgatctgcgcgaggctgaacaggcccgcctggagaccgaatcgcatctgggccacgaccgcaccttgcttgccactctcggtgaggaactggcgatgctcgagcccgagcaggacatagcgggtgcggccgctgaagaagccgcggcgcagctcgaagaagccgaaacggccatgcaggcatggcaggagcagtgggagcgattcaaccagcaaagcaccgagccacgtcgcgccgccgaggtgcaacagtcacgcatccaacaactggaacagagcctcgagcgactggccgagcgtcgacgtcgtcttgacgaggagcgcgcctcgcttgccggcgacccggaagacgccgaactgtccgagctgagcgaacagctcgcgctcggtgaactgggtctcgaagagctggcgatggcccaggagcagagcgaccagcagctcgaacagctgcgcgagcagatccagcaggccaaccgaggtgagcaacacgcacagggcgagctgcaacggctgaacggtcgtatcgcctcgctggaagcgcttcagcaggccgcgatggacccgggcaaaggggtctccgagtggttgcagaagcaagggctcgaccagcggccacgtcttgccgatggactacgggtagagcctggctgggagctggcagtcgagaccgtgttgggtgcggacttgcacgcagtcctgctggagcgtttcgacgatctggacatgagcggtttcgagcagggcgatttgcgtctcgtcagttctcagcgggcagcccgatcagtcagcggcagcctgttggacaaggtcaccgccacctcggacctgtcaccctggctgggccgcgttagacctgtcgaagatctcgatcaagcgttggccgagcgcgcttcactggctgacgatgaaagcctgatcagccgcgacggttactgggtcagccgccatttcttgcgggtccggcgggccggggaggccgagtccggcctgctggcgcgcggccaggaactggagcggctgcaagccgaacgcgacgaaggcgaagcggcccttgatctgttggctgagcagcttctccagcttcgtgaggcgcaacgcgaatgggaggagcgccgcgaacagcagcgccgtcagcaccaggacctgtcccgtcagcaaggcgagctgaatgcgcgacgttccgccagccgagccaaactggagcaactgaccctgcgtcgccagcgtctggatgaagagttggtcgaactgtccgaacagcgggcccaggaaaccgaacagctcggcgaggcacggttgcacttgcaggatgcgctcgacgccatggccctagcgaccgaacagcgagaggcgctgctggcgagccgtgacggcattcgcgaacagctcgaccacattcgtcaggaagcgcgtcagcacaaggaccatgcgcaccagttggccgttcgggtcggctcgctcagagcacagcacgattctacccgccaggcgctcgaacgcctggagcagcaattcgagcgcgccctggagcgacgcgagcaactcagtctgaacctggacgaggggcaggcaccgctcgaagagttgcgcatgaagctcgaggagttgctggagcgacgcatgggcgtcgaggacgagctcaagcaggcccgactggctctggaagacgccgaccgggagcttcgcgaggccgagaagcgtcgcacccaggccgagcaacaggcgcaactgctgcgcgggcagctcgaacagcaacgtatggaatggcaggcgctgacggtacggcgcaaggccctgcaggatcagctgcacgaggatggattcgatctgcatggtgtgatcgggacgcttccggccgacgccaacgaatcggagtgggaagccgagctcgagcgtctgggggcacgaatccagcgcctcgggccaatcaacctcgctgcaatcgacgaatatcagcagcaatcggagcgcaaacgctacctcgatgcccagaatgacgatctaaccgaggcgctcgatacgctggagaatgtcattcgcaagatcgacaaggaaacccgcaaccgcttcaaggagaccttcgaccagatcaatagtggtctgcaggcgctttttcccaaggttttcggtggcggcaacgcgtatctggaacttaccggtgaagatttactcgataccggggtggcgatcatggcgcgtccgccgggcaagaagaacagcaccatccacctgctatcaggcggtgagaaggcgttgaccgctctggcgctggtatttgcgatcttccagctcaacccggcgccgttctgcatgctcgatgaggtggatgcaccactggacgacgccaacgtcgggcgctatgcgcgcctggtcaaggagatgtcggaaaaggtgcagttcatctacatcacgcataacaagatcgcgatggagatggccgaccagttgatgggggtgaccatgcatgagccgggttgctcgagactggtggcagtcgatgtggagcaggcggttgcattggcggaggcctgagcggcgctcgctccagacggattgaggacaagcgcagatcaataaaagagccgcgccgggcggtgcacatctaccgttcgtcgtgctagtttagggcgcaatttttacgatgcgcagatgagcctgttcagcggctgtgaatctgcgtctttatcatcgatttcaggggtttaagcattaatggatatcggtctgcgcgagtggctgatcgtcatcggcatcattgttatcgccggcattcttttcgatggctggcggaggatgcgcggtagcaagggcaagttgaagttcaagctggaccgtaatatcgcgaacaacctcccggaggacgacgattccaacgagttgctggggccgccccgcgtggtgagtcgcagcaatgagccatcgctggacgaagcggatctgccttcgatgagtgcccgcgaaaccggcaagcgtcgcccaacagaacctcagcaaggagaccttcgtttctccaacgacgacgcgccggtgccgacgttgctcgacccggttgcagacgatgaagaagacaagccagacgagtccggccaggacctgccgccggtcgaagaggtgttggtcatcaacgtgatttcccgcgacccgcatggcttccgcggccccgccttgctgcagaacatcctcgagagtggcctgagattcggcgagatggacatcttccatcgtcacgagagcatggccggcaatggcgaggtgctgttctccatggccaacgctgtcaaacccggtacgttcgacctggacgacatcgaccatttcaccacgccggccgtgagcttcttccttggcctacccgggccgcggtacccgaagcaggccttcgacgtgatggtcgccgctgctcgaaagctgtctcaggagctgaacggcgaactcaaggacgaccagcgcagcgtgctcaccgcacaaaccatcgaacattaccgccaacgtatcgttgactacgaacgccggcagatgactaccaagcgctaaacccagaaccgctctcaggagcggttcttttttgccgccaggctgcctaaagcatcaccccgggtcgggtctcacacagaagagcaaaagcgccacccgcaccgcttttttgggggggtgcgccccgcggcgaataagagttcctgcctgctcggaagcaaaagcttcgccccgaggcgggcctcccaccagagcgctgctagcagatcaccccactggcttctgctcagccagggacatcagacacccagcccaaccgaactgcatacccagggccaccaggcgcgcgccaaaccggtggggtcacaaccgcaggactgtcagatccgtgggaggctccgcggcgagtgcagaccgcagacctgccgtcactttcgtaatcggctaaaatctcgcgcctacctatcaaccaaggcgcgctgatactgtctgtatctgcactgccccagccacggctccgtcatatgccttccgcccaaaccgccgcagagcgcatcgccgaactgcgcagcgagatcgacgcccacaattaccgctactacgtgctcgacgagcccagcgtccccgacgcggtgtatgaccgcctgttcaacgagctcaaggcgctcgaagctgaacatcctgaactggttaccccggactcgcccacccaacgcgtcggcggcgccgcgttggcggccttcgggcaggtccgccatgacgtaccgatgttgagcctgggcaatgcgttcgaagagcaggacctgatcgacttcgaccggcgcgcgcgcgagggcctggatctgcccgcgggcgaccttttgggcggcggcgccgagctggaatacagctgcgagccaaagctcgacggtttggcggtgagcctgctctacgaaaacggcaagctggtgcgcggcgctacccgcggcgacggcagcacgggggaagacatcagcgccaacgtgcgcaccatccgcaatattccgctgaagctgcacggcgacggctggcccgcagtgctggaggtgcggggcgagatctacatgcccaaggcgggcttcgaggcgctcaatgcgcgtcagctcgaagcggggggcaagcccttcgccaatccacgtaatgccgccgcgggcagcctgcgccagctggaccccaagataaccgccagtcgaccgctggagctttgcgcctacggtgtcggccgaagcgatggcgagctgccgggtacccacatcggcatcctaaacgcactcaaaggctggggtttacccatcagtcgcgagctgaagctggccaagggcgtcgctgaatgccgtgcctattaccacgccatcggcgagaagcgagatgcgttgccctacgaaatcgacggcgtggtgttcaaggtcaattcgaccgaacagcagcgcgagctgggttttcgtgcacgtgaaccgcgctgggcgatcgcccacaagtttccggcccgcgaggaagtcaccgagctgctcgatgtggagtttcaggtgggccgcactggcgccatcacacccgtcgcacggctgaagcccgtgcaggtcgcgggtgtgacggtctccaatgccacgctgcacaacatggatgaagtggcgcgtctgggcgtgatgatcggcgacacggtcatcgtgcgtcgcgctggtgacgtcattccgcagatcctcggggtgattccggagcgccgtcccgccggtgcgcgtgaagttcaggtgcctgaacagtgtccggtctgtgggtcggctgtggaacgcacccaactgataaaacgcagcaagggtcgcgagtcgatcagcgagggctcgatctaccgctgcgtgggacgtctggcctgccaagcgcagctcaagcaggcgatcatccatttcgtgtcccgcagggccatggacatcgacggcctgggagacaagatcgtcgaacagctcgtggataccggattggtcggctcgccagccgatctgtactgcctgaccttcgagcaggtgctggcgctggatggctttgccgaagtatcgagccgcaacctgctcaaagccatcgatgccagtcgtacgccgtcgctggcgcgcttcatctttgccctgggcatcccggatgtgggcgagggtactgccaagttgttggcacgagcgttgggttcgctcgacagaatcagccgggcattgccggatgtgctggtctatctgccagatatcggtctggaagtcgcacacgagatccacagcttcttcgaggacgaacataaccagctcgtcatcgcacaactgcgcgagcgcggcgtgcaattgcaggaggagggcgaggtacatcctgagttcgcagcctgcgcaacgctttccgggctgctcgatcgcctcaacattcccttcatcgccagcaccggtgcgcaacgcctcgccgatcgcttcggcagccttgaaggcatcatcgaagccgactggctggatctgcgccaggtcgagcgcctcaatgaaaaggcggcccgcgcgctacgtgactacttcgacgagccggccaacgccgagcgcgctcggaccatcgaagcccaactgcgtgagttcgggatgcactggcaaagcgagcgcaaggcggcgcaaggactccccttggccggccagacctgggtgctcaccggcacgctggaaagcatgagccgcgatgaggccaaggcgaagctggaggcgctaggtgccaaggtctcaggttccgtctcggccaagaccagtgttgtggtcgcggggcctggcgcgggttcgaagctggccaaggccaacgagctgggcctcgtcgtggaggatgaagaatccttcctgcaacggctcgctgaactcgagcactgactcgacaccagcttgctggattcgcgccgaggtcggcgctcccacatgaggccagagcgcgccggtaggcttttgtgcttttgcagggctgcgctttctcgtggcggaacgggctttcctgccggtacaaacccaaagcttcgcgccgaggtcggcgctcccacatgaggccagagcgtgccggtaggctttgtgctttttgtgggagctgcgcccccgcggcgaaacggagcgtcgcgccagtaccaacccaaaaccacgtccacaactttttctaaagaaatttcccgtccgtccgaaaacctttgcaggcggacctgctcgatgtgggtctgccggtgtcgcacaggttgttctcggggcttgcaaaaaatttcaaatgcctcctaaagctcaccgaaacgacgccgataagctaatcgaatgcgaactcaatgggtgcctgggcaaacagccggcccggagtcgcaagctcaggcaaccaaagtaactagcgcccttggaggctcatcatggctctcacagtcaatacaaacgtagcgtccctgaacactcagcggaacctcagcagttcgtcgaacgctctcagcacctctatgcagcgcctttctacaggtagccgcatcaacagcgccaaagatgacgcggccgggctgcaaatttccaaccgactgaccagccagatcaacggtctgggtgttgcggtgcgtaacgctaatgacggtatctccttggcgcagaccgcggaaggcgccttgcagcagtccaccaacatcctgcaacgtatgcgtgacctttccctgcaagctgctaacggctcgaacgccggtaccgaacgtagcgcgctgcagcaggaagtgacccaactgcaaagcgaactgacgcgaattgccgataccacaacattcggtggacgcaagctgctcgatggttcgtttggctcgtccaacttccaggttggcgcgaatgccaacgagaccatttccgtggcactggcaggtgctggggcgaatgcaatcggtagctaccagatcaaaggtggtggttcgatttttggcacggcggtggatgacgccaccggtgcaaatggctcggctatcggcgatctgaccattactggtaatggcaaaacagccactgcgaccgttgctgcaaacgcatcggctaaagactttgcggcggctgtcaactcgaccaccagcaccaccggtgtatccgccactgcgcgtaccgaggcgattctgggcggcttcagcgttgacgatggtactcaactgtcgttcgacgtgacggtcggttcccagacggtaagcatcgcaggcgccacgtctttgaaggacgtctccaaccagatcaactcccaggcgggtaaatctggcctgaatgccgtgcttgaaggcgataagctccgtctgactaatgacaagggtgaaaatatctccatcgcggcggtaaccggagatggcactacacctgcgctgaccattgccggcgtcgcggccgacggtacagagggtactgcggacgacgccactgatggtgcggttgtaaccggaaacgtcacggtaaactctgcatctggttacgtgatgaccgccgcaacagcccttactgaggctctgagctccggtgtaggtaccttggcttcggtcggcagcatcgacatctccaccgcttcaggtgcgcaggatgccctggcaatcattgatggtgcgattgccaagatcgactctcagcgagctgacctcggtggcgtgcagaaccgcttcgacaatacgatagccaacctgcaaagtatctctgaaaacgtctcggcagctcgtggccgtattcaagataccgactttgcggctgaaactgccaacctgagcaagaaccagattctgcagcaggctggtaccgcgattctcgcccaggccaagcagttgccacaggcagtcctgagtctgctgcagtaatcgggcagaggacgtttacgatgggggatagagctgcgctctacccccattgattcatgagggtgaatcaatggacgtcggaaaaatagctggaagcactgcgtcgccggtggtgcctggatcatcacccagccttctaaaggaggctgggttttcttcgtccgaaaagcttcagaaatcggagaaacacgaagaggcgaaagggcaagaaagcatgaccgacctggtcgagcgatttcgttcgcaggtgcagagcattcagcgtgacttgagcttcagcgtcgatgattcgactggcgacgtggttgttcaggtcattgacggcgattcgggcaaggttgttcggcaaataccttcagaagaaattcttcggctaaccgagcgcctggatgaaatgcgcagcttgatgtttgaggcgaaagcatagacggtatgatttttgtatcgcgctgcgggtggacatttaattgacgaggtaaggttatggctggcgtaacgggcatcggatccggcataaagatcgacgatatcgtggcgagcatggtcacggctgagcgtgcgcctaaggaaacgcagctggccaacctcgaaaagaaaactactacgcgaattactgcggtaggcgctctcaggggagctatcagcgagttccagaccgctctgggcgcactgaacaaaccttcgctcttccaggctcgctccgctacgtcgagtaaaccagagacgctttcagtaacggcaggcacaagcgcaggagctggcagctataaaatagaagtgggccagctcgccgcgagcagcaaagtggcgttacgcgccatcgcaggccctgtggctcttgggacgggtaggctgacggtcagcgttggcagtactgcactcccagccatcgaagtagatgcgagcaataacacactggctggcattcgtgatgcgatcaacaaggttggggccgagcagggtgtgactgcgaccatcgtgaccgacgacgacggctcacgtctggtgttgagcagtacaactactggaacatcagaagatattaccgttaaggttgaaggcgcaactggcgatctggggaaactcgcctttgccgggcctgctgatgctaccagtgacgccggcgcacccaaggtgctctctaccgcaacctctgcgaccttgaccatcgacgggctgccagtcacaagcaagtcaaacactctgagcgatgccattgaaggtgtgacgctcaccctcctggcgaaaaccgaagagaatgcaccactgacggtgacggtagggctggataaagggggtgttaaaaagcaggttcagtcctttgtcgatgcatacaataaattgatcggtgttgttaatgctcaaaccaaggtaacgtctgtaggcgatggcaaggcgcccgtggctggagcgctagtaggcgatgcaacggcccgtacgttgcttggcactatccgtaacgagttgatcaatgctcaaggggacggcagcattcgagcgctcactgatattggaattactacccagaaagacggtaccctagcagtcgacagcaaaaaactcgacaaggcgctggctgataacttcgagcagctttcaggtttatttaccggcgacacggggttggctacacgtcttgataccaagctcaagccgtataccgaaaccggtggaattctcgagcaacgaaacaagcagatgaccgataccataactggtatcgacaagcaaagagaagaccttaatcggcgcctcacatcgttgcaggagcggctctataagcaattcaacgcgatggatttgctggtagggcaactctcgaacacctcttcaagtctgctcgcgtccctggaaaacttgccgtgggcggctagcaactccaagcgataagcgtacctttgaatccaaaccgccagccaggcggttttttcatataaaaatccagcactgctatcaagcttggacgcgttcgaccgataagctgtacatgcaaactgatgtggcaaggggctcattcaaatgtacgctatgacagcaatgaagcagtatcagcaggtcggcgttaaggttcaggtcaacgaggctgatccgcaccgtttgatccagatgctgatgcagggtggcctggaccgtatcgcgcaggcgaaaggcgcgatggagcgcgaggcgttcgctgagaagggtgcgttgattggcaaggccatcaacatcatcggtgggctgcgcgatgcgctcgacaagagcgtcggcggtgagctggcggacaacctcgacagcctttatgaatacatgacgatgcgtctgttcgaggcgagccggcataacgatgtcgagaagctcaacgaagtgggcaggttgctcggcgagatcaagctggcctgggatcagatcgcacccaaggcttgattggctcgtcgttccggcggcgtaccatcaacgcatcgcgacctgtctacttaagcgaggatagacatgcaatcgagcaaagaggcgttcgctacgctgactggcaagttgcgcgatgcgctggcagtgaatgactgggaggccatagcgttgctggacggtgaatgccgtgcgcaaatggcgaaattaagcggcgagaatgcgttggacgtcgggctacgcgaacagcttgcagagctgtcgaacctgtatctcgaactccagcagtccggccgagcggagcgggagcgtttggctgcggagctgactcgcctgaaccaatcgaagcaggtcaagcaagcctacgaaccgctgggttaagccgctcactccctccaaaactgcgctggcgcgatagctgggaatagcgcttcgcaattttctcaggccgctcgtgccgaatgcctgcgccctccgagcttcgtgccggcacaagacggatggcgcttccatccaccttggaagcgcagcgcgacgaaggggcgtcgtgtttaacggtactcgcaaagataagccgaatccgtcgctactttcagttgaaacttgctgttggccggtacggtgaactggctgccggcaccgaaggtttggtagttctcgcttccgggcagtttcacgtccaggctgcctgccaccacatgcatgacttccagctggttggtgccgaattcatagtcgccgggcgccatgacgccgatggtggccggacctgccgccatgtcgaacgcgatggatttgacggtgccgtcgaagtattcgttgaccttgaacattcgcaaatctcgatgagaaaaggggcggccagtatgccgaagcggcgtagtggcgtcatctgatcgtgcgcttaaagacggcaactttcaggtccgcgtcgcgctcacgatcgaaagataaagtacacagcgcccagcaggcagagtcccgcccagaggtagtcgagctttattggctgctgcatatacagcacgctgaacggaaggaatatgcccagggtgatgacctcctgcatgatcttcagctgcccgatcgatagctccgtgtagccgattcggttggccggtaccatgatcaggtactcgaacaaggcgataccccagctgacgagagcggcgatcaaccagggcttggtaccgagggtcttgaggtggccgtaccaggcaaaagtcatgaaaagattggaaatgcaaagcagggcagcggtctgaagccagatgggcatgggcgtactccgagaggatggcggatcctatggcccggcacatggcttcgcaagtgctcgaagtgatgtgttgtggtgtgggtgcgttttgcttcagcagccattattatcgccgcccgtttttttccatctcggatgtttgaaatggattgtcgtcctggttgtggcgcttgttgcatcgctccatcgatcagctccccgattccgggcatgcctttcggaaagccggccggagagcgttgtatgcatctttccgagcgaaatctttgcggtttatttggcctgccatcgcggccggctgtgtgtgcggcgttccgggccgatcatacggtttgcggtgatagccagcaggatgcgattcgcctgcttggctggctggagcaggcgactgcctgatccgtcgccgtcttgatcgttcttgcgctacttcgcacagccgcgccgatggcagcgttcgggcaggcctttggtttttttggatttacctttgcgctggcagcacgctccgttcgccgcgagggtgcgcctccattgaaagaaagcggtacggatgcaactttctaaggggctgcggcggcgggcaaggcttattgctttcgtaggagccccgccctcggggcgaagcttttgcttgagcgggcggagcgtccattcgccgcgaggcgcgcctccactaaaaaagctgtacggacgcagccttctataagggggggggctccggcgttgagcaaggttttttgttttcgtgggagccccgccctaggggcgaagcttttgctcttgagtgggcagtaggccccatttcagcgcgggcgcgcctcccactaaaaaagcggtgcggatgccacgatcagtagtccaaaaaacgaaaccccgccgattggcggggttcgtcagtagccaaagctatttccgactaacgactcagcgcggcagatcgcgcttcggatggccggtgtacagctgacgtggacggccgatcttctggcccatcgcgatcatttccttccaatgcgagatccagccgacggtgcgcgccagggcgaagatcaccgtgaacatgctggtcggaatgccgatcgccttgaggatgatgcccgagtagaagtcgacgttcgggtagaggttgcgctcggcgaagtaggggtcgttcagcgcgatttcttccagcttcatcgcaagctcaagctgcgggtcgttgatacccagctcaccgagcacttcgtcgcaggtctgcttcatcaccttggcgcgcgggtcgaagttcttgtagacgcgatgtccgaagcccatcagcttgaacggatcgttcttgtccttggccttggccaggaatgtctcgatattcgatacgtcgccgatttcgtccagcatggtcagaacggcttcgttcgcaccgccatgtgctgggccccagagcgccgcgatgccggcagcgatacaggcgaaggggttggcgccggtggagcctgccaggcgaacggtggaggtagatgcgttctgctcgtggtccgcatgaaggatgaagatgcggtccatcgccttggccagaaccgggctgatcggcttcacttcacacggcgtgttgaacatcatgtgcaggaagttttcggcgtagttcaggtcgttgcgcgggtacatcatgggctggcccatggagtacttgtacaccatggcggccagggtcggcatcttggcaaccaggcgtaccgccgaaatctcgcggtggtgtggatcgttgatatccagcgagtcgtggtagaaggccgagagcgcgccgacaacgccgcacatgatggccattgggtgcgcatcgcggcggaaaccgttgaggaaagatttgagctgctcatgaaccatggtgtggttcttcacggtgctgatgaactgcgccttttcttcggcagttggcagctcgccattgagcagcaggtagcaggtctcgagatagtcggatttttccgccagctgctcgatggggtagccgcgatgcagcagaatgcccttgtcaccgtcgatgtaggtgatcttggattcgcaagaggcagtagacatgaagccggggtcgaaggtgaagcgacccgtggaggtcaagccccgaacatcgattacgtcaggccctacggtgccggttaaaacgggcagttcgatggcgtctgcgccttcgatgatcaactgcgctttgttgtcagccatgtatggcctcctgttttatgcttggaatcatcatggccccccacgcagggcccgcatcactatagtgagataaatctcaaagtcaatttgcgcgggcaccccgcagcagagggggtttaggggtgaattcacaacacggaaacgcttatttacggcatttataaccggaggcgccatgcgcctttagtggcacttcaccacattgtcattagcgacctaactgtttatactcggcgaccgaccggcaggggcctaacaggcagtttcctgtgggttgtcactcgtgggtggcgggtaccgctgcgtgctcttcccaacaactttgccctgcgtcttaggggctctcaagtgtgaaaaaaagccgtgaaaagccaacgacctgtaaacctagatcttaggactataaaactcccgatcactgcttacacctcgatcctccaccgcatttccggcgtgatcctgtttgtaggcgtggccattctgttgcttgcgctggatacatcgctttcttcggccgaaggcttcgaagaagtgaaggcgtacctcaatagtcccctggccaagctggtgatctgggtgctgctgtctgcattgctgtaccacctggtggccggtgtgcgtcacctgatcatggattcgggacatggcgagacgctggaaggcggcaagctgggctcgaaaatcgttctggccgtctcggcggtgctgatcgttctggcgggagtgtggatatggtaactaatgtcacgaacttctcgcgttcgggtctttacgactggatggctcagcgcgtttcggcagtggtcctcgcggcttattttctgtttctgatcggatacctggtcgcaaatccggggctggattacgcacagtggcaggggctgtttgcctccacctggatgcgcatcttcagtcttctagcgctcgtcgcgctgagcgtgcatgcatgggttggtatgtggacgatttccactgactacctgaccaacatggcgatcggtaagtgggctaccggtgtgcgtttcctcttccaggcagtgtgtggcatcgccatgttcacattcttcgtctggggtgtgcagattctttggggtatctgatccatggctagcattcgtactctttcatatgacgccatcatcattggtggtggcggcgcaggcatgcgtgctgcgttgcagttggcccagggtgggcacaaaactgcggtggttaccaaagttttcccgacacgttcacacaccgtatcggcccagggcggcatcacctgcgcgatcgcttcggccgacccgaacgacgattggcgctggcacatgtacgacaccgtcaagggctccgactacatcggtgaccaggacgcgatcgaatacatgtgttccgttggccctgaagcggtcttcgagctcgagcacatggggcttccgttctcccgtaccgagcagggtcgcatctaccagcgtccattcggtggccagtcgaaggactatggcaagggcgggcaggccgcgcgtacgtgcgccgccgcggaccgtaccggtcatgcgctgttgcataccctttatcaggccaacctgaaagccggcacctcgttccttaacgagtggtacgcggtcgacctggtcaagaaccaggacggcgccatcgtcggtgtgatcgcgatctgcatcgagaatggcgagaccgtctacatccgctccaaggccgtcgtattggcgactggtggtgcgggccgcatctacgcatcgaccaccaacgcgctgatcaataccggtgacggcatcggcatggcgctgcgcgccggtgtgccggtgcaggacatcgagatgtggcaattccacccgaccggtatcgccggtgccggtgtgctggtaaccgaaggttgccgcggcgaaggtggctatctgatcaacaagcacggcgagcgcttcatggagcgctacgcgccgaacgcgaaagacctggccggtcgtgacgtggtcgctcgttccatggtcaaggaaatcctggctggcaacggttgcggtccggatggcgatcacgtgatgctgaaactcgatcacctgggcgaggaagtgctgcacagccgcctgccgggcatctgcgagctgtccaagacctttgctcacgtcgatccggtcacggctcctgttcccgtggtgccgacctgccactacatgatgggcggcgtcgccaccaacattcatggtcaggccatcactcaggacgccagcggcaacgacaagatcatcgaagggctgtttgcggtgggcgaagtggcttgcgtatccgtccatggcgccaaccgccttggcggcaactcgctgctggatctggtcgttttcggtcgcgcggctgggttgcatctcgagaaggctctgaaagacggtatcgagcaccgcggtgccaccgagaccgatctggacgtggcgctgaatcgtctgtccagcctgaacgagcgcaccaccggcgaagacgtcgcttcgttgcgcaaagaactgcagagctgcatgcagaactacttcggtgtgttccgcacgggcgaatacatgcagaagggcatcgcgcagcttgccgatctgcgtcagcgtattgcgaccgtcaagatctccgacaaaagccaggctttcaataccgcgcgtatcgaagcgcttgagctgcagaacctgctcgaggttgccgaggcgactgccatcgctgcggaaacacgtaaggaatctcgcggtgcccatgcccgtgaagatttcgaagagcgtgatgatgagaactggctgtgccacaccctgtacttcccgggtgagaagcgcgtagccaagcgtgccgtgaacttctctccgaagacagttccgacttttgaacccaaggtccggacttactgaggtcgccgatatgttgcaagtgagcgtttatcgctacaacccggataaagacgaaaagccctacatgcaggacttccaggtcaataccgacggaaaggacctgatggtcttggacgtcctggcgctgatcaaggaacaggacgagggtttctcctatcgtcgctcctgccgtgaaggggtatgcggttccgacggcatgaacctgaacggcaagaacggtctggcctgcatcacgccgctgtcatctgtcgtcaagggcaacaagctggtggttcgtccgctgcctggtttgccagttattcgtgacttggccgtggatatgggcatcttctataagcagtacgagaaggttaggccgtatctgatgaacgatacgccggctccggctatcgaacgtctgcaaagcccggaagatcgcgagaagcttgatggcctgtacgagtgcattctgtgtgcttgttgctcgaccagctgcccgtccttctggtggaaccctgacaagttcctcggtcccgctgcactgctgcaggcctatcgtttcctggccgacagccgtgataccgaaaccgagagccgtctggcatcgctggacgatccgttcagtgtgttccgctgccgcggcatcatgaactgcgtcagtgtctgcccgaaagggctgaacccgaccaaggcgattggtcacgtgcgtaacatgttgctgcagagtgcaacctgatgagcgacggcctgtaactatttgcgtaattgcgggtcggtaatgcttcaccgcgacaccttcggcgccagagctcaagctcggcgccgaagttttagcaggaatctcagctcacaaagccggattccgctctgaaaatttgttgaccagcaggagcatccggggtggttctcggaaactatctgcgcggtccgtagtggctttacctgggtcgctgcttcagaacttgggaagtcatgctgcggtctccacgctggtggtgtctccttatcgaaggtgaccagacatgcaagaaagcgtaatgcagcgcatgtgggacagtgcccacctatccggtggtaacgctgcctatgtggaagagctttatgagctctacctgcacgatcccaacgctgtgcccgaagagtggcgcacctacttccagaagctgcccgtcagtggtggcgctgcggccgatgtttcgcattcgacgattcgcgatcacttcgtcctgctggccaagaaccagcggcgcgctcagcccgtttcggcgggtagcgtcagcagtgagcacgaaaagaagcaggtcgaagtcctgcgtctgatccaggcgtaccgtatgcgtggccatcaggctgcccagctcgatccgctcggtttgcagcaacgcccggttccggccgatctggccatcaacaactatggtttgaccgatgccgacctggatacggttttccgtaccggcgatcttgccatgggcaaagatcaggcaaccttgcgtgaaatccatcaggcgctgcaagagacgtattgccgcaccattggtgccgagttcacccatatcgtcgattcggatcagcgcaactggttcatccagcgccttgaaagcgtccgtggccgtccggccttttcgggcgaaatcaagtgccacctgctcgagcggctgaccgctgccgaggggctggaaaagtacctgggtaccaagtatccgggcaccaagcgctttggtctggaaggcggcgagagcctgatcccactgctcgacgagatcgtgcagcgttccggttcctatggcgccaaggaaatcgtcatcggcatggctcaccgcggccgcctgaacgttctggtcaacaccttcggcaagaacccgcgtgatctcttcgacgagttcgagggcaagaaggtcgaagggctcagctccggtgacgtgaaatatcaccagggtttctcctccaacgtgatgacgcccggcggcgagattcatctggcgatggcgttcaacccatcccacctggaaatcgtttctccagtggtcgaaggttccgtgcgtgcccgtcaggatcgtcgcaacgacccagcaggcgacaaggttgtgccggttaccattcatggtgacgccgctgtcgcgggccagggcgtggtcatggaaaccttccagatgtcccagacccgtgcctatcgcaccggcgggacgatccggatcgtgatcaacaatcaggttggtttcaccaccaacaagcaggaagacgcacgctcgaccgagtacgcgaccgacgtggccaagatgatccaggccccgatcttccatgtgaacgccgatgatcccgaagccgtgctgttcgtcacgcagctggctgtcgactatcgcatgcagttcaagcgcgacgtcgtcatcgatctggtctgctatcgccgccgtggccacaacgaggccgacgagccgagtggtactcagccgctgatgtaccagaagatcgccaagcagcgcaccacccgtgagctgtacgccgactcgctgatccagtccaaagtgctggaggaaaggcaggtacagtcgaaggtcgacgactatcgcaccgcgctggataacggtctgcacgtggtcaagagcctggtcaaagagcccaacaaggaactcttcgtcgattggcgtccctacctggggcatgcctggactgcccgccacgatactcgcttcgatctcaagaccctgcaggagctgtccggcaagatgctggccatcccggaaggcttcgtggttcagcgtcaggtatcgaagatcctcgaggatcgtcagcgcatgggcgccggcgcgctggcaatcaactggggttatgccgaaacactggcctacgcaaccctgttgttcgaaggccatccggtgcgtatcagcggtcaggacgtaggacgcggcaccttctcgcaccgccatgccgcgttgcacaaccagaaggacggcagcacctacatcccgttgcagcacctgtacgaaggtcagccgcgtttcgatctgtacgactccttcctctcggaagaagccgtgctcgcgttcgaatacggttatgcgaccaccatgcccaacgccctggtgatctgggaagcgcagttcggtgacttcgccaacggtgcccaggtcgtcatcgaccagttcatcaccagcggcgagcacaagtggggccgcctgtgcggtctgaccatgctgctgccgcatggctacgaagggcagggcccggagcactcgtccgcacgcctggagcgctacctgcaactgtgcgccgagcacaacattcaggtatgcgtgccgaccacgccggcgcaggtctatcacatgctgcgtcgccaggcgattcgccctctgcgcaagccgctggtagccctgacgccgaagtcgttgctgcgtcacaagctggcgacctcgacgctcgaggagctgacgcagggctcgttcctgaccgtgatcccggaaatcgatcagatcgagccgagcaaggtcgaacgcgtgatcatgtgcagtggcaaggtctactacgatctgctggacaagcgtcgtaacgaaggccgcgaagacatcgcgatcattcgtctcgaacagctctatccattcccggaagatgatctggccgaggtgctcgcgccgtaccagaacctcaagagcatcgtctggtgtcaggaagagccgatgaaccagggcgcctggtactgcagccagcaccatatgcgtcgtgttgccgtcgcgcacaagaaggaattgttcctgcaatacgcgggtcgtgaagcttccgccgctccagcggtcggctacgcctccatgcatgccgaacagcaggaaaagctgctgcaggacgcgttcaccgtttaactcattcttgcaagaggccgcgctcacgcggcctcgatgtagaaaccgaatcaataggacccagctaatggctatcgagatcaaagcccctcaatttccggaatcggttgccgacggcaccgttgctacctggcacaagcagccgggcgaagcggtcaagcgcgatgaactgatcgtcgatatcgagaccgacaaggtcgtgatggaagtgctggctgaagccgacggcgtgttgaccgagatcgtcaagaacgagggcgacacggtgctcagcggcgaacttctcggcaagctggacgccggcgcaaccgccagcgcttcggcgccggcctccgctccggccgaaaccccagccgctgcgccggcagccgcgccggctgctggtggtgaggatgccatcctcgcacctgcggctcgcaagcttgccgaagagaacggcatcgaccccaacagcgtcaagggcactggcaaggacggacgagtcaccaaggaagatctggttgccgccatcgaagccaagaagtccgcgccggctgcggccaagcctgccgccagcgctgctgcggcgccggtcgttaccaccggtggtgatcgtaccgagaagcgtgtgccgatgacccgcctgcgcgccaaggttgccgagcgtctggtcgaagcccaatcgaacatggcgatgctgacgaccttcaacgaagtcgacatgaccgaagtcatggcgctgcgctcgaagtacaaggatctgttcgagaagacccacaacggcgtgcgcctgggcttcatgtcgttcttcgtcaaggcgtcggtcgaggcgctcaagcgtttcccggcggtcaatgcttcgatcgacggcagcgacatcgtctatcacggctaccaggacatcggtgtagcggtctccagcgatcgtggtctggtcgtgcctgtgctgcgcaacgccgagctgatgagcctggccgaagtcgaaagcggcatcgccaccttcggcaagaaggcccgtgatggcaagctgtcgatcgatgaaatgactggcggcaccttcaccatcaccaacggcggtaccttcggctcgatgatgtcgacccccatcgtcaacccgccgcaagccgccatcctcggcatgcacaacattctgcagcgtccgatggccgtcaacgggcaagtcgtgattcggccgatgatgtacctggcgctgtcctacgatcaccgtctgatcgatggcaaagaagcggtcagcttcctggtgacgatcaagaacctgcttgaggatccggctcgcctgttgctggacatctgataaagcagctacaggctgcaagtgaagagcggcggttaccgcagctctgcttgcggcttgtggctttttttgcttctgcttgaatgagggattcgtaatgagcgataaattcgacgtcgtcgtcatcggggccggccccggcggttatgtggcagccattcgtgcagcccagctgggcctgaagaccgcctgtatcgaaaaatatcagggcaaggaaggcaagaccgcgttgggcggtacctgcctcaacgtcggctgcatcccgtccaaagcgttgctggacagctcctacaagttccacgaggctcacgaaagcttcaaggtgcacggcatcagcacgggcgaagtcgccatggacgtcccgaccatggtggcccgtaaggaccagatcgttaagaacctcaccggcggcgtagccggcctgatgaaggcaaatggcgtgaccgttttcgaaggtcacggcaagctgctcagcggcaagcaggtcgaagttaccggcctcgacggcaacacccaggtgctgggtgcggagaacgtgatcctcgcttccggctccaagccggtggacattccgcctgctccggtcgatcagaagatcatcgtcgattccaccggcgcgctggatttccagagcgtaccggccaagctgggcgtcatcggtgccggtgtaatcggcttggaactgggctcggtgtgggcgcgtctgggcgctgaagtcaccgtcttggaggccatggacaagttcctgccggccgctgacgagcagatctccaaagaagcattcaaggtgctcagcaagcagggcttgaagattctgctgggcgcccgcgtaaccggctcggaagtgaaaggtgaccaggtcaccgtcaacttcaccaacgccgaaggcgagcagcagcagacgttcgacaagctgatcgttgcggtcggccgtcgcccggtcaccaccgacctgttggccgccgacgctggcgtcgacatggatgagcgtggcttcatcttcgtcgacgactattgcgccaccagcgttcccggcgtttacgccatcggtgacgttgtgcgcggcgcgatgctggctcacaaggcctcggaagagggcgtgatggtcgccgagcgtatcgcgggccacaaatcgcaaatgaactacgacctggttccgtcggtcatctatacccatccggaaatcgcgtgggtcggcaagaccgaacaggcgctgaagggcgagggcgtggaaatcaacgtcggtaccttcccgttcgccgcgagcgggcgtgcgatggctgccaacgacaccgccggtctggtcaaggtgatcgctgacgccaagaccgaccgcgtgctgggcgtccacgtgatggggccggctgcggccgagctggttcagcagggcgcgatcggtatggagttcggcaccagtgccgaagacctcggcatgatggtcttctcccatccgaccatgtccgaagcgctgcacgaagcagcattggctgtgaatggccatgccattcacattgccaaccgcaagaagcgctaacggcgctgtggtagagaggcgacctgcgccggttcctgtggagccggcgcaggccgtcgataccttcaacgcaaggtatgacaggtctctgaaaggtatttttgatagttttcagggacttgaggcgacgcggcatacatgcaacgtctgatgcacatcaaaccgaacggtagctaagatgaatcttcacgaatatcagggtaagcagctgtttgccgagtacggattgccggtttccaagggttacgcggtcgatagccccaaggaagcggctgaggcttgcgaccacatcggtggcaccgagtgggtagtcaaagctcaggtacacgctggcggtcgcggcaaggcaggcggcgtcaagctggtgcgtagcaaggatgaagcccgcgcattcgccgagcagtggttggacaagcgcctggtgacctaccagaccgacgccaacggtcagccggtcagcaagattctggtcgaagcctgcaccgacatcgacaaggagctctatctgggcgccgtggtcgatcgcgcgactcgccgggtcgtcttcatggcgtccaccgaaggtggcgtggacatcgagaaggtcgcgcacgacacgcctgaaaagatcctcaaggccacgatcgatccgctggttggcgctcagccgttccagggccgtgaactggcgttcaagctgggtctgaagggtgaccaggtcaagcagttcacccatattttcgtaaacctgggcaagcttttcgtcgattacgatctggcactgctggaagtcaatccgctggtgatcaagaaagacggcaacctgcactgcctggatgccaagctgaacatcgacagcaacgccatctaccgtcagcccaagctgcgcggcatgcaggatccttcccaggacgacccgcgcgaagcgcacgcggcgaagtgggaactgaactacgtggcgctcgacggcaacatcggttgcatggttaacggtgccggtctggccatgggcaccatggacatcgtcaacctgcacggcggtcagccagccaacttcctcgacgtaggcggtggcgcgaccaaagagcgcgtgaccgaagcgttcaagatcatcctctccgacgacaacgtcaaagccgttctggtgaacatcttcggcgggatcgtccgttgcgacatgatcgccgaaggcatcatcggcgcggtcaaggaagtcggcgtgaaagtgccggtggtcgttcgcctggaaggcaacaatgccgagctcggcgcgaaaatgctgggtgaaagtggtctgaatatcatcggtgcgaccagcctgaccgatgcggccattcaagtcgttaaagccgcggagggcaaataatgagcgtcctgatcaataaagacaccaaggttatctgccagggctttaccggctcgcagggtaccttccactccgagcaggctatcgagtacggcaccaagatggtcggtggtgtcaccccgggcaaaggtggtaccactcaccttggcctgccggtgttcaacacggtcaaggaagcggtagacgctaccggcgccgatgcctcggtcatctatgtgccggcgccgttctgcaaggactcgatcctcgaggcggcttttggcggcatcaagctgatcgtctgcatcaccgagggcattccgaccctcgacatgctcgaagtgaaaatcaagtgtgacgagctcggcgttcgcctgatcgggcccaactgcccgggcgtgatcactcccggcgagtgcaagatcggcatccagccaggccacatccacctgcctggcaaggtaggcatcgtgtcgcgctccggcacgctgacgtacgaagcggtcaagcagaccaccgatgccggtttcggtcagtccacctgtgtgggcatcggcggcgacccgattccgggttcgaccttcatcgatatcctcaagctgttccaggaagatccgcagaccgaagcgatcgtgatgatcggcgagatcggtggctctgccgaagaggaagcggccgcctacatcaaggccaacgtcaccaagccggtggtgtcctacatcgctggcgtgaccgcgcctgccggcaagcgcatgggccatgccggtgcgatcatctccggcggcaaggggacggctgacgagaagttcgcggctctgcaggatgccggcgtcaagaccgtgcgctcgctggccgacatcggcaaggcgcttgccgaactgaccggctgggcagtcaagcagggctgattcctcgcctgcatgcgacaaagaatgccagtcagctcgctgactggcatttttgttttctggcgtgttatagccctccggccttgcagttagctccaggcgggaccagaggtgcggaccgttacgcgccatcctgccaaaacggccgcagatcctcgcgctaaagcggaatttccattaaggtgcgtgctttttttcggggcggcaaggccgcaacccttcgtgagacacacttgggtgcgttcgccgtaccagaaccctcctgccgtggtaattaccgatgactcgattgaaaggcctggatctactggccctcggattcatgacgttcgcgctgtttctgggtgcgggcaatatcatcttcccgcccagcgccgggatggctgccgggcagtccatctggcctgctgcgacaggctttctgctgactggcgtcggcttgccgttgctcaccgtggtcgcgctggccagggtgggtggcggaatggatcggctgaccgcgccactggggcggatcgccggtacgctgctggcggtagcggtttacttggccatcggcccgttgttcgccaccccacgcaccgcggtagtctcgtttgagatgggcgtggcgccgtttaccggtaactccgccacgccgttgttcgcctatacggtggtgtttttcgcggcgaccctgttcctcgtgttgaatcccggtcagctggtcaatcgcgtcggcaagttcatcactccggtactgcttgcagccttgctggtactgggcggcgcagcactcttcgcaccggccggcgagattggcgcaacggctgaaagctaccgtaacggcccactgctcaaggggttcctggagggctacctgaccatggatacgctgggggcactggtgttcggtatcgtcatcgcaaccgcaatccgtgatcgcggggtgtcggctccagcgctggtcactcgctactcgatgatcgccggggctatcgccgcggtcggcctttccctcgtttacctggcgctgttctacctcggcgccaccagccaaggcatcgccggcgatgcgcaaaacggcgtacagatcctgacgacctatgttcagcatacgttcggcaccaccggcagtttgttgctggcgatggtgatcaccctggcgtgtctgaccactgcggtcgggctgacggcagcctgcggcgaattcttcagcagcctgcttcctgttggataccgtatggtggtggtggtgttcacgctgttcagtctggtcgtggccaaccaggggctgacccagctgatcagcgtttcggtccccgtgctggttgggctctacccgctggcgatcatgctggtttcgctgagcctgctcgaccgattctggctggtgccgagccgcatattcatcccggtcatggcggtaaccttggtcttcggcgtcgcggacggtctctcggctgccggcttctcagactgggtgccggaactgttcacgaccttgcccttggcggcccagagcatgggttggctggtgccggtgctggtgacgctggtcgctgcgatcgttgtcgaccgcgtccttggtaccccgcgggacgccaacggagcgagcacgtcatgagcacgaagcggaccgatcgacgcgctataatccgatgcgattgccacgggggcttatatgtcaattccgagtcacctattaccgcacctgattgccgtcctttggttcgtgatgtgctgggctggctatacccgctacgccagttggcgcggcagagacaccgcgtgcctggccagcgtgctgcacctctatcgtcaggactggatgcggcgaatgctgttgcgtgacaaccggatcgccgatgccaacgtaatcggcaacctcgaacgtaacgccggtttcttcgcttccagcacgttgatcatcctcgccggtgtcctcaccgcgctgggcgcttcggagcgggcggtctcgttgctcgccgatctcccgttcgcccagccggtaagcagggggctttcggaaatcaagctgctcgcgcttgccgtagtcttcgtctatgcctttttcaccttcagttggtgcatgcggcaatataatttcgcggcagtactggttgcctctgcgccgatggccggcgagcgcaatgtcagcgacctggaacgtaaatccttcgctgagcgcgccgcgcgggtcatttcgatggcggccaaccaattcaacttcggcttgcgtgcgtactacttcgggatggcgacgctggcctggttcattcacccctggttcttcatggtcgttaccgcgggtgtggtgctggtgctgtatcggcgcgaattccactccgatgtgctcgaggtcatggtgtttacgccaaccttgcctgtcgactcgcccaaggaatagggccgctcgaatcggcgggttagaatgttcggcttgattgcaattcgagaatccgcatgagcgatagtctgatactggagcgcacccagcgcttcctctccctgttacgccactgccaggtcctggggatgcgtgtcgaacatgcagacgccaaggggcttaccctgcgtcttccctacagcgagaagattgtcagcaacccggagagcggactcgttcatggtggcgccatcaccaccttgatggataccacctgtggcatatcgacggcatgcgcattgcccgagcttgagatctgcccaacgctggacctgcgcatcgactacatgcatcccgccgagccgaaccatgacgtgttcggctttgccgaatgttatcgagtcacgccgacggtgattttcacccgcggagtcgcctatcagcgcgacatcaatgagccgatcgcacacgtcgtcggtgccttcatgcgcatgggcaagagcgcgatggtgagcgaatcgcaggtgcgccaatgagtggcctggatctagacgcgctggtcaaggaagcgcatgcgagtaatgactacgatgcgctgctgaagatggtgccgtacgcgagattgatcggcatcgaatgcctgcggctgggagacgagatggtgttccggctgccaaaaaaccaggacaacatcggtaatccgatgctgccggccatccatggcggtgtgatcgccggattcatggagcatgcggcgatgctgcatctactgatgttcatgggcgctccacatttgcccaaaatcatcgacttctcgatagattatcttcgtgctggtcattatcgtgacacctttgccgcctgccaggtttggcgccagggacgtcgcgtagccaacgtcgcggtgaccgcttggcaaaccaatcaggccgagcccatcgcgactgcccgttgccatttcaaggttaacgagccctgactcctggcggcgaccacttagtcggttcaaggatctcgaatggatgcgttgctgatactgggcgggctgctgctgatcgtctcggggctcgtctggttggtcgtactggccttcggcaccagcctgctgtggggtgtaggtagcatgcttccgccgatcaatctgatctatgccgttcggcactggcacgtggcgcgcaaggcgatcggcctgtccagcctaggctccatcccgctggttattggattctcattgctggccagccacgagccggagcggctggcggccattgccagcctgaagtggctggaaccggatgagctggcgcaaagccacagcctggctatcgagctgcaagggcagcttgatggtcgccctttcgttcccaaaacaggtcgtctggtagacggcgtgctgacgctgcgtgaaggggacgacctcttcgctcggcaggaagtgaacattcgtctaggcgcggtttcgcccggcgcagtgcgggtcgatgttctccccgaggatgtcggcccggtgccggaaatcgaaatcaactggatgcgtccggagcaggagcttcccgaggcgcgtcgcgtaaaaagcggctacaccttgcatctggatctgcaggcagtgccgccgaacaggctggccggcgattttcacctggtattgcctgcgcattaccacacgagcctgagtggccaggtagagctgttcaccgacggtctgcgatatcgcgcggggcaggtggatctcaaccacgattcgaacgataccctggcgtacctggccagggattatctgcaacgacgcttcaatacgcggctggtcgagatcgagtcggtggcacctgtggattttcgcctgccgaccgcggttttgtcggtgcaggcgaagattaagggcgccacggatcggtacccgttgaatatccgcaaaggggagcaaggctgggcgatagaaggcgacgactatcctccgttacccgagctagtcgagacgccgcctgcacctgcgatcgttcaacgcgcgccgcagccgcagagcgagacatcgcctggtctggagcggccgcaacggttttcccttgctctcttgctgcagcgccccgcgcgttacgagcagcaactgttgcgagcgcacaccagtcgtggcggggtggcgcaagggcgcttccttgggatcgatgccgatggcaacctggccattcgccggattctcaaggggccgggtgaggccatctacaatctcgcccccagcgacatcgtccggctcgaactgctggaaccatagcctcgccccgggggctcgagcgcacccttcggtttgcgccacttgaattcccgcaccaagcccccatctgttcgtcatcgccgcacttgcggcatggccattgacgatgtggagttagcaagacgatgagtgtggagactcaaaacaaagaaaccctgggcttccagaccgaagtgaagcaactgcttcacctgatgattcattccctgtattcaaacaaggaaatctttcttcgcgagctgatttccaacgcatccgacgcggctgacaagttgcgcttcgaggcgctggccaagcctgagttgctcgaaggcggtgcggatctcaagatccgcgtgagcttcgacaaggacgccaagaccgtgaccctcgaggacaacggtatcggcatgaaccgtgaagacgtgatcacccatctgggcaccatcgccaagtcgggtaccgctgacttcatgaagcacctgaccggtgaccagaagaaggattcgcacctgattgggcagttcggcgtaggcttctactccgcattcatcgtggccaaccaggtcgaggtgttcagccgtcgcgcgggcacgccggccgaagagggcgtgtactggtcctcgaaaggcgagggtgatttcgaagtcgccaccatcgacaagccagagcgtggcacccgtatcgtcctgcacctgaagtccggcgaagaagaattcgccgatggctggcggctgcgcaacatcatcaagaaatactccgaccacatcgcgctgccgatcgagttgccgaaagaattccatggcgaggagaaagacaaaccggctgagcccgagtgggaaacagtcaaccgtgccagcgcgctctggactcgtccgcgtaccgaaatcaaggacgaggaataccaggagttctacaagcacgtcggccacgacttcgagaacccgctggcgtggagccacaacaaggtcgagggcaagctcgagtacacctcgctgctttacgtgccgggtcgcgcgccgttcgacctgtatcagcgtgaagcgcccaaggggctcaagctgtatgtccagcgcgtgttcatcatggaccaggcggacgagttcctgccgctgtacctgcgcttcatcaagggcgtcatcgactccaacgatctgtcgctgaacgtctcgcgcgagatcctgcagaaggatccggtcatcgattcgatgaagtcggcgctgaccaagcgcgttctggacatgctggacaagctggccaaggacaagccggaggactacaagagcttctggaagcagttcggccaggtgctcaaggagggcccggcagaagatttcgccaacaaggaaaagatcgccggtctgctgcgctttgcctccacacaggaagcgtcaggcgagcagagcgtatcgctggccgattacctggctcgcgtcaaagagggccaggacaagatctactacctcaccggcgaatcctacgcgcaggtcaagaacagcccgcacctggaagtcttccgcaagaagggtatcgaggtgctgctgctgaccgatcgcatcgacgagtggctgatgagctacctcaccgagttcgacggcaagcagttcgtggacgttgcacgaggggatctggatctcggcaagctggacacggaagaggacaagaaagcgcaggaagaaattgccaagaccaaggaaggcctggtcgagcgtctcaagacctcgctgggcgacgccgtggctgaagtccgcgtatcgcaccggctgaccgactcgccggcgatccttgccatcggagagcaggaccttggcttgcagatgcgccagatcctcgaagcgagcgggcagaaggttccggaatccaagccgatcttcgagatcaatccgcagcatccgctgatcgagaagctcgatgccgagccggacgaggatcgcttcgccgacctgtcgcacatcctcttcgatcaggccgcgctcgccgctggcgacagcctcaaggatccagccgcctatgtgcagcggttgaacaagctgcttgtcgagctttccgcctaactcgcagcgacacgaaaaagggctcgtcattgacgggcccttttgctttggcccggcgctgtgtcattgatgaacgtcttgctcgcgcggcatctgcgatacggtccgcgaagtggtgggtagcggggctccgcagaccggaacggctgccatggcgaaacgaccacggctactgaaccgccaagcgcgggagcggtctatccgcttggctgtcaggaggtcattggttgttcaacttaagaaattgtcttgccgccttgtgcctggtcgcgtcgatcgcaccggttcacgcgcgggactatcgctacagcgatgcgcacctgcatttcgttgatttcttccaggaaagcgacggcatgcgcaagctgctcgaggccatggacgctggcgatatcgatcacgtgatgatcagcggaattccggtcgccaagaagtggcacgagaacgaacccaagcgacctcgctactatgccggcgacgacgcgcctgtctattggtacagcgcaaccgacgtcgtggtcgccgcggcattgaaggaactggacgaagagcagcgccaacgcttccacccgtttctctctggcttcaatcccaacgacaagaacgccgacgcacacattcgacgaatgctcgacctagatccggggctctggcaggggctgggggaggtcttcactcgtcatgacgacgtgacggccttgaccgagggcgatacgcctcgcgccaataacgaggccttgatgcgcgtctatcacctggcggccgagttcgacctgccggtaatgcttcactccaatatcacctccaagcgtgagcgtaacccgctatacctggccgaactggaagagccactgcgcaatcatccccatacccgcttcatctgggcgcatgccggcacgagcatggagttgcaccgccatcaggaaaagctcgattttctgctgccgacggtcacccgcttgctggaagactatcccaatctgttcatcgacctgtcctggacgatgctaaggccgtacctgctgaacgacgctggcgtggccgataaagattggctggcgctggtcgaacgccaccccacgcgcttcatgatcggtaccgatgtggtcgggcgattcgacagcctggccgagagtatccgtgcgttcgacccctttctcgatgccttgccggagaaggttgctcgtcaggtcgcacgcgacaacttcctggctgtactgcctcgcaaacaacggtgagagccctggatagcggttcgccgtagttaatggccatttgctggctgccgtgccgttcgtcgctggcccgccccgcagcgctattttttggcgtcaattcttcaagcttttcccgccgactccgatattaggctgtcaacgctgatcaatacagcgcttctatggagtgcaagaccctatgtcgattcgacgtttgaatatttcgagccgctctgcggctggcttcggcctgattggcctcatggttctggcccttggcttgttcgccctgaaacaaatggcggagatgcgcaaggaatcgaatgaagttgaccagaactggcttccgagcattgtgagcttgagcagccttaacgccggcatgcagcgcacccgcgcgctgacgatgcgcatggtcatgctgaatagcgatgaggcgcgtgccgcaacggcccagatgcttggcaagctgatcgatgacgtgaaccaggccaaggccgaatacgaaaagctgctgaccacggcagatgagaaagcggcctatgagcgattcaaaacgactcacgcgctgtacatggtcgagcagcgcaaggtcgttgaattggccactcagggcgctcgggaaaaagccatggacgtcatgaatggcagcatcagccagcatgctgacggcatgaccaaggcgctgctcgatcttcagcgcatcaacggcgaggaggcagggcatgcggcggatcgcgcgcgtgctgcgtacgaaaccgcgttcagttgggtggtcatcaccatcatcatggcggccttggtgactgtaacgctggctgtcctgtttaccaggagcatcgttcggcctttgaatcaggcgctccaggtggcggaggcagtagctgcaggtgatctcacccgagacgtcgccatcgaagggaacgatgagccggcacgtctgctcgttgcactcaaggcgatgcagaccaatctgcgcaataccgtccagggcatttccgattcgtccaaccagctggcttcggcggccgaagaactcaacaccgtcaccgaggattcaacccgcggcttgcatgagcagaaccacgaaatcgagcaggcagccacagcggtgaatgaaatgaccgcggccgtggatgaagtcgcccgcaatgcggtggcgacttccgaggcctcgcgtgagtcggatgttacggcgcagcaaggccgtcagcaggtgatcaggacggtcgaatcgatagacctgctggcgggtgacgtgaccaccactgccactcaggtcgagcagctggccggtcaggtgcgggatatcagcaaggtgctggacgtgattcgctcgattgccgaacagaccaacctgctggcgctgaacgcggccatcgaggcggcacgtgcaggcgaggcgggccgtggttttgctgtggtagccgatgaagtgagagcgctggcacatcgcacccagcaatccacgcaggagatcgagcagatgatcggcgacgtacatcagggcaccgatcgggcagtgcaggccatgcaagccagcaaccagcgcgcgcgtagcaccttggacgtcgcccgtgcggccggcgaggcgctcgacgacatcactcgggcgatcagtcagatcagcgagcgcaacctggtaatcgccagtgcgtcggaggaacaggcccaggtagcgcgtgaagtcgaccgcaacctgatcaacatccgggacctgtcattgcaatcctcggccggtgccaatcagaccagcgcggccagccaggagctggcgcgactggcgatcagcctgaacgaactggtggcgcgctttcgcatctgaacgagagccgcaacgcatgcccggttgttccgggggatgccatggggcctgccgtaacgtatgcggcggcccccgtttgttcggcgctgggcataacgggccgatatgcgtaccatccggcgtttttagtcggccctcgccgtgacgctcatcagcgccaggcgttgcgcccggtccagcctcttacgccgagactccgcaatgtccaacctctcaaaccgccttttcagagcctatagccgtgtcagtctggtgactcagatcgctatcggcttggtcgccggttgcctgctggcatggttgtccccgcaaaccgctaactcggtcagcctgttgggcgatctgttcgtcgcgggcttgaaagccgttgccccggtactggtcttcgtgctggtcaccgcgtcgctagccaaccacaagcgcgggcagccgacgcacattcgtccgatcctggggctttatgcgctgggcaccctgagcgccgccgtggtggctgtcatcgccagtacgctgttcccaacgcaccttacattgatcagtcaggccaacgacgtcgtgccaccgtccggggtaggcgccgttctgcataccctgctgttcaacatcgtcgacaacccggtgcatgcggttatcgaaggcaacttcatcggcatactggcttgggccataggcctcggaatcgcgtttcgccacgcccgcgaaagtacccgtgacttgatcgcggatatcgctgagggggtcaccctgatcgtcaaagtggtcattcgcttcgcgccgctgggtatcttcggtctggttgccggcacgctcgccacgtccggcttttcgacgttggccggttatctccagttgctgctggtgctggtgggcagcatggtcttcatggcacttgtagtgaatccgctgatcgtgttctggcagattcgcaaaaacccttatccgctggtcttcacctgcctgcgggaaagcggtatcaccgcattcttcactcgcagctcggcggcgaacatcccggtcaacatgcagctttgcgagcgtctcggcctgcataaggacacctactcggtgtcgattccgctgggcgcgaccatcaacatgggcggggcggcgatcaccatcacggtgctgaccctggcggccgtccatacgttgggtatcgacgtcgacatgcccactgccatcctgctcagcctgctcgccgccatctgcgcctgcggtgcctctggcgtggccggcggctcgctgttgctgattccgctggcgtgcagcctgttcggcatttccaatgacttggccatgcaggtggtagcggtcggcttcatcatcggtgtggtgcaggattcgacagagactgcgctgaattcgtccaccgacgcgctgttcacggcggcgtcctgtattgcgcatggcgatgtagcggaagagggcgtgggcgtctaagcaaacccgccctccgggcgtgccgcaggctatgggatggggctcgctcggcagcctaggcggtggcgcggtccgcgatgagctggtcggaggcacaaaaagcaacggcgccctagggcgccgttgcttcatcaggcttgtcgatcagcctttccagcgcttgagaaccagcgtggcgttggtcccgccgaagccgaagctgttgctcatgatggtgtcgatcttggcattttcgcgagtctcgcgaacgatcggcatgtcggcaacttccgggtccagctcttcgatattggctgagccagcgatgaagttgccctgcatcatcagcatgcagtagatcgcctcatgcacgcccgcagcacccagcgagtggccggacaggctcttggtcgagctgatggccgggatcttgtcgccgaacatgttgcgcacggccttgctctcggcaacgtcacctaccggcgtggaagtgccatgggtgttgaggtagtcgatctcgccgtctaccgtcgccatcgcctgttgcatgcagcgcagtgcaccttcgccgctcggcgctaccatgtcgtagccgtcggacgtcgcgccatagccgacgatttcggcgtagatcttggcgccacgcttgagcgcatgctccagctcttcgacaaccaccatgccgccaccgccggcgatgacgaaaccgtcacgcttggcgtcgtaggcgcgcgaggccttttccggcgtgtcgttgtactggctggacagggcgcccatggcatcgaacaggcagctctggctccaatgctcttcttcgccaccgccggcgaagatcacatcctgcttgcccatctggatctgctccatggcgtggccgatgcaatgcgcgctagtggcgcaggccgaggcgatggagtagttgatgcccttgatgcggaacggggtggccagacaggccgataccgtgctgctcatggtgcgtggcacgcgatatgggccaatgcgcttgacgcccttctcgcgaaggatgtcgatggcttccatctggttgatggtcgacgcgccaccggagccggcgatcaggccgatacgcggattggatatttcgtcagcgctcagacctgaatcttccagcgcctgttgcatggccagataggcgtaggccgccgcatcacccatgaagcgcaggaccttgcggtcgatcagctcttcgaggttcaggtcgacggaacccgaaacctggctgcgcagacccatgtccgcataggcctggttgaagcgtatgccaggacgggtggcacgcaggttggcggagacggtgtctttgtcattgccgaggcaggaaacgatacccaggccggtgatcacgacgcgacgcatgcggaagtccttcaaaagctatcggtagaggtaaacaggccgacacgcaaaccttcggcactgtagatctcgcgcccatccacgctgacggtgccatcggcgatgccgaggatcagcgagcgattgatggtgcgtttgatatggatgttgtaggtgaccttcttggcggttggcagaacctggccaaagaacttcacttcgccggagcccagggcgcggccccggcctggattgccctgccagccgagatagaagcctaccagctgccacatggcatcgaggcccaggcagccgggcatgaccgggtcaccttcgaaatgacaggcaaaaaaccagagatcaggattgatgtccagctcggcgaccaattcgcccttgccgtacttgccgcctacttcgctgatatgaacgatgcgatcgaccatcagcatgttgggcgcgggcagttgcgcattaccgggaccgaacagctcgccgcggctgcaacggagcagatcttcccgagtaaaggcctgttgtttggtcatgcgtattcctcaatggtccctttatggagggcttgctgcttttcatctgactcgtaaatcgagagtctgatcacaaagactagtcatagactgccaccctgagctgaaagtcacagcgcaaggagatggataccgctcgtttcgaccgactacgagaagaccatggcagaaacgggccgatactttaacactcctcacctactacaacgaccatgtgacgtcctgtcccttatagaccatcgagggatgtatcgcgaagaggagcctcaaaccgggccgggcagagggattctttccgccggcaagggtcgcaggaagctgtaaccttatgattccattgaccacagggttggcgctggctgtgccgggagcgctacgcaataatgcagaacactgccaccgagtggcttgaagcggatacaccatgattgaacagcaacccatagcggtgcttggcggcggtagtttcggcaccgctatcgcgaatttgctggccgagaacggccacgaggtccgcctctggatgcgtgacagcgagcaagccgagaacattcgcacccatcgccagaacccgcgctatctcaagggcgtgacggtgcttcccaaggtcgttccggtgaccgatctggggcaaacgctaacggattgcgaactggtgttcgtcgcgctgccgtccagtgcgctacgccaggcgctgtcgccgttcgccgctcagctggcgggcaagatgctggtcagtacgaccaagggcatcgaggcgcagagcttcatgctgatgagccagattctcgagcagatcgcaccacatgcccgcatcggcgtgatctcggggccgaacctggcacgcgaagtggccgagcatgcgttgaccgcgaccgtagtcgccagcaatgacgagacactgtgtcgcagcgtgcagcaggcgctgcacgggcgtaccttccgcgtctacgccagtgccgatcgtttcggcgtggagctcggcggcgccttgaaaaacgtctacgcgatcatggccggtatggccgcggcactcggcatgggcgaaaacacgcgcagcatgctgatcacccgggcgcttgccgagatgacccgcttcgccgtcaggttgggggcgaacccgatgaccttcctggggttggccggggtcggcgatctgatcgtgacctgcacctcctcgaaaagccgcaactttcaggtggggtacgcccttggcgagggcttgagtctcgatcaggccgtgtcacgcctgggagaggtggccgaaggcgtcaacaccatcaaggtactcaaggccaaggcggaggagttgcaggtctacatgccgctggtcgctgggctgcatgccatcctgttcgaggggcgtacgctggagcaggtgattgcgctgctgatgcgcggcgaaccgaagaccgatgtggatttcatttccaccgacggcttctgacaaaccacaggggatacatcgatgagcacaccacaacacggtgccgatcgcgaatcactgatcttgcgcgccatctggatgctggttttctttttcgtctggcagattgccgaggtgatactgctgatagtcgtggtcgcgcagctggtcctgcatgccataagcggcaaggggagtgacagcctgcaggggctgggtgacagcctcagccagtacgtggcgcagatcggccgcttcggcacattcaataccgatcgcaagccctggccgatgtccgactggcctacgccacgcccggccgatcgcgagacgccgccaccggtggcacccgtcacgcctgcccaggagtcacaaccatgaggttatggctgttgcgccatggccaggccgaacccaaggctcgtaccgacgcgcagcgcaatctgacggacgtcgggcgccgggaagtggagggcgctgccgctccgctacgggaccaatcgctgcaggtgatcctggtcagcccctatcaacgggcccagcaaaccgccgagatcgtccgccaggcgctcggcttcactgggccggtggagaccgttccatggctgacgcccgactcggacccggccgacgcgatgctctatctggaccgccgtaccgagcagcgcctgttgctcgtgacccatcagcccctcgtcggtgcgctgggtggctggctggtcagcggccatcgtgacgcaccgctgcctatggcgaccgccagtctggccgaactcgagggcgagcacctggcggccggtttgatgcacctcgttgggcttcggcatccctcataagccgcacggcctaccgcttttcgtttccataagaataaatacgaaccactggagcacgtcccttgagcatttggcacaccccaccgcaaatcgagcaactcaatgcacaccgccagaacaccatcttggaattgctcgatattcgctttgaagcggtcggcgacgattcactgaccgcgagcatggtggtcgattcccgcacccatcagccgtatggcttgctacatggcggcgcttcggtggtgcttgccgagacggtcggctccacggccagttaccaatgcatcgacccgagccgtttctactgcgtggggctggaagtgaacgccaaccacattcgtgccttgcgcgatggtcgtgtgacggcgacctgcaggccggttcacctggggcgttccagccatgtgtgggacatccgcctgagcggggaggacggcaagctcagctgtatttctcggttgaccgtggcggtcatgcccctcggcgagaacagcccgcggcgtaaagaggcgccgtaggcgcgttgtttggcaggactgccttgggttctgccgcgcagaccgattgccgtaaagggaaggcggccagacaatgactgccttttcctgaatcgcctagagttcatgacgcagcgcatttttttcgcccatgccaacggttttccttcggcaacctatcgcaagcttttccaggcattagggccggaatacgaagtcagccatctcgatcggcacggacacgatccgcggtttccggtcgacgataactggcagaacctggtgcaggagctgatcgaacagctggagacattcaacgagccgatttggggcgtcgggcactcgttggggggcatgcttcactatcacgctgccctgcagcggccagcgctttaccgcggtgtcgtgatgctcgactcgcccatgaccacctggttcgatcagaccctgatctgggcggcgaagcgcttcggcttcatcgatcgccttacgcctgccgggcgcaccctggggcgtcgcgagcagttcagctgtacggatgaagcacgccgatactttgccagcaaaacgttgtttcgctcgttcgatcccgaatgcctggaagcctatatcgagcacgggctcgagccgacggcgcagggcttgcgtctgcgtttcgaccccgaaaccgagattcgcatctaccgcagtgtgccgcatacaacgcctggctggccgcatgcgctggagatgccgctggccgtggtgcgaggtcgacagagcagggtggtattgccgcatcatgcgtatctgctgcggctggtgactcacggtgagtcgcacaccctgcccggtgggcatatgtttccgcttgaacagcctcacgccacggcccagctgctcaaacagctattcggtcgctggagcgagctgcatcgaagaggtgccgcatgagcgtcgcgttcgaagaggtccgtttgagcctgccgcacatcgaagtcgcggcgcatctgtacgggcctgaagatggtcgtccggtcatcgcgctgcacggttggctggacaacgccgctactttctcccgtctggcacctttgctcgaaggcgtgcgcatcgtcgcgctggatctgccggggcacggtcattcggatcaccggccggccggcgcggcatacaacatctgggactatgcgcacgatgttttgcagaccgccgagcagttcggctggaagcgtttctccctgctcggtcattcgatgggggctatcgtctcggtactgctcgctggggccatgcccgagcgtgtcgagcggctggcattgatcgatggcgtaatcccttataccggcgaggccgataccgcgccgcacaagctcggcgagttcctgcaggccctgctcacggtggatggcaaacgcaagccggtctacgcccgcttcgagcaggccgtggaggcgcgcatgaagggtgtcggcgctgtctcccgcgaggcggcggagcggctcgcccagcgcgggttgatgccggtgccgggtggctatacctggcgcaccgatgctcgcctgatgttgccgtcaccgatgcgcttgagccgtgcgcatgcactggcattcgtgcaccgggtggcttgcccggcaagcctgatcttggcggagcagggcctgctcgcgcagcagtcgatgcgcgagctgtgcgaggccttgccattccaactgcaccggttgcccggcggccaccatctgcatctggatgatcaggccggcgcggaggcggtggcggccgttttcaaaccgtacttcgccacctgaggtcagtaatcgcgcggtcgcgcaagaatctgtcgcaaagcgccgcttgacttgcttttgccaactgatgaggctgggccatcacctcagcaggaagacatcgatgatccaccaccgtgccaccgccatgctaaacggtagatttgcacagccggcacggggcgctgtgctcggggtccgtttcgtcgcgctggcattgctcgctagtgtcgccaatgctgccgatttgcccggtagccgggatttggagtcacttccgagatacccgcaggcgcagatcgtgggtttcaaggaggagcgggtccctgagcggatctatccgctcgactcgatccgccgcatcagcggtcgtttacgcatgagcagccagatcagttcgggcggtcagctcacggccatcacctatcggctgccggaggtgcacaccggtatcgacgccttcgagcaggcgcgtaatcggttgatgaaagacggcgccgagatgctcttctggtgcgaaggacgcgagtgcggctccagcagcctgtgggccaacgaagtatttcagcgttcgaccttgtatggccccgatgcgggacaggcctatctgctggcgcgattgccgggtgactctgaccggctcgtagcgctctacggcatcacgcgtggcaatggacgcccttatctgcaggcggagcagttcacgcctgacgagccgctgggcgtcatcctgccgaaccccgccactctgttgcgccaattgaaattcaccggcgcgcttgatctgcctcgcttgccgcaggtcccgacggcggagtggggggccttgctggcgaatgtgctgcggctcgacagcaccatccgggtgctgttgaaaggcaaaggggcggcggcctggaatgaagcgttgacgcaggaacgcatcaaggcgcgacggctggaggccgagacctccgaggacgatggtctgcgcatcgagttgttgcgctgatggcgcgtttcagactgcaatagagcactcgcgcctggttcacgggcgccgcgagttccttcataggtatcccaatgctgaacaatgatcgtctgctggtgcagattctgctcctggtgctgctcggtgcctgcgtgtgggtgctggctccgtttgcttccgcgctgttctgggccgcggtgctggcgttcgccagctggccggtcatgcgggtgctgacgcgttggctgaagggcaactccacccttgcggcaaccctgctgacctttggctggatggtcctggtggcggtccccctggtctggctggggttcaacatcgccgaccagattcgtgaggtcaacgtgctggcccacaacctgcaggtccaggggctgccggcgcctcccgaatggctgggccaggtgcccctggtaggcgatcgccttctggcgctatgggacaccctgaacgagcaaggcacggccttcttcgccaccatccgcccctacgtaggccaggtcggcaactggctgctggtccgtagtgcacggatcggcggcggcatgctggagttggcgctcagcctggtactggtgttttttttctatcgagatgggccgaagctggcggcgttcgtccatagcctgttgcatcgattgatcggtgatcgtgcggatcattacctcgaactggtagccggcacggttcagcgagtggtcaacggggtgatcggcaccgccgctgcccaggcgctcctggcctatgtgggcttcagcatcgccggtgttccgggcgcgctgatcctcggcttgctgaccttcgccttcagtttcctgatggttcccccgttgatctgggggccggcggtcgcctggctggcctggcaagggcagtacgggatggcgatattcctcggcgtatggggaatgttcatcatcagcggggtggacaacgtgctcaagccttacctgatcagccgcggcggcaacctgccgttggtcgttgtgctgctgggtgtgttcggcggggtgctggcgttcggtttcatggggctgttcctcgggccgacgctgctggctgtcgcttacagtctgctgggcgactggctggtcaaggaagtgccgcacgcggcgaacccggaacgagcactgggtgcgccgctcgagccggtaggcccgaccgacgagggagggcgttgaccgcaacggttacgcttgttcttcctcgtacttgtcgagtgcatcgctggcgatgatctggcccagcttgatcaattcaggcgccttgtagaactcgtagaaccggcaggcacgtttggggatattgatcagcacgttgggcggatagccggcaatcttgtattgggtcagcgaagactgcatgacttcgaagctctggttgatcaattccaggagcgacgccgggccgccgacgtctatcaccatcgagccctccgccgatttcggcgcgctttgcccagtgggagcggcaggcggctgctgctggtcgggcgcgccgtcgttctgaagctcggcgatatgttcgtccaggcccttgctgcgccagaacgggatatgcgagctgatcgagctgaccatcgcgtcgaagcggccggggcggatgatctcgggcagcgggtattgccgatgattgttagcgttgaggttcaccgcgatgatgatgtcgctgtgacttgagacgaccgggacgatcggcagcggattgagaatcccgccgtcgaccagcattcggttgccctgcatgaccggtgtgaacaggctgggaatagccgccgacgcgcgcatcgccagttccaggttgccttcctgaaaccagatttcctgctggttggtgaggtcggccgcgaccgctgtgaaagggatagggagatcctcgatgttgaccgagccgagcatgtcgcggatgcgcccgaaaatcttctcgccgcgaatcgcgccgaggctgaaactcggatcgaccagtcgcagcatgtcgaagtagtccaggctctcgatccagtcccggtattcgcccagcttgcccgcggcatagatgccgccgaccactgcgcccatcgagcagccggctatgcagttgatctcgtaaccccgggcggtgagctcctcgatgaccccgatgtgcgcgtagccacgcgcgccgcccgatcccaataccagtgcaaccttgttgcccatgtgattctccctgttggcaagagtgatagcttccagcctcggacgcggagcatcaagtcccgtcgtcagctaattcgcgcgcagccgaacgccgatacttctcccggcctgtagcaccgttacctgccgatcggagcaaccgggaataccgcgagccttcttgctacaatcggcgcccgttttgccagcgtcatgagagccctttcagatgagcgaacccatccgcctcacccaatacagtcatggtgccggttgcggctgcaaaatttcgccgaaggtgctggacgtgatccttgccggtagcggcgcgcaaaatctcgacccgcgcctgtgggtcggcaatgcctcgcgagacgatgccgccgtctacggtatcgataacgagcgcggcgtggtctcgaccaccgacttcttcatgcccatcgtcgacgatccattcgatttcggacggatagccgccaccaatgccatcagcgacatctacgccatgggcggcgacccgctgatggccatcgcgatcctcggctggccagtcaatgtgctgccgccggaagtcgcccgcgaggtgattgcaggcggacgtgcggtctgcgatgcggccggaattccgctggctggtgggcattcgatcgatgcccccgagccgatcttcggcctggcggtgaccggcctagtgaacaaatctcagatgaagcgcaacgatacggcgacggtgggatgccggctctacctgaccaagccactgggcatcggcatcctcaccaccgccgagaagaaggccaagcttcgggctgaggatgtcggtcgcgctcgcgactggatgtgcacgttgaacacccccggcagccgcttcggcaagcttgctggggttcgcgccatgaccgatgtcaccggtttcggcctgctcgggcatctggtcgaaatggctgacggcagcggcgtgaccgcgcgcctcgactacgcccgcgtgccgcgtctcgagggcgtcgaatattacctcgagcagggctgcgttcccggcggcaccggacgcaacttcgacagctatggcgagcgtatcgccaccctcgacgaggcgcacaagcagttgctctgcgatccgcaaaccagtggcggcttgctggtggcggttgcaccggaaggcgaggcggagtttctcgcggtcgcgtccgaactcggcctggacctcgagccgatcggcgagctggtcgaagccggcgcctttgccgtcgaggtgcattgatgcgccgcgataccgataactaccgcgagctgttcctcaacgatgtgccgatgatggatgcgcgggcaccggttgagttcgccaagggtgctttcccggatgtggtcaatctgccgctgatgaacgatgtcgaacggcagaaggtcggcacctgctacaaacagcacggtcaacaggccgccatcgagcttggccatcggctggtcagcggccagctcaaggctgagcgcatccaggcctgggccgacttcgcgcgcaaccacccacagggttatatctactgcttccgcggtgggttgcggtcgcaactggtccagcaatggctgaagaccgaggcggggatcgactatccacgcgtgaccggtggttacaaggcgatgcgccatttcctgctggaaaccatcgaacatgcggctgcccatgatgaattcgtgttggtcggcggcatgaccggtaccgggaaaaccgaggtgctggcgcgcctgggcgacagtgtcgatctggaaggcatcgccaatcaccgcggttcgagcttcggtaaacgtgccacaccgcaaccggtgcagatcgacttcgagaacgcactggcgattcgtttgctgaaaatgcagcacgccggtgccagccagttcgtgctcgaagacgaagcgcggctggtggggcgctgctcgatcccattgccattgttccagggcatgcagcgttatccgctggtgtggctggaggacagtcttgaaagtcgagtcgagcgcatcctcaaggactatgtgaccgatctgtgcgccgaattcgtcgccgagcagggcgaaggtggcttttcggcattcgccgagcgtttacagcaaagtctggtcaatatcagcaagcggctcggcggtgaagcctacaagcgtctggctgcgatcatggatcaggcgctcgctgaacaggccagtagcggggcggttgatctgcaccgcggttggatagaggcgttgctggtgcagtattacgatccgatgtacgcctatcaacgcgagagcaaagcctcccgtatcgagttcgcgggcgagcaggacgcggtggtcgagtacctgcgtgagcgagctgcaggattgagcaaggcccaacaatgagggatgtatcgatgaaaaatctgatctgtttgtccgtgctggcgctggcaatgaccggctgcgcggcgaaaaccgcttatcgtgacagttgcgcatcgcagctgaacgcggcctgggaagagcaaagcctggcggaggcagagggcttcgccggcacggtgagctattccaaagccatggcgctgttgaccggcgcgaaaacccaacagcagttcgaggcctaccagggctgcgtcaaaaaagccaagaaagcgcgcttctatctacgcgagtcccgcgcagggcgctgatcactctctccaggtggcatctcaccggtgccaccgccttatcgcctgggcctgataggccgagcagttcagcaggatttcttcatgcagctcgacttttccgcactgacgccggccgagcgctatcgctggctcacctcgaccgttacccctcgcccgattgcctgggtgtcgacccgctcccatgaaggtgtcagcaacctcgcgcctttcagtttcttccaggtgatcagcagcgacccgccgacactgctgatcaacgtcggcctgaaggatggcatgtcgaaggataccgcgcgcaatgcgcaggataccggcgagctggtggtgcaactggtcggtgccgagcaggccgaggcgatgaacgcgtctgccgccgcgttaccccacggcatcagcgaattcgagcactgcggcatcgccagcgaaccagcccagctggtgaatgtgtcccgggtgcgtgcggcgccgattgccttcgagtgccgagtcgcgcagatcctgccgtatccggcggaatcacccaactgccagctgattttcgccgaagtgctgctggcgcatgtcgatgacaaggtgctcgatgagcgcggtcgcatcgatccggctcgcctcgatctggtcgggcggctcggcggtagccaatacagctttacccgcgaccgcttcgacatgcagcgcccttgatgacgaatcgccgttagccaggcgcaccccagcagtgcgtcgctacaaagtccagccgaacttgcgacgcagccatttctccagttcgatgatcagcatgagcaatgccccgatcagcgtgcagaatccccatgcagcgatactcagtgcctcggtatcgaacatcagttgcaggggcttccaatgtgtgaaggcgagctgcagtcctgccagcaaaccgatcatgctccaaaccatcgggttcgcccgccagccgaagcgtgcgggtgcgttaattcggacgctgctgaacaggtagccgatctcgcacgcaaccagcacattgacagccagcgtacggctgcgctccaggctccacccatacgcctgcgagtagatgaacactccgaggcaggcgaccgtcatgagtgcagcgacgaagagtacccgccacagtaggtgaccgctcaatagcgcggcagacggatcgcgaggcggacgacgcatgaggtcgtgctcgcccggctcgaatgccagcgccagggccagtgtcacggcggtgatcatgttcacccagagaacttgtagcggcgtgattggcaacgtgagccccagcgcaatcgcagccagtaataccaaggcttcgccgccgttcgtgggcaggatgaaaagaatcgatttcttcaggttgtcgtagaccgcacggccttcttcgaccgcatgggcgatggtggcgaagttgtcgtcggctagcaccatttgggacgcctccttggcaacctcggtgcccttgatacccatggcaatacctatatcggcgcgcttgagcgccggggcgtcgttgacgccatctcccgtcatcgcaacccgtgcacccgtggcttgtaaccgttggaccaatcgcagcttgtgcgtcgggctggtgcgggcgaacacggcggtttcgttcagtcgagcgtcgagctctgcgtcgctgagacgatccagatcggcgccattcaacgcaggcttgtcgcccagccccagccttttggcaatggcgctggcggttgctgcgtgatcaccagtgatcatcttgacctggatacccgctgccgcgcactcggcgatcgcgtagatcgcttcgtcgcgtggcgggtcgagcatgccaaccagcccgagcagtaccatgtcgccttcgagatcgcggttgtccagttcatgttgcgcagcatccagcggacgcagggccaaggcaagcatccgtaatccttgtgtggctccttcggccagtacctggtgccaatagcgcaggtcgatcggttcgggtgttccgttgcgccattgccggttacaaagctccagcagacgctctggtgcgccaatcatgtagatcaagccgtgtccgaaatggtcgtgatgcaggctagccatcgcgcgccgttccgaactgaaaggaataatgtcgacgcgaggcaggtgggtgctttcgtgtgcgtgttgcaggttgagcttgccagccagcgtcaatagcgcggcctcggtgggatcgcctgttattgaccacccatcggcatgcggttgaaggcttgcgctgttgcacagcagacccgcccgggccagctccttcaggtcgtgagcctcttcgatcacgcacaccttggcgccgtcacagtgcacgtagcctttaggagcgtagccgataccctcgatctgatagtgatgcgcagcggtgtatacctgctgtaccgtcatctcgtttcgagtcagggttccggtcttgtctgtgcagatcaccgtcaccgcgcctaggctctccaccgcgggtaggcggcggatgatcgctcgccgacgtgccatgcgctgcacgccaagcgccagggtaatggtcagtacggctggcaggccctctgggatcgcggctacggccaggcctaccgcggctagtagcatatcctcggtgccgtagtcacgcagcaggacaccgaacgcaaaggtagccaaggccagcagcagaatgagcagcgtcagctgtttggcgaaccgggccatatcggtcagcaacggagtctgcaggcttaccacctcaccaagcatgtggctgataccgcccagttcggtctgcccggctgtcgcgacgaccacacccataccgctgccggcgctgaccagcgttccagagtaggccatgcttcggcgatcgcctaagctggcttcgccgggcaccgcctcgatctgcttgtccaccgggaccgactcgcccgtgagcgtggcttcttcgatgcgcagatcacggcactcgagcaaacgcatgtctgcgggaacgcggtcgccggcctcaaggacgactagatctccgggtaccagctgttcggccggggtgcggatcgtctgaccggcgcggcgcaccgtgctgtcgagcgtcagcatttgctggatcgcttgcatagcctgctcggccttgccctcctgaacgaatccaaccaacgcgttgatcactaccacaccgaaaatcaccgcactgtccagccactcgccaagcgccaaggtgaccagcgcagcgagcagcaggacgtagatgagaaggttgtggaattggagaaaaaatcgcttcactggtccgctagcggcacgcgccggcaggcggttgggtccgaattcgtgcatccgcagctcggcttcgctgtggctgagcccatcaatatgggagttgaaatgcgcaagtgcccgatgggcaggttgagcatgccaatcgtttggggtgggcgaagtcatcgcattctcctgaaggctgtatttcgtccagcctaaatgcggccactttcgtcgataccggactggatcaagagtgtgttcgatatctcgactacgacgcctaaatgctttcccgaacgacattgaggtcagtagcatcgaccgaatcagagaaggagagtggcatgcgcgctagattggatgtctgtctgcgggcggtgaacgatgtactgctcggcaagcaatcacaggtgcgattggccatggcctgcctgctggcgagagggcacctgctgatcgaggacctgcccggcatgggcaagactaccctcagccatgcgctcgccagggtgatggggctggaattccagcggatccagttcacctcggaccttctgccgggcgatatcctcggcacctcggtgttcgataaggacagcggccagttcgctttccatccagggcccatcttcgccgagctgattctggcggacgagatcaaccgggccaccccaaaaagccagagcgccctgctcgaagccatggaagaagggcaggtgacgatcgagggcgccacacggccgctgcccgatccctttttcgtcgtcgccacgcagaaccccgtcagctctggcggtacgttctccttgcccgaatcgcaactggaccgcttcctcatgcgcctatcgctgggttatccggcgaaagccgccgagaaggccctgctgctgggcgatccccgtcgcgatctgctggtgcggctggcgccactgctcgaccgggatacgctggtggatattcaggatgcggtggcgcaggttcgggtcagcgatgcactggtcgattatgtgctgcgattggtcgaggcgacccgcacacagccgcagttcgcctggggactttcgccgcgtgggagtctggcaatgctggccgcggcgcgcgcctgggcgtttctcgatggccgcgattactccattccggaagacgtccaggcggtactgccttcggtggctggccatcgtctgcgcgagcgtgccgatgcaacgggtcacgggggtggcgcactggtgcaatggctgttgcgcgaagtgccagcgctctgattcgcgaaaactgccgagaggatcagcatgcgactgttgccacggatacgtgagcgttggttgttgaagcgtatcccgccggggccgagtatgcggctcgaccagcggcggatattcatcatgccgacgccggtgggcatgacctttctggcggccttgttgctgatgctggttgcggcgatcaactaccagaacagcctcgcttatgccctgacgtttctgctcggctcggtatatctggtcgcgatcctgcatacctggcgcaacctggccggcttgaccctgcaggctggtagctcgcaggcggtcttcctcggagagcaggcgcggatgcaggtgcgactggagagccgtggacgcctctatcaggccgtcgcattgggctggccgaaaagcggcctgcagctggtcgacgtgccggcaggcggaacctgcgaactcgaactgagcctgccgaccgaacaccgaggctggttacggccagggcgtctgcgcgtcgagagccgctttccgctgggcattctggtggcttggagctgggtggacctgcaactggcggctctggtctatccaaggcctgttgagggtgagttgctggcggccagtggggcggctgaagaggagcgcgagggcagctgcgtggcggggcctggcatcgatgactatcagggattgaaggcctggcaaccgggagactcgcggcgacgcctcaattggaaggcctattcccgcgggcagggtctgctggtcaaggacttcaccgctctgcttgggcaggagccgctgctcgacctggacgcactcgacggcgacatcgaggcgcgattgtccgtcctttgccattgggtcgtcgaactgtcagcgcgtcagcagcccttcgtcttgcagatcggcgggacagtcataggtccggatgccggggtcgatcaccgcaatcgctgtctgcgtgagctggcggtgttcgccttggatcgggatggcggccgatgagcgttcagcagacgattccgcgcaatggcctggtctggttgctcgtcgcgcaggtagcggtgatcctaccgcacctggggcatctgccgctttgggtcatcggcctctggctggcctgcgccacctggcgcgtgcagattttccgcatgtgcgctcgctatccgcgaagctggctgaaagtcctgatgatgattggcgtcggcggcggcgtgtacctgtcacgcggtagcctgatcggtctcgatgccggcgtcgtgctgctgattgccgcgttcattctgaaactggtggagatgcgcagccggcgtgacgcctgggtgctgatcttcctcggtttctttaccgtggccacgagctacctgttcaacgacagcctgctggccggcgtgtacagcctgttgcctgtcgctcttttactggccgccatgattggtctgcagcaaagcagcaccgatacccacccctggccgacgctgcgcctggcgggctcgctgctgctgcaggccgtgccgttgatgctcgttctcttcgtactgtttccacgcatggggccgctctggtcgttgccgcagccccgtgatcgcggggtcacgggcctttccgacagcatgtcaccgggcgatatcgcgcagttgagccggtccgccgcattggcgttcagggccagcttcgaaggccccatccccgaaagaagccaactctactggcgggccgtcacgttcgagcgtttcgatggtcggcgctggtcgcaatcgctcgctgcacaggggccaggcgcgccggactggacgcccagaggcagcgcggtgagctattcggtggtcatgcagcccagcgggcgtccgtggttgtacgcgctggatgtggctcaggtcgatgctgaaaacgtgcggctgatgcccgactttcatttgcagcgcccgcgccccatcgatcaggcgttgatgtatcaggccacctcatggcccgactcgcggcgcgaacctgcagccagcgctgccacgctggagcgtgccctgcagctgccggcacaaggcaatccgcggagtcgtgcatgggctgcgcaactgcgccgcgatcacccggacccggcggcactggtgcacgcacttttgcagcacttcaatcaacagccgtatcgatacacgctgcagccttcatcggtcggggccgatatcgtcgatggctttttgttcgatacgttgaacggcttctgcattcactacgccggcgcgacgacgttcatcttgcgtgccgcgggtattcccgcccgggttgtcgcgggatatcagggcggggagatcaatccgacgggcaactacctgtcagtccgccaactggacgctcacgcgtgggtggaatactggagcgcggggcgcggctggatttcgatcgaccccacgttccaggtcgcgccggagcgcatcgaacggggccttgaagacgcgctttccgacgagcaaacgctgttcgatgactctgcgctggcgctgcggcgctaccgtgacatcggctggctgaaccagctgcgattcggctgggacaatctcaactatgggtggcagcgatgggtgctcggctaccggggtgagcgccagttggacgtactgaaacgactgttcggtgaactcgacgcaggcaggctcgggttgctgaccgttgccgcggccgcactgctgatggcgatcctggcgttgatgctgcttaaaccctggcgtcgcgagcaggatccgcagctgcgtctgttccagaagtttgaacgtctgctcgctcgacagggtatcgagcggcaggcgggcgagggcgcgcgggattttgccgagcgtgcggcggtgtcgataccggcggttgccgaaccgattcgggattttgcgcggctctacgagatggcgcgttatgctggccagcctgtggatagacgcgacatgcacgcgtcgcttgccagactgcgccgtcagctgccatggcgctccggtacgcgcggaaaacggcaaactcagcccggcgatcgatagctgcgtgcgatggtggcctatcaccaaagcccagttgcacgcccgtggctgcatgtcagcgataagatggtcaccgataaaaacgatccgaggtgggcatgaccctttccgaactgatacgagccgtgcgtgacaatcccgcgaacatcgtcgtgcccgctacctggggccagggccgggcgggtttcggtggtgtggtggcagcgctggtctacgaggccatgcaggcgcaggtgccggacggccgtccggtacgctctttagccatcactttcgttggtccactggtggtcgacacgccggtcagcttcgaggctgaggtgttgcgcgagggcaaggcggtcagccagatgctcggccgtgcggtgcaggacggccaggtggtcaccatcgtccagggcagtttcggtgcgccccgcacgtctgcggtccgggtagccgcggagccggctccgccgatgccgcccgtggacgactgccaggagctgccttatatccctggcgttgcgccggagttcacacgctatctggcgatgcgctggggcgttggtgggctgccgttcagcggcaatacctcacgcgagatgggcggctgggtacgcttgcgcggggaggtcgaacgcgagccgctgaccgtctcgcacctgctggcgctggtggacgcctggccgccagcagtgctgtcgcacctgaagggtttcgcgcccggcagctcactgacctggaccatcgagttcatccagcccacaccgtcgctcgacacccacgactggtgtcagtaccgcgcggtgatcgagcacgctcaggacggctatggccattgtgccgctgcactctggaccccggcgggcgagctggtggcgttgagtcgtcagacggtgacggtattcggctaagcgaagggccgatcagcctcggcctcggtcgaaggcagtcgaggccctttagttgaagagccgctggcttaagacctcggtctcaagccagcgatggcggttcacagtttgaattgctgaatcgctctgctcagttctttggagagggccgccagctcggagctggtggcggcagacaccgcagtctgctcgacggtctgttcagtgacgtcacggatgccagtcaccgaacgattcagctcttcggctacgccactctgctgctcggcagcgtccgcgatctgcgtgttgctcttgcgcatctgcgccaccgcggcggtgatcgcttccagtgccaatcccgcctcacgggcttcgctgacgcagtcgtcggccttcagcgagctctcctgcatgaactccaccgcgtcgcgtgtcatgccttgcaggccggaaatcatctgggtgatctcatcggtcgacacctgaacacgcttggccagattgcgcacttcgtccgctactacggcgaagccgcggcccatctcgccagcccgggccgcctcgatggcggcgttcagcgcgagcaggttggtctgctcggcaatgctgtgaatgacgctgaccacgccgctgatcttctggctgtcggcggcgagctggccgatcgtctcggctgtctgctgcaccccttgggacaggctggaaatggaccgctcgacccgcgccacgacgctgtgaccgtcaccggcgagacggtcggcttgctgtgactggtcacgggtttcccgcgcgtggtcggcgatgtggtgcacggtcgagctcatttcggtgatcgccgtggcggcctgatcggtttcgctcttttgcccgagcatgcccttgcgtacttcgcccatgctcgaggccaggcggctggcgccttcatccaggcgtgttgctgcttgcgttacggtgccgacgatgcgctggtagccggcctgcatggcattgaaagcaccggccatttgccccacctcgtcacggctgtccagtggcacgcgcatggtgagatcaccgctgcgctccacgtgcagcatgacgtccttgagcgtgttgagatggctgagcaggaatcggatcatcacctgcgaagccgccagcagcgccagcatcaggactgcgacggccaacgcgtagctgaaaaagtgctgcgtcagcagttgccagacgctgggcgtgcgggccacaacggcaaagttctcaccgccagcccgcgtgatccgctgcgcgccgataaccggtgtggtggcgaagtagcgatcgtgatcgattgcgatccagccctggccgggtgcgatatttcgaccttcgatggcaagcccctgaccggcgggcgccgtcagcagatcgggatggcggggaagcgccctgccttgcggccaatcctgcagcacgccggccaacagctgagcgctggcttgcgcatcctcgctgcgggaccgttgttccagttgcagggcaaacaacaccagcagcaacgtggtaacgaaggtcaccatgttcaaagcccagaacttgtatttcagggagagatcgcgaatccagagaaccatgagtgcgcttcttatcgagtaattggcgaagaccgctgcagaccggctcgatgcctttccgctaattcgttttaacggcggcaaacggctgggctttaggcccgttctgaatgatccaggggggcgatgccgaagaattgctgagcgcatgcggtgctggaggcagcctgttcggcttcgctgacgccgcggtggcgtgcgacctctcgcagcacttccaccagaaacgccggctcgttctggccgcccttaggctttggccgtagcgtgcgcggaagcaggtaaggggcgtcgctttcgagcatcaggcgtgacgccggtatttcacgaacaaggggatgcaggtgcgttccccggcgttcatcgcagatccagccggtgatgccaatgtgcaagtcaagatcgaggtaggcgtagagggcgcgcttctcgccggtgaagcaatgcacgaccgctgcgctgagtcgatcccgcaagggtcggatgatctcgaccagacgctggtccgcgtcgcgctcatggagaaacaatggcagaccggtcgctatcgccagctctaaatgctcctccagcacgcgctcctgttgtggccgcggcgacaggtcccggttgaagtccaggccgcactcaccaaccgcgcgcacctcgggctcggcgagtagctgcttgagatgcgcagcgctgtcgctcgtccattggtcagcgtcatgcggatggatccccgccgtgcagaacaggcgttgccggcgctcgtccagctcgcggcagagggtcagtgccgcttcgctctcggtgaggctggtgccagtcagcaccatctgggcgacgccggcagcgaaggcgcggtccaccactgcacgtggatcacgagcaaaggttggatgggtcaggttgacgccgacgtcgacgagctgcatggaagtacctctgctatgtttcaaaaagatataacgtgtttaatcaataagttatatatcaaacctaaagctggatagtggctcatgctggcggcgggggtgccgcttgtgagaatcttcgccaccctgtggctgggatggccgcgttgcgtgctgtccaatcgagtcgatacgttgtgatgatccggctactgtccctgctgttatgcctgtgggtgctgacacccttgccggttgccgcgcgtgtcatgggcccacctgtctggcagccatccgataaggtacgcgatctggccgagattcgccgtagcggtgtgctgcgcgtgctggtcaaccaaagccgtaacagctcgggggagatcaagggcgaggccatcggcgtcgagtatgtgcggctgcgtgcattcgagcagtttctcaatcgcagctcgaaaggaccgcagctgaccctggaaatcatcccgaaggccaaggaccagttgctcggtgcgctgcaaaggggcgagggcgacctggtggcgcccggagagctcatgagccagcaactcgcggggcgcaccagccgtagccgggccgttgtcaacagcgtcccgctggtgctcgtcagccggcaaggtgcccgtcgctatacgaactatgaacaattgtccggacgtagcctggcgttgccggccggcagcgcggccgggcctgcgttggagcagatcaatcggcagctgatgcaggccgggcgagcgccgatcgtcgtcgagtgggtcgacccgaccttggcggtcgaagacgtgctggaaatggtccaggcgggcatctatccggcgaccgtcgtcgagcagacgattgccgaacgctgggcaaaggtactgcccaagctgcgtatcgaaaccggcctcgtgctcggcaagaccgcggacatgcactggtacctgcgaaaagaggccagcatgctgctcgccagcgtcgatcgctttcttgcaagctacagcgcgccggagaaccaggacgcggccttcgttcgggtctatcggcggctctatcgggtgcagtacccgcttgaccgcgtcgggcggcagcgtctggaaaaggtacggccgacgctgcagcgacacgcccagcaggaggacatcgactggctcaatctggcggcgctggcattcaaggaatcgacgctaaatccggccgctcgcggtgcgtccggcgcgaccggtttgatgcaggtaacacgcgccactgctcagagcatgggcgtgaacgatatcggcaagctggataacaatgtgctggcgagcgcgaagtatctggcgaaccttcgccgtcgttattttgccagtccgcggttgaacgagcgcgaacgtatggcgttcgtcctggctgcctacaacttggggccgcaacgtgtgcaaagcatgcgggccgaggcccgtcgtcgtggcctgaatccggatcagtggttttttcaggtcgagcgcgtcgccatgtccacggtcggcatgggcgtggtcagctatgtcaacgcagtcaacaagtactacctggcctacacccgggagcgctatctgctggaaggtgagttgcagagcgcgggtaactgagcgctcattcgctctgtctggcgagcagctcctcggccgcaggcaggcgttgacgttcgtgctcgtcgaagcggtcggcggccagtcgagcgatcgctgcccgtttgtccgcatcgctaagccctcggctgttttcgatgcgcgctttctcctggcggtagacggcaatccggtttcgccattgctgtcgcgctccgtcgagtttttccagccgagtggttgcggcgttgccaaccagtagttggcgcaactggcgcagatcggtcgcggtgccgccgttagcctgtagcgccctggtctgctggcgcagttcactctgcagttgcggcgccagcgtggcgcgcagttcgggtggcaggtcattttgcaagcgatccatcgcggcccctttggcggcggcgtcgagcgttggatcgaggcgaatcgccagtctttccagcgtgaaatcgtcggcggcttcttcgagtgcgaagaacgcgacattggcctgctcatcgaatatcgccgcgcgcagttgcttcacggcgcgcagccgctcgcgcatggcgccgatgtcggcctgctgcgtatgggcctgttcgagcgccaggagttggcgcttatagtccagatactgacccagcaaacggtaggcctggcctctcgcgggctgcgagagctgtgcctcgatataacggcgcaggcgattgacgctggtctctataggttcttcgccgatcgaagccaggaagtagtcgaagacgcgacggatgtcgggctcgatgatcagtctgccctgcgagtcagcgcgaagcctgccatcgacctgggtgccggcaaacgagggtggtagtcggtgaagcgtctcggctgcggtcggtggtgctggcggtgatgcctgggccagggtcgcagcctgctgtttggccgttgccggggcggatggggccggggaatgcgcttgcgtctcgtcggacggaaagagccagtacagggagacgccaatggccacggccaaggccaaggccaacagcggtagcgtggcgagctttttcatgagtgatccttgccagtgccggggccagcggccccggccgttcttagagacccgcgttcttcaggcggttggcatgctgccggtacaccgtcagcggatcggtttcgaacaggctggtcagcccgaacacctggttgacttcgtccaggtgattcattcgatagttgtcccgaatgaccatgcccagatgagagctgcagcgcccaaccaggccgtcgttcgcgccgttgaatgcaagcgagcccgcgccaagcatggcgtcgctgacatccagagggttggtgagcgggctggtgccgctccatgagtagtagcgcacgccgttgaccttgtaggcgccttcgccgcattcactggtcggtatgccctgcggatatttggcattgaaacgtgcggcgccttcgctgttgagcgattcgagtgagcccagcgcgttctgcggttcggtgctcgggctgccggacaaggcatggatcagcgcgcccatgccattgaccaggcccgcgactatggcttcgcctccggagccttccggaatcctgcggatcaggtctgcgacgtccgagcctttatgcggggcgccgacgctggtgacggaggcgaccaggtccgggcgcacggcggccacgtagcgcacggtaggaccgccgtggctgtgaccaatcagattgaccttgggcttgccgctgattgcgacgatttcttcgacttgttccagcagctcctcgcctcgaagttccgaggtattgagttggctgacttcggtcacgtagacctgcgcgccgtcgcggcgcaaggcgtgcggtatgccgtaccagtaatcgatgccgagaatgctgtcgaagcccagcatgccgtgcgtcaggacgatcgggtaacgtgtctgggtatagctgctcgagctgaacaggccagcttgcaactgactggacatgaccatggcggagccgaggcatagagcgatcagagtcttcttcttattcatggatgcactcatcgttgggtgaaacgggctttgggcaatccctcgccattcaccgcgcactgcgcgtactgccgcacgacaagcgcagcaatcgtgccatttgatggtgggtatggcctcccgcgctctggtacgccgatttcggctcgatcgatagcaatggctataagccgttcacgccgctgctgttaccaggcggaacggctgaatgtgtaggaaagttatatgtcgcctatttgccagctggatcgccggtatttggggattttgccgactatttggtcatttagaaaccgactggtcacgggtagtcgatcgccacgatgtaccagcacttcgcgccggtgggtgtttgcacttgcacctccgcgtcgagtggcttgcccaccagcgccttggccagcggcgagtcgatgctgatcaggccttgtcgcaggtccagttcgtccggcccgacaatgcgatagcgggcctgctcgccgtcttcgtcttcgacggtaacccaggcgccgaaatacaccttgcccggatcgcttggcttgtcgctgacaaccttgagcttctccaggcgcttggtgagaaagcgcacccggctgtcgatctcgcgcagcatcttcttgccataggtgtactcggcgttctcggagcggtcgccttgggcggccgcctcgctgaccgcctgagtgacctgagggcgccggacgtgccagagttcgtgcaactctgcgcgcagtcgggcttcgccctcgggagtgatcaggggcgtgccggcagggcggggagggcggtagcggctcatgggcaattccggtcagaaaagggcaagcattctaaaggcactggctttcgtttctacactcagctctcacggagcacgttgagcggactggcgttcagggctcggcgtgtgccccatatcccggccaggccgaccagcagcgcaccgatcaatggcagcgtcagcagccaggggtgtggctgccagcgcaaatcgaagacgaagtgatacagcagggcgctgaccagttcgcagccgagagctgcaagcaggccgctggttgcgccgagcacaccgaactccgcgcgcctggccttgagcaacagacggcgctcggcgcccagtgcccgcagcaacgcaccttggtgaatgcgctcgtcgagggtcgcctgcaggccggcgaacagcacggccagtccagcggcgagcacgaacagcagcacgtattcgaccgccaacgaaacctgcgccaggatgctgcgcaactgatcgagcaaggcttggacttggagaatcgtagctgcgggaaaatcacgggccagttgcaccagttcacgatccttgccggcgggcaggtgaaaactggtcatgtaggtgctgggcaggtcctgcagcgtttccggttcgaaaatcatgtagaaattgggttgaaagctgtcccagttgacctcccgcaggcttgtcacgctgacgtctcgcgtgaggccgccgaccgtgaaactgagccggtcgcccaggccgatcttgaggctgtccgccagttcggcttccaccgatacgccaggcagctcctggtgtttgccgctccaccattgaccggccgtcaggcggttgtcggacggcagctcgcgagcccaggtcaggctcaggtctcggcgagtcgcccgctcaccctggctgtccttgctgacgacctggcgaactggctcaccgttgattgccaccaggcgtcccggtaccaccggatacagcggcgcggcgtgatcagacagcgtctcgatgcgctgcgcaaacgcgtcccggtcgctgggcagcacgttgagcacgaagtggttgggcgcatcatccggtaactggttctgccaggtatcgagcagttcgccgcgcagcagggcgatcaaggccatggccagcaatatcaggccaaaggccagggcctgaccggcagccgccaacggatgacggagcagctgtccgaggccaaggcgccagctcagcgacgctcccgaaagcgagcggcgcagcgcccgcaatgccagcaacagcaatccgcccagaatgaccgtggccagcaggccgccaccgagcaacgctagggtgattttcagatccagactcaggcgccacatgatcaggcccagggcagccaccgccgcgccgtagaccagccaggtgctcggcgggaccggcaggatgtctcggcgcagcacccgcaatggcggcacgcgacccagcgcggccaacggtggcaaagcgaaaccggctagcgcgaccaggcctgtggcaatgcccgccagggctggccatagcgtggcgggcggaacctcgccgaccaccagatcgcggagaaggaaaaacaggccatgttgcgccgtccagcccagtaaagcccccgccacgctggccgctacgcccaggtagccaagctgcaagccataaagcgccagcgtctcgcgtcgggacagccccaggcagcgcagcagggcgcttgcgtcgaagcggcgagcggcaaagcgtgaagccgaaagcgctaccgcgacgcccgccagcagcacggcggcgaggctggccagattgagatagcgctcggcacgcgacagcgcgccgccgatctggcgattaccgtctttggcggtttcgatgcgttggtgaggctgtagttcgggtttgactgcgttctcgtaggcctgtagctgcgcaggcgaaccgcgccatagctctcgatagcgaaccctgctgccgggctgcaccacgccggtggcgtcgagatcgtcgaggtgcatcagcacgcgtggcgtcaggctgtagaaatcgcccacgcgatcgggctcgtaagtcagtactcgggtcaactgcagctgcttgttgccgatctcgatctgatcgccgatccgcaggtcgagcgcggcgaacagacgcgcttcggcccaggcttcccctggccgcgggcccgcgccgggctgttcgggctggtaaggcgccgcggcgctgcgcaaggttccgcgcagtggataatggtggtcggccgctttgacgctggttagctgcaggttatcgtcggtcgccacgacgctggaaaattcgaccacgcgggcatggtcgagcttcaactcggtgccggcctcgatctgttcgggcgcggcaggcgcgctgccagtgagtaccagatcggcccccaggaattcggtcgcgcgcaacagcatggcgtcattcagacgggcgccgaaataaccgatggcggtgctcgacgcgacggcgatcaatagcgcagcgaagagtatgcgcagctcaccgccgcgtgcatcacgtagcagctggcgcagcgccagggcagccagtcgtgtggcaggcacacgcttcatcgcgtctgctcgtcgctgagctggcgaccgccttctagtcgcagcaggtgctcgcagcgctgggccaggcgttcgtcatgggtgaccagcaccagggtggtgccgcgctcgcggttcagctcgaagagcaactcgatgatgttggcgccggtgtgactgtcgaggttgccggtgggttcgtcggcgaagagcacctcgggttcggcggcaaacgcgcgagcgaccgcgacacgctgctgttctccgccggacaactgcctggggtaatggtgcaggcgagcgccaaggcccacgcgccggagcagctcggtggctttcatctgcgcgtcacgctggccatgcagctcaaggggcagcatgacgttctccagcgcgttgaggctgtccagcagctgaaacgattgaaagacgaaaccgacatgttcggcccgcactcgcgcgcgctggtcctcatccaggtctccgagctggtggccggccaggtgcacctcgcctgaactgggcagatccaggccagccagcaggccgagcagcgtcgatttgccggagccggatgtgccgacgatcgccaggctgtcacccttgttcaggctcagcgacacctcatcgagtatggccagctcgccttccgcgctgggtaccgctttgctaaggttccgtgcgtagagaattctgaccgtcatgggagttccgatgcgaaattggctgcgaagtggggcgttggtgctgctgtgttgggctcagggagccgtggcgggaacagtgctggtggtcggcgatagtatcagcgccgctttcggcctggaaaccaaccaggggtgggtgcacatgctccagcaacgccttgatacagaagggttggatcaccaggtcgtgaacgcttccatcagtggcgataccagtgccggagggctggccagactgcccgctctgctcgacgagcacgagcccggcgtggtgattctggagctcggtggtaacgacggcttgcgtggccagcctcctgcgcagctgaaaggcaatcttgcggcgatgatcgaccaatcgcgcgcggctggtgcccgcgtcctgttgctcggcatgcgcctgccgcctaatctcgggcagcgatacaccacggcgttcgctcaggtatatgacgccctcgccgaggagaacagcctgccgtacgtaccgttttttctagagggcgtgggtggggtcgaaggcatgatgcaatccgaccgcatccatcctgcggcgggtgcccaacaacgtttgctggataacgtctggccggtgctcgagcccttgctttgaagcttgcgcgcggctactgtcgcgcccctcgatcggagcctcaaatgccgcgcccagcctggaccctgtttgcctaccgcctcattgtgccggatgagcagttcgacctgttcgcgtgtcgcgaaaatcgtctgcacctggccctgcggcaactggaattgaacggacaggtcgatcgcacgctttgcggtggcttcctaccggcgcgcccccgttggcaggacctggaccggccgatgctcaaggatcggcggctctgttcggcctgtcgtgatgcgctcggtgcccaacgcaaaggccttccgtctgccgtcagcgcctggtagctcggcggctgccgtcgcttcgagtacaatgctggccacacaaatatcatccccaaggaaaccctcaatgctttcgcgtgcgtctgcagtcgcctcctgtatgtcattcgctgctctgttgctggctgggcaggccacggcgctggaactgccgctgcctccggaaggcgaggacgtggtcgggcagatccaggtcatcaaggcgaagtacgaagacacgttcgcggcgttgggcgaagcgcatgatcttggctatctggaactcgtggcggccaacccgggcgtggatccctggctgccgggagaaggcacggacatcattctgccgacgcgttacatccttcctccgggcccgcgcgaaggcatcgttatcaacctggccgaataccgcctgtattactacccgaaaggggagaaggtggtgcacacctttccgctcggcatcggccgggaagggtggggctcgccggttggcaacacccgtatttcggcgatgaccagcaacccggcctggtatccaccacagtcgattcgagacgagcatgcggccgatggcgatccgttgcccaaggttgtaccgccaggtccggacaacccgcttggtccgtacaagataaacctggcactaccgggctatctcatccatggctccaacaagaagttcggtatcggtatgcgtgtcagtcacggctgctttcgcatgctcaaccacgacgtgttggagctgtcggggttggtcaaggtagggactccggtacggatcatcgacgagccctacaagttcggtgtgagcgagggtaaggtctatctggaggcgcatacgcccttgcaggatgaggacaagcacatgacgctcatggacaagcacgcggtggtgatcaatacgctgctcaagcgtgacgaaaccgctggcgtactggagctggattgggaaatggtgcgggaaatcattgccggcgaagatggcctgccgatccagatcgccgagcaggggcaatccctggccaatcacgcggagccgattttctgaggctctgctatcggcaaatcgctgcgtaccgatcgcccataaaaaagccgacctcgtgaggtcggctttttttcgcctgaagcttacttgcggctggcgcgttccagcatacgcagtgcacgctcgttggcttcgtcagcggtttgctgagccttttgagcagcctgcagagcctcgtcggctttgctgtacgcttcgtccgcacgagcttgggcacgggcagcggcgtcttcggtcgcagtcagacgggcttcgctttctttggtcatgctgttgctgcaaccagtagccagaactgcggcgaaagccagagcagaaaatttcagaacgttgttcatcgtgttccccttaaggatgaaatccatggcaacttccgttatggaaagttggcgcgcacatactacctatatgttgcgctaagtaaactgagccaagcagccattaccacaatttttctgccagctcatttcttttcagggtgccgaacagccaggttgattgaaaaataatcaaagcggccgttgcactcgttaaatggaccggcgcggtaccccaaaagttgcacttggcagggcttgcacgcaggaacgtcatgtcgatcaagcttgatccccgtacttgtgcttagagcaattgaagcaaggtcttacatggcggtagcatgcagcgtccactaacaagaataggatcgtgcgggctatcgtgcgcacctccaatcgaaagggcaggcatgcctgcaaaggaggcgagatgatcgacaagctaaccgtccaccatgatcgaacgggccaccagttcgaaactaccgtggacggctatcgcgcctatttggcttacgtcgatttgggcaagcagaccctggatatataccggacgttcgttcccgatgcgcttcgtgggcgtggagtcgccgcggtgctgacgcagcacgctcttgattacgctgcgcgggaaggctacacggtcatcccttcatgctcgtacgtggagtggtatatcgagcgccaaggtgatgcggcagaagatatcgatcgcgagccataagaaaacgccgacctgggcggcgtcttctctggttcgaatctgtgtcagccgcgagcgcggctgggcaggacggttttcaatttagcgtgcatgccaaggatcgccttctcggtggcgtcccagtcgatgcaggcgtcagtgatggaaaccccgtactgcaagtcagccagatccttgggaattggctggttgccccaacccaggtggctctcgaccatcagcccgacgatcgaattgttgccttcgaggatctgattggccacgttgtccatcaccagcggttgcaacgccgggtccttgttggaattggcgtgactgcaatcgaccatgatgttgaggccgatgccggccttgcttaattcctgttcgcacaccgcgacgctgaccgagtcatagttcggcttgccgttaccgccgcgcagtaccacatgaccgtaagcattgcctttggtggtgacgatcgacacaccgccggactggttgatgccgagaaagcgatgcgggctggacaccgattgaagcgcattgatggcgaccgtcaggctgccatcggtcccgttcttgaaacccactgccgaggaaaggccggacgccatctcacggtgggtctgggattcggtggtacgtgcgccgatggctgaccaactgatcaggtcctgcaggtactgcggggaaatcgggtccagcgcttcggtagcggtcggcaggcccatctcggcaaggtcgagcagcagctggcgtccgatgtgcaggccatcctggatcttgaacgagtcatccatgtacgggtcgttgatcaggcctttccagccgaccgtggtgcgcggcttctcgaaatacacccgcatgatcaggaacaggctgtcggataccttctcggccagcaccttgaggcgttcggcgtactcgtgcgccgccttgaggtcatgaatcgagcaggggcctatcactacgaacagtcgatggtccttgccgtcgaggatgttgcgtactacctggcgtccttcggaaaccgtcttcagtgcggtgggtgtcagcggtatttcgcgcttcaactgttccggagtgatgagtgtctcgttggaggaaacgttaaggtcatcgatcggtaaatcagccatcgtgttctcgtcagggtcgcagatgccgtccgccagccatcccggtgcggcggaagggctcagggcgcagcggggaagcggaaccttatcgcgtattgcgtcgcttcgacaatgctcttgaagtccgactgctgcctccatggcagcgagcgccgcgggcatccgtacgggacggctgtgcgctgctccgggacgctgataaggtggcgattcaagcgcgcccgtgactgacggcgctccactgacctgtggctggagtcttctgcatgaccgcatccaaacctcgaatcggaatcatcggtactggcgctatcggcggcttctacggcctcatgctcgcgcgggcgggttacgacgtgcattttttgctgcgcagcgagtatgagaccgtcatgcagaacgggctgcaggtgaacagcgccgtgcatggttcgttgcatctggatgcggtacaggcctaccgcagcgcggcggacatgcccaagtgcgactggcttttgctgggtgccaagagcaccagtaatcccgagctggcgccgttgatcgccaaggcggcggggagcgatgccaaggtcgtggtgctgcagaacggcctgggcatcgaggaggatttgcgtcgatcgctgcccgacgacgttcatctgtttggcggcctgtgttttatctgcgcgcaccgctccgcgctgggcgttgtcgagcatcaggcgcttggagggataaatatcggttaccactcgggccccgcagcaggcatggaacaacagcagacgttggtcgatgagggggtggcgatgtttcgtgccgcgggcgtcgacgccaacgcggcgaccaatcttgcccaggcgcgctggcagaaattggtctggaacatgccgtacaacggcctttccgtgctgttgaatgccggaacggcacctatgatggccaacccggacagccgcgccctgatcaggtcgatcatgctggaaggccagggtgcggcggcggcttgcggccacccgctgccggaagcgctggtggatcgcatgctgatggcgaccgatcacatgcccaattatctgccgagcatgtaccacgaccatgcgaaccgccgtccgatggagctcgatgcgatctacgccgcaccgttggcggctgccgcaaatgcagggtttgcgatgcccaagaccgaggcgctgtaccaggctctgcgtttcatctctgacgctgcgaaccgctagatcatgcggacgcgtgcgtgaggcgaaccgattgccggatgagcgcccgagtcgataatggttcgtgctcggggtgctaagctcaaacgggccgcgtcatctttttaccgtgcattcacatgctcgcttggcgttgtgctggccaaagcacgggtaccttgggcgcgccttgtttttttacgtcgcgaatgtggcagtggggtgacggcgctggattcgtgacgagcggtacatagggaaatggcctagaattcccacgttctggtgcacgaagttataaaagtggtggcgttcaggcgccattggcctttgagggaactctatgaagcttcagcaactgcgttacatctgggaagtggcgcaccatgacctcaatgtctcggctacagcgcagagcctgttcacgtcgcaacctggcatcagcaagcaaattcggctgctcgaggacgagttgggagtggaagtctttgctcgtagcggaaagcatctgactcgcgtcactccggctggcgaacgcatcatcaccacagccggcgaaattcttcgcaaatgcgaaagcatcaaacagatcgctcaggaattctccaacgaaaagcgcggcaccttgagcatcgccaccacccatacgcaagctcgctatgccctgcctcaggtcatcagcgcctttatcaagcagtacccggacgtgtcgctgcatatgcaccagggtacgcccacacagatcgcggaaatggccgccgacggtaccgtggacttcgcgattgccaccgagggcctggagctgttcggcgatctggtgatgatgccgtgctaccgctggaatcgctgtgtggtcgtgccgcaggggcatgcgctggcgaaactcgaaaagctcacgctcgaggcgttggccgagcatcctatcgtgacctatgtgttcggcttcaccggtcgctcgaaactcgacgaggccttcagccacaaggggctgtcgccgaaagtggtatttaccgccgcggatgcggacgtcatcaagacctatgtgcgtctcgggctgggagtgggcatcgtcgcgcggatggcggtcgacgccaagctcgatccggatttggtggtgctcgatgccagcgagctgttcgagcccagcgtcaccaagatcgggtttcgccggggaacctttctgcgcggtttcatgtgcgatttcatcgagacattcgccccgcatcttgatcgggaaatgctcgagaaggcggtgcaatgccgaaacaaggccgagttggaccagttattcgagcacgtcgagctgcctaccttttagcgcagcgagccctggccggcgtaaattcgctgcgatccggcccggcatcgcagcggcggctagagcgaaacctgtcattgcgggatgactgacggtgcgcccctgagctgactcgcagagccagctcagggtgcctggcttaccgcgacggttcaggctttggcaatcagattcccggcatgcaggccgcattctttctgcgtcgcctcttcccaccaccagcggccctcgcgttcatgctggttcggtagtaccggacgggtacatggctcgcagccgatgctgatgaagccgcgctcgtgcaggctgttgtagggcacttccagcatgcggatgtaggtccagacgtcctcactgctcatctgcgccagcgggttgaatttgtagagcgtgtgctcaggggtcgagaaggcgctgtcgatctccagcaccgatacctggctgcgagtaccggggctctggtcgcgacgctggccggtcgcccatgcgcgcacgccagacagcttgcggcgcagtggttcgatcttgcggatcccgcaacattcgccgtggccgtcgcggtagaagctgaacaaccctttttcgttcaccatgggttggagcagggcagggtcgggcgtcatgatttcgatcgggatgccatagtgctcgcgaacctgttcgatgaatcgataggtttcgctgtgcaggcggccggtatcgaggctgaacaccttgacgttcttgttcagcttccaggccatatcgaccagcactacgtcttcggcgccactaaaagaaatccagaggtcgtcaccgaacaggtcgaaggcaagcttgaggatgtcttgcggggatttgccggcataggcggctgccagctcggctacatcaattgattggctcatcaggcggcttccttggttggcgcttcggcgctctgctggccgcggatgttaacaaataggctttatgtctctaaataacgtttaaggtgaacggcgctaactttaacgaataagggttcgcgttgcgccacttcacccttgtcgttagagtgcccatccatttttttgctttgaggagtggcccgtggaaatagcctgtctcgacctggaaggtgtgctggttccggaaatctggattgcctttgccgaggccaccggaatcgaatcgctccgggcgaccacgcgggacattcctgactacgacgtgctgatgaaacagcgcctgcgtattctcgatgagcatggcttgaagctctcggatattcaggcggtgatcgccaccctgaaaccgctcgatggcgccgtcgagttcgtcgactggctgcgtgagcgcttccaggtggtgatcctgtccgacaccttctatgagttctcgcagccgctgatgcgccaactgggtttccccacgttgctctgccatcgcttgattaccgatgaatcggggcgtgtggtcaactatgagctgcgtcagaaggatcccaagcgccagtcggtcatcgcgctgaaaagtttgtattaccgcgtgattgcggcaggggattcgtacaacgacaccaccatgctggccgaagcgcatgccggcattctcttccatgcgccggacaacgtcattcgtgagttcccgcagttcccggccgtgcataccttcgccgagctcaagcaagagttcatcaaggcttcgaatcgcccgctgacgatataagcggcaccggcgctggaggtcggttggagcgcgcatcgagcccaacggacctccagcccagctacagggcttccagcgtctccatcagcactcgcaccttgtcgagggtctcctggtattcggcctgccagcgcgagtccgcgacgatgccgccgccaccccagcacgtggcctggtcgttctggatcagcaaggtgcgaatggcgatagagctgtccatctcgccacgaacgtccagatagagcagcgagccacagtagatggagcgctgagaaggttccagctcatcgatcacctgcatggcgcggatcttcggtgcaccggtgatcgagccgccagggaagctgccggccaacagatccagtgcatccttgccagtcgccaaggtgccgcagacgctgctgaccaagtgatgcacgttcggatagctttccagagaaaagagctcgggcacccttacgctgccgatttcgcaactgcggccgagatcattacgcagcaggtcgacgatcatcagattttccgcgcgatccttctcgctggtaagcagcgcctggccctcggcctggtcagcctgtggatcgctccgacgcggacgcgtgcccttgattggccgggtgttcacgacgccattggcgagttgcaggaaacgttccggagagaggctgacgatggcgccgccctcgacggcgatgaaccccgagtagggcgtcgggcaggccgcgcgcaacgcctgataggcctgccagggatcacccgtacaaggtgcgcggaaacgctgcgcgaaatttacctggtagcaatcgccggcctggatgtattgctggatgcgctcgatggcgtgctgatattcggggcgctcgagatcggcggtaaaaggtgagtcgagcttgaaggaggtgctttcgggttgcccctccgattcgaagagctggatcaatcgcaagcgatcggagtcggccagcgccggatggaaaaccagctgtgtcgttcgttgctgatggtcgctgatcagggcccaggcgtagaggccgagacgagcaggaggcagtgccaggtccttgatcgcgacggcggggaggcgttcgagccgcgcgccgaaatcgtagccaaggaagcccaggacgccgccgacgaaaggcagctcgaaacccgctggcggcgctgcctcgccgagtctgtgcaaggctgcccgaacgcgctcgaagaaggccctgccggtttccgcctcgcctggttccagggtttccagtggccaggcactgagcagatcgtagcggcctcgttcggcggctgggcgcccggagtcgagcagcaccgcgcccggtgaacgacaaatacgttcgaaccggaggcgcggatcgggttggtacgcaagggagtgaaccgtgcagaaaggcattggaggtttaggtccggggcgccccggccatcttctggccgggttttggctcatgcgtggctcggtatgtggccgaacagttcctgggcgaatcgcacccgttcctccggtgtctcctgaatgccctgtgccttgagctcttctatgcggttttccaccgcttgcgtgcgatgggtcaggccgcaatcgttcgcgatctgaatgttcagcccagggcgcgcgttgagctccagaatcagcggacccttgtcctggtccaggaccatgtcgacgccgatgtagcccagcccgcacagctcatagcagccggcggcaagcttcatgaagccgtcccagttcggcagttgcacgccgtccaccgcattggtggtatcggggtgtttggtgatcttgttgttcaaccaggtgccccgcagcgtgatgccggtggccaggtcgacgccgacaccgatcgcgccctggtggaggttggccttgccgccggattgccgagtcggcaggcgcaacatcgccatcaccgggtagcccatcagcacgatgatgcgaatgtccgggacaccctcataactgatgctcttgaagatcggatccggcgtgacgcggtattcgatcaatgcgcggtcgcggtggccgccgagcgagtagaggccggtgagaatgttggagatctgatgctcgatttcatcatgcgtcatgatcttgccggacacggtccggtagcgaccttcgaagcggtcggcaatcaccaggatgccgtcaccgccagcaccttgcgcaggcttgacgacgaaatcgacgtggtccttgacgatgtccttgagcttatcgatgtctttctcggtctcgatgatgccgtacatctccggtacgtcgatgccggcctcgatcgcccgttccttggtgatgatcttgtcatccacgatcggatacaggttgcgcttgttgtacttgagcacgtaatcggcgttgcggcgattgatgcccatgatgcccttggcttcgagggccttccacgtcttgatcagaccgaacatggctcaatccttcagaaaggctttgaagcggaacagctcggtcaagcggtagccgcggtagcgacccatcgccagcatgaagcccaccatgatcagcagtacggccgggaaggtgaacatgaagtagatcagctccgggatgctcatcagcaggtgggcgagggtggcggcgatcaacgtgccaaccgcaaccttgaacgcatgaccggcgccgcgctcttcccaggtgatggagaggcgctcgatcgtcatggtcagaatgaccatcgggaacaaggcgacggagagccccctctccaggccgagcttatggctgaacaggctgatgaccgcgatcagtaccacaacgaaggtcagcaccacggaaagacgcggcagcatttgcagtttcaggtgctcgagataggagcgtagcgagaggccgagcgccgtgatgatggtgaacaggacgatgccgaagccgagctgggtctcgcgaaacgccagggcgatcagtacgggggtgaaagtaccaagcgtctgcaggccgccaaggttgcgcaggatcaggatcaccagcacgccgatcggaatcatgatcatgatctgataggtctgctgggtttgcagcggcaggccgtacagcgagtattccaggaagtccgcgtcggtgttctcgtcggtcagcttggccaggcggatggcgttcatctcgctgctgttcagcgtgaaggtaacctgcgcgttgcggccgccctcgaggttgaccagtggttcgtcgcccgtccaccagaccagccgatccgccggcagtccttggtcgccattttccgggttgaaatacagccacttgtcgccgttgaagctgcgtagccacagttcaggcgtctgtgcggtgtcggcggccaggcgcactgtgtgtacgcgctccatcggtacatgggcgatcgacaacagcaattcgatgatgcgcgccttgttggctggcgaggcgtcgccgccgagcaacagtttgacgttgtcgtcgttgtcgttgttgacgcgcttgatggcctcgctgatgaaggtctcgacgtccgccgagtgttggcgaatcggcgagagcagtgcttcggcggcaattttctctgcgccttcgaccggaatgctgtcgcggaagatcgggccgttggccttggtttgttcaccgctatagcgccgggtcagaaccaggcggtagtagagcgtctggttgccgctgacccgccgtgccgaccaggtgacacgacggttgccgtcggcgcggttgatgctcaccccatagttgttggagatgaagctctcgttgaggctgacgaactcctggttcagcggcggtacgaacatctgcagctttaccggatcgcgcgggttggcctggaattcgatcttcgcatcgatgttccaaagatcgtccgtctcatcttcagtgatcggaatgccgagaatgaaaatctggtaggcggtgatcgcgatgcccagggtgacgagcagaaaaatcagaactttcagatgcagggtaagggcgcgcatggaattactcgtcagcgtcggaatcggtagtgcagccgggctcgccagcagcgtacttaaggcttgggtcgaccagggcatcgaagcgcgcgagcgcatcggaacctattaaaagtgggtattggaatgcacttcggtccgtgaggttcacttcgatgctgcgtttagccttgcccatgcacataacaagctctacgacggggcgcggcgtgtaggttttttcttcttctggatcgaagtcgccggcacggcgcttgattttgctgatgcgctgcaggggcagttcgatcggacggttgtgagcttcgtcgatggctagatagaagcggacccagcgctctccgttacgtttgaaccgctcgatatcgcgagcgctgagcgatgccgtctgtgcgccggtatcgagtttggcgggcacttccagaccgaagtcgggcaatcccacgtgttcgttcaggccatagatggttttgccgccggcttgggcgagacagggaaagaccaagaggcagaacagcagaagacgaggtttggcgggcatagatccagaattaatcgagtcggggaacggtggccggagcgacgacccatggagtggggcgtggcgaggctgtcgccacgcgcggcatatagctcggcattctagcatggcggccgaatcgcgcggctaggcctaacaaccatcatcgccgtcgttacgcgtcgatatttttcgagttgctttgaagcgattgtcgacaatctacttttgtatcattgactggctggggtatgcgggcttactttgtctgtacttcacgctcaggtgtcaacaatatgctcgatgctttggatgcgcctcgctccgacttggtcgataccggaaccctgtctgagcatgttttccgattgatccaggctgccatcgtcaaaggcgagatcgccccgggcagcaagatctcggagcctgagcttgcgcgtacatacggtatcagccgtggaccgttgcgtgaggcgatacaccgccttgaagggcagaagctgctggtgagagtgccgcatgttggcgcccgcgtggtgtcgctcagtcatgcagagctgatcgagctgtacgagatccgcgaatcacttgagggcatggcttgccggctcgctgccgagcgcatgagcgaggcggagatcgatgaactgcgacgtgtgctggagacccatgagcgggacgccgcgtttcaggccggcgttggctactaccagcaggaaggcgacttcgatttccactaccggatcatccagggcagcggcaatcgaaccctgacccagatgctctgcggcgagctttaccagttggtacgcatgtaccgcatccagttttccgcgacgccgaatcggccgcgccaggcattcgccgaacatcatcgaattctcgacgctatcgctgatcgcgatggcgagctcgccgagctgttgatgcgccgacacatcggcgcctccaaacgcaatatcgagcgccattaccaggctgcaacagacacacaaccaagaggtgaggcatgacacttcctacccccggccagcgtttccgtgatgcggtggccagcgagcatcccctgcaggtggtcggtgcgatcaacgccaaccatgcgctgctggccaagcgtgccggtttcaaggcgatttatctgtctggcggcggcgtggcggccggctcgctgggtttgcctgatctgggcatcagcggtctggacgacgtgctgaccgatgttcgacgcattaccgatgtgtgcgacctgccgttgctggtggatgtcgatactggcttcggttcgtctgccttcaatgtggcgcgtaccgtcaagtcgatgatcaagttcggcgcggcggccattcacatcgaagatcaggtcggggccaagcgctgcggacatcggccaaacaaggagatcgtctcgcagcaggaaatggtcgatcggatcaaggcggccgtcgacgcccgtaccgacgacagtttcgtgatcatggcgcgtaccgatgcgctcgcggtcgagggcctggagtccgcccttgagcgtgctgccgcatgcatcgaggcgggcgccgacatgatctttcccgaagcgatcaccgaactggcgatgtacaagaccttcgccgagcgggtaaaagcgccgattttggccaatatcaccgagttcggttcgacgcccctgtacaccaccgaagagctggccggcgccgatgtctccctggttctctatccgctgtccgcgttccgcgccatgaacaaggcagccgagaacgtttacaccgcgattcgtcgcgatggcacgcagaagaatgtcatcgacacgatgcagacccgcatggagctgtacgagcgcatcaactatcacgccttcgagcaaagcctcgacgccctgttcgcgcagaagaagggttgagctaaccggggcgctctgcggcgccccgtccccggggcgagcaatttgcggtatccagaacaaatccaataaggagagagcaatggctgaagcaaaagtattgagcggcgccggcctgcgtggccaggtagccgggcagactgccctgtgcacggttggcaagaccggggcagggttgacctatcgtggctatgacgtgcgtgaactggctgcacaggcggagttcgaggaagtcgcttacctgctgttctatggcgaattgccgaacgcgcagcaactcgacgaatacaaggcgcgcctcaagacgatgcgcgatctgcctgctgccctgaaggaagtgctggagcgaattcctgccgatgctcatccaatggacgtcatgcgcaccggtgcgtccatgttgggaacgctggagcccgagctctcgttcgaccagcagcgcgacgtagccgagcgactgatggccgcgttcccggcgatcatgtgttactggtaccgcttcacgcacgagcagcagcggatcgaatgcagcagcgatgaagacaccctgggcggacatttcctcgcgctgctgcatggcaagaagccaagcgagctgcacgtgaaagtgatgaacgtctcgctgattctctatgccgagcatgaattcaacgcctcgacattcaccgcgcgggtctgcgcttcgaccttgtcggacatgtattcctgcatcaccggcgccatcggctcgctacgcggccccttgcacggcggcgccaacgaggcagcgatggacatgatcgagcgctggaaatcgcccgacgaggcggtacagggcatcctcggcatgctcgagcgcaaggacaagatcatgggcttcggtcatgcgatctacaaagagtcggatccgcgcaacgaggtcatcaaggtctgggcgaaaaagctcgccgacgaagtgggtgacaccgttctctacccggtatcggtcgcggtcgacgaaaccatgtgggcgcagaagaagctgttccccaacgccgacttctaccacgcctccgcgtaccacttcatgggcatcccgaccaaattgttcacgccgatcttcgtctgctcgcgcgtaacgggttgggcgtctcacgttatagaacagcgggccaacaaccgaattatccggccgagtgccgattatgtcggcccggagcagcgcaaggtcgtcccgatcgccgagcgctgattcacaggcggggaggccttgactgtctcccctctggtttccaccacttactggatcgagtccctccggcatgaacacagaacaccgcaaaccgttgccaggcactcagctggactatttcgacacccgtgcggccgtcgaagccatccaggcgggtgcgtatgacaagctgccctatacctctcgcgtgctggccgagcagttggtccgtcggtgcgatccggcgatgctgaccgatgcgctgacgcagatcgtcgagcgtcggcgtgacctggatttcccgtggtacccggcgcgagtggtctgccatgacatcctgggccagaccgcgctggtagacctggccggtttgcgcgacgcgatcgccgagcagggcggtgacccctcaaaggtcaatccggtcgtgccgacccagttgatcgtcgaccattcgctggcagtggaattcgccggcttcgatccagaggccttcgaaaagaaccgcgctgtcgaagagcgtcgcaacgaggaccgctttcacttcatcgagtggaccaagaccgcgttcaagaacgtcgatgtgatcccggccggcaacggcatcatgcaccagatcaacctggagaagatgtcgccagtgattcaggcgcgcggtggcgtggctttcccggatacctgtgttggcaccgattcgcacacgccgcatgtcgacgcgctgggcgtcatcgccatcggtgtcggcggcctggaagcggaaacggtgatgctcggcctgccgtcgatgatgcgtctgcccgatatcgtcggcgtgcgcctgaacggtaaacgtcagccgggcattaccgcgaccgatatcgtcctggcgctgaccgagtttctgcgcaaagagcgagtcgtcggagcctgggtcgagttcttcggcgaaggcgccgacagcttgaccatcggcgatcgcgcgaccatctccaacatgtgcccggaatacggcgctaccgcttcgatgttctacatcgatcagcagaccatcgattacctcaagctgaccgggcgcgagccggagcaggttgcgctggtcgagcagtacgccaaggataccggcctgtgggcgaccgcgctggaaggtgccgaatacgagcgcgtactcgaattcgacctgtccagcgtggtgcgcaacatggcgggcccgtccaatccgcacaagcgcctgccgacctcggcgctacacgagcgcggcattgccgacgaggccaagctggccgcagccaaggccgaagaagctgaaggccggctgccggatggcgcggtgatcatcgcagccatcactagctgcaccaacacctccaatccgcgcaacgtcgttgccgccggtctgctggcgaagaaggccaacgagttggggttggtgcgcaagccttgggtgaagacgtcgttcgcgccgggttccaaggtcgccaagctgtacctggaggaggccggcctgctgagcgagttggaaaagctcggtttcggcatcgtcgcctacgcctgtaccacctgcaacggcatgtccggtgcgctggacccgaagatccagcaggaaatcatcgaccgcgacctgtacgccacggcggtactgtccggtaaccgcaacttcgatggccggattcatccgtatgccaagcaggcgttcctggcttcgccaccgctggtggtcgcctacgccatcgccggtacggtgcgcttcgatatcgagcaggacgtgctgggcaccgacaagagtggcaacccgatcacgctgaaggacctctggccttctgacgaggagatcgatgccatcgtcgcgtcctcggtcaagccggagcagttcaagcagatctatatcccgatgttcgatctgggcaccatcgaagaggccaagagcccgctgtacgactggcgtccaatgtccacctacatccgccggccgccttactgggaaggcgcgctggctggcgagcgcaccctcaaaggcatgcgtccgctggcgatcctgccggacaacatcaccaccgaccatctgtcgccatccaacgccatcctgctggattcggctgccggtgaatacctggcgaagatgggcctgccggaggaagacttcaattcctacgccacccaccgtggcgatcacctgaccgcgcagcgcgccaccttcgccaacccgcagttggtcaacgagatggctgtggtcgacggcaaggtgcagaagggctcgctggcgcgcgtcgagccggaaggcaaggtcatgcgcatgtgggaagccatcgagacctacatgaaccgcaagcagaacctgatcatcgtcgccggtgccgactacggtcagggctcctcgcgtgactgggcggccaagggcgtgcgcctggccggtgtcgaggtgatcgtcgccgaaggcttcgagcgcattcaccgtaccaatctggtcggcatgggcgtgctgccggtcgagttcaagccgggcaccacccgcctgacccttggcctcaatggcaccgagaccttcgatattgaaggcgaattgtcgccgcgctgcgacctgaccctggtcattcaccacaagaacggtgaagaaacccgcgtcccggtcacctgccgcctcgacaccggggccgaagtcagcgtgtaccaggccggcggcgtgctgcagcgtttcgctcaggacttccttgcgtcgactgccgcctgacgccgtagggtggatggcgcttttccatccgccgaatcaattctcgcggtggatcggtaaagcgtgatccaccctacggcccatccattcttcagccaggagtcactcatggctcatcagcctcagatcaagattcccgccacctacatgcgtggcggcaccagcaagggtgtgttcttccggctgcaggacctgccggaaagctgccaggtgccgggccctgcgcgcgacaaattgttcatgcgcgtgatcggcagccccgacccatattcggcgcacatagacggcatggggggcgccacgtcgagcaccagcaaatgcgtgatcctctccaaaagcactcgacccgatcacgacgtcgagtacctctatggtcaggtgtcgatcgacaagcccttcgtcgactggagcggcaactgcggcaacctctctaccggcgccggcgcatttgccttgcatgccggcctggtgagtgccgagcgcattccgcagaacggcacctgcgtggtgcggatctggcaggccaacatcggcaagaccatcatcgcccatgtaccggtcaccaacggccaggtgcaggaaaccggtgatttcgagctggacggcgtgacctttccggcggcggagatcgtgctggaattcctcgatccgtccgatgacggcgaggagggcggttcgatgttcccaaccggcaacctcgtggacgagctggaggtacctggcatcggtccgctcaaggcgaccatgatcagcgcaggcatcccgacggtgttcgtcaatgccgaggacatcggttaccagggcaccgaactgcgggaagacatcaacggcaaccccgaagcgttggcgcgtctagaggcgattcgtgtggctggagcgctgcgcatgggcttgatcaaaacagcggaagaggcactgacccgccagcacacgccgaaggttgccttcgtttccccgccaaaaagctatcgggcctccagcggcaggaacgtcgaagcagccgaggtcgatctgctcgtgcgcgcgctatccatgggcaagctgcaccacgccatgatggggacctgtgcggtggccatcggcaccgcggcagcggttcccggcacgctggtcaacctcgcggcgggcggcggcgagcgccaagccgtgcgcttcggccatccctccgggacgctgcgcgttggtgcagaggcgaagctggtcgacggccaatggacggttaccaaggcgatgatgagccgcagtgcgcgggtgctgatggaaggctgggtgcgtgtgccaggcgacgcgttctgatgtgtctcagccgccggaaagcgactcctttcggccaaaaaacgcaaaagtccgcacaaagcggactttttgttgtctagcagaacggcacttatttgagccggcgctcgacgcctttctcgacaagaatcttggcggatatttcctccaccgagaaatgtgtcgagttgatgaagttgatgttctcgcggcggaacaggttttccacctcgcgaacctcgaactcgcactgggcgtagctggcatagcggctgttgggcttacgctcgttgcggatcgcggtaaggcgatcagggtcgatggtcaacccgaacagcttgtcgcgatgggttttgagcgcggatggcaattgcaggcgctccatgtcgtcttcggtcaacggatagttggcggcgcggataccgtattgcatcgccatgtacaaacaggtgggcgttttgccgcacctggagacgccgaccaaaatcaggtccgccttgtcgtagtaatgcgtacgggcgccgtcatcgttatccagggcgaaattgaccgcatcgattcgctccatgtagttggcgttatggctgatcgagtgagatttgccgaccgaataggaagagcgtgacatcaattcatgctccagcggagcaaggaaggacgagaagatatcgatcatgaagccatttgactcagccaggatgtcgcggatttcctggtttaccaacgtatcgaatatgatcggccgtgcgccgtcgctttccgccgctttattgatttgctgtaccattgcccgcgctttttcggccgtatctatatatggtcgcgtgagcttggtgaaactgatcgtttcgaactgtgccaacaggctttggccaagtgtttcggccgtaatgccggtaccgtcggatatgaaaaaagcagttcgtttcattgcgcctgggaccttaagtcaagaacggttctcagctatagtaggccccttcgccgagcctcgactggcaggcattgttacttattttgcagggtcaggccaccgtgccgcggagcggcacgaatcgagtttccaacacaacgtggagagatcaccttggtagagtacgtagtttccctcgataagctcggcaaccatgatgtcgagcgtgtagggggcaagaacgcctccctgggcgaaatgatcagcaacctagccggcgccggagtctcggtgcctggtggtttcgccacaacggcgcaggcctatcgggacttcatggaactcagcggcctgaacgagcagattcacgcactgctcgatgctctggacgtcgatgacgtcaatgccctggccaaagccggctcgcagattcgcggttgggtgatggaagccgagttcccgccgcagctggatgccgatatacgtaccgcctttgcagaaatggctggcggcaatgacaacatggcagtcgccgtccgctcctcagcgaccgcagaagacctgccggacgcatcgttcgccggtcagcaggaaaccttcctcaacattcgtggcgtggacaacgtgatccgcgctaccaaggaagtcttcgcctcgctgttcaacgaccgtgccatcgcctatcgcgttcaccagggcttcgaccacaagttggtcgcactgtccgcgggcgttcagcgcatggtccgctccgagaccggcactgccggtgtgatgttcaccctggacaccgaatccggcttccgcgacgtggtgttcatcaccggtgcttacggtttgggcgaaaccgtcgtgcagggcgcggtcaaccctgatgaattctacgttcacaagcacaccctggaagccgggcggcccgcgatcctgcgtcgtaacctgggcagcaaagccatcaagatggtctatggcgaagaagccagcgccggcaagtcggtcaagactgtcgaggttgatcaggctgatcgcatgcgtttctgcctgagcgacgaagaggttgcaaacctggcccgccaggcgatgacgatcgaaaagcactacggtcgcccgatggacatcgagtgggccaaagatggcgatgacaaccagctctacatcgtccaggcgcgtccggaaaccgtaaagagccgcagcagcgccaacgtgatggagcgctacctgctgaaagagaagggcaaggtactggtcgaaggccgcgctatcggtcagcgcatcggtgccggtccggtgaagatcattcacgacgtctcggaaatggacaaggtccagccgggcgacgtgctggtgtccgacatgaccgacccggattgggagccggtgatgaagcgcgccagcgccatcgttaccaaccgcggcggccgtacctgccacgcagccatcatcgcgcgtgagctgggcattcccgcagtcgtgggctgcggcaacgccaccgagctgctgcaggatggccagcgcgttaccgtcacctgtgccgaaggcgataccggactcatcttcgagggagaactgggcttcgacatccgccagaactccatcgacgccatgcccgaactgccattcaagatcatgatgaacgtcggcaacccggaccgcgcattcgacttcgcacagctgccgaacgcaggtgtcggtctggcacgtctggagttcatcatcaaccgcatgatcggtgtgcaccccaaggcgctgctgaacttcgacggtctgccagccgacgtcaaggccagtgtcgaaaagcgcatcgccggttacggtgatcccgtcgacttctatgtcgagaagctggtcgagggcgtcagcaccctggctgccgcgttctggccgaaaaaggtcatcgtgcgcctgtcggacttcaagtccaatgaatacgccaacctgatcggcggcaagctttatgagccggaagaagagaacccgatgctcggcttccgcggggcttcgcgctatatcagcgagtccttccgcgattgcttcgaactcgagtgccgcgcgatgcgcaaggtgcgcgaggagatggggctgaccaacgtcgagctgatggtgcctttcgttcgtacgttgggcgaggcgtcgcaggttatcgacatccttgggcagttcggcctgaagcgtggcgagaacggcctgcgcgtcatcatgatgtgcgagttgccatccaacgcgttgctggccgatgagttcctcgaattcttcgacggcttctcaatcggctccaacgatatgactcagctgacgctgggcctggatcgtgactcgggtatcatcgcgcacctgttcgatgagcgaaatccggcggtcaagaagctgctggcgaacgcaatcgaagcgtgcaacaaggctggcaagtacatcggtatttgtggccaggggccgtccgaccatcccgatctggccaaatggctgatggagcagggcatcgagagcgtttcgttgaaccctgactcggttctggacacctggttcttcttagctgacgccgagatccagtgagctagtggcgaggcggaaggggcggctcccggtcccttccgctttccagacggaaagcgctattccatactcgaggcccagcccgacgggccagtggcatcggtattttcagcaaggagttcccatgcaatacgtcaccccggacctgtgcgatgcgtaccctgatctggttcaggtcgtcgagcccattttcagcaactttggtggtcgggattcattcggtggcgagatcgttaccatcaagtgcttcgaagacaactccctggtcaaggagcaggtcgacgttgacggcaccggcaaagtgctggtggtggatggcgggggatcgctgcgccgcgcgttgctgggcgatatgctggcggaaaaggccgcgcgcaatggctgggagggtttggttatttacggctgcgtgcgtgatgtcgacgtgatcgcgcaaaccgaactaggcgtccaggcgctagccagccacccgatgaaaaccgacaagcgcgggatcggtgatctgaacgtaccggtaaccttctgcggggtgaccttccgcccgggtgagtacatttatgccgataacaatggcatcgtggtctcgccagagccgctgaaaatgcctgcttgattcgcaagcgttgcctacctaagcccggccatgccgggctttttgcaatttgcacgagattactattttgctcgaccagacctctcaaacggggctgctgcatgccttggtacttgacggacagggcggcgcacggccgatcgcgtacgctgatgtcgccaccctgcagttaaacgaaaccgaaagtctgtggctgcactgggatcggggtcagccggccgcacgagactggctgcgcaggcacagcgggctcagcgctttcgcctgcgacgtactgctggaggaaaacacgcggcctcgtctactggcactgccgaacgatgagctgctgctgtttctgcgaggcgtcaacctcaatccggacgccgagccggaagacatggtatcgctgcgtgtcttcgccgatgctcgccgggtcatttccctgcgcttgcggccgttgcgttccaccgagacggtcatgcagcagctcgaggcaggcgtcgggccgaagacctcgtcggaagttctccttgcgctcgctgacgcgcttaccaatcgcgtcgatgacctcgtcgaggtggtgaccgagaagctcgatgccgaggaggatcgtgtcgagaccgatgagcgctattcgccgccgcaggacgagatgcttgcgttacgccggcaggccgccagtctgcgtcggtttcttctgccccagcgcgagatctatgggcaactgacgcgcaatcgtctgccctggttcgtcgacgacgataccgattactggaacgaactgagtaatcgactgattcgctacctggaggagctggacctggttcgcgagcgcgtcaatctgattctggaagccgaagaaaggcgaatgcgtgagcgcatgaacagaaccatgtacctgctcgggatcatcactggattcttcctgccgatgagcttcctgaccgggctgctgggtatcaatgtcggcggcatacccggatcggaacatccgtatggcttctatgtggcatgcggagtcatcgctgtggtcgccgcctttcagtggtgtatctttcgccgcctcaagtgggtgtgaatgtgactttgcggtgcctatgtgccgtctagatcacacaatctagcgaggtaaccatgcgcgatcccttcgaagagtcgttgcgggacatgctcaatgctcagtcttcgcgtgatgacaatgcgtgcctgaaccgggtgttgaaaactgccaatcgccaggtcggggcaggggacctgttcggcttgatggggaattggctgcaggctgttctgatcgccgcgagcggcagcgccggccgagcgcccacggtcgcgcgccgcacttcttcccgatccactttttcttctgataaggctgattgatcatggaattcgatccctggagccagagcctgttaggtgcgatgaacgcgctctgggcacctatcgccgcattcattccacgcttgttcggggctctgctggtcgtcgcgataggcttcatcgtcgccaagctgctcgatgcgctgctttccaaggtcctggcgaagatcgggctcgatcggttggttgccgggactggagttaacaagctgctgggtcgcgctggcatacgtgcgcctgcttctgcgctgattggaaagatcgtctattggttcgtgctgctggtttttctcgtgtctgccgccgagtccctcggcctcgcgcgcgtatcggcggtactggatatgctggcgctctatgtgccgaaagtatttggcgctgcgttgattttgcttgccggtgtgttgcttgctcagctggtcaacggcttggtgcgcggcgctgccgagggcgtggggctggattatgcgggaggtctggggcggatcgcgcagggacttgtgatcatcatcagcatctctgtcgccatcggccaactggaggtgaagaccgagctgctcaactacgtgatcgccattgcgctgatctcggtcgggcttgccgttgcgctcgccctcggattgggtagccgagagttggtcagccagattctggctggcatctacgtgcgcgaactttatgaagtcggtcagagaatccgactggacggttcgcaactggaaggtgtcatcgaagaaatcggcactgccaagaccttgttgctgaccgatgaaggcgagctggtttcggttgcaaatagtgtgcttctggaacagcgagtgggcagccgttaggcccggtaatctgttaaagtgcgccgcctcttttcgcgagttagcggaaatcgcggccacgacttttgccggttcgaagcgtcttgactacagcccatccgcccaacatgagctatgacccccgccagctttccgatgaagagctggtgcagcgtgcgcatgtcgagctgtttcatataacacgtgcgtacgaagagctgatgcgccgctatcagcgcaccttattcaatgtatgcgcgcggtatctaggcaacgatcgggacgctgatgatgtctgccaggaggtgatgctgaaggttttgtacggcttgaagaacttcgagggtaagtcgaagttcaagacatggctatacagcattacatacaacgaatgcataacgcagtatcgaaaagaacggcgtaagcgtcggttactcgatgcgctgagcctcgatccggttgaagaagcatccgaggataaggcacccagcgtcgaggagaaagccgggctagacaagtggctggtccatgtgaaccagattgatcgggaaatactggtgctacgttttgtcgcagaactcgagttccaggaaattgccgacattatgcatatgggtttaagcgcaacgaagatgcgctacaagcgagcattggataaactacgcgaaaaattttccggaattgctgaaacttaacggcaacaagctgtcttagtgaatagcgaacagcttggacctagagacagccggtttccttagattgttctgatactcaccaccagatggggatttacggatgaaacttaaaaacaccttgggcgttgtaattggttccatggttgctactacttctcttggcgctctggcccagggtcaaggtgctgtagaaatggaagcattcggtaagcactactttaccgacagctcccgcgacgttcagcgtgatggcgagctctacggggccggtgctagctattttctgacggacgacgtttctctcggcctttcctacggcgaataccacgacctgacttcccgtgatccggtcggtgctggcggccacaaggacatcaagggcagcttgacttccctcgacgctacctatcacttcggtcagccaggcgtaggtctgcgtccgtacgtgtcggcaggcgctgctcatcagagcattggccaggctaatcgtggcggtcgtgaccacagcactttcgccaacgtcggcaccggtgtgaagtactacttcaccgagaacttcttcgccaaagctggcgtagacggcatgtataacatcgatgccaacgaaggcgagtggatggctggtgtaggcgtcggcttgaacttcggcggtggcgcgcagcagcaagtcgctcaggtcgagccgactcctgagcctgccccggcaccgatcgtcgacaacgagcccgagccggagccggaattggtccgcgttgagctcgacgtcaagttcgatttcgacaaggcgaaggttcgcgaagaaagctacagcgacatcaagaacctggcggatttcatgcagcagtatccgcagaccagcaccactgtcgaaggccacactgactccgttggtaccgatcagtacaaccagcgcctgtccgagcgccgcgctcaggcagtacgcgacgttctggtcaatcagtacggcgtgtcgggccagcgtgttgactcggttggctatggcgaaacccgcccggttgccgacaacagcaccgaggaaggtcgtcaaatcaaccgtcgtgtagaagctgaggtcgaagcgcaggttcgttaattcgtacctcgcctcgtcacttggtcgcgccggtgtaggctggagcgatcaatagctttaccaaaaaaatccgatgccagcttctggcgtcggattttttgcattttctagtcctcgttttcggagcggggactgaaagccatgggagcggcagcctgttggcgttccgttcgcatgctccgagcggctgcagcgagcctcctcgagtagtcttggacatgaactgggtaatacgtcttgcgggccgcgccaactcgctcgattcgttcgtggtgtagataactacccgcatctgatgctttgagagtggaatgacgctgctggcggcgtggtcatcgacctgaatagccggcgccgatctgttctaaagacgctgactacgacggttccagtggccgatacgactttcgccgcgaactccaatgcattggtcgagcgtaagcgcggggcgatgctcccttccacagcacctcgcttttggcgcgtatggctgccttcatctgcaatcgagctcagctggatttggggttgaggcagtagatacagaagtgctaccgaaatcagccggtctggatgttgccacatgaagcgctgcagtttcgttgggccatcgagggcgcaacgcgcgcgagggtgcgtcctatgccgtcaggcgggaaatgtgatcgggtatcagggcaagccagacggcatgtaggtatcgcagccgcccgctaaaacgaaaaaaaagctgctcccggtgagggagcagctttcttcggtagatgccagaagcatctggtcaccattgacccgagcgatgctcgggtcgtgccagctcttagtggaactggttcatggtgttgtctttaccgcttgccttcagagctgcttcgccagcgaagtactccttgtggttgtcgccgatgtcagagccagccatgttctggtgcttgacgcaggcgatgccctggcgcagttcttcacgctgaacacctttgacgtaggccagcatgccctggtcagcgaagtaccctttggccaggttgtcggtcgacagcgcggcggtgtggtaggtcggcagagtgatcaggtggtggaagataccggcgtgggccgaaccgtcgcgctggaaggtgcggatcttctcgtcggcaactttggccagttcggtctcgtcgtactcgacgctcatcagcttggcgcgatcgtaggcggaaacgtccttgccttcggcgacgaacgcatcgaatacctgctggcggaagttcagggtccagttgaacgacgggctgttgttgtagaccagcttggcgttcgggatgactttgcggatctcgtcaaccatggcagcgatctgaccaacgtgcggcttctcggtctcgatccacagcaggtcggcaccgttctgcagcgaagtgatgcagtccaggacgcagcgcgcttcaccagtgccagcacggaactggaacaggttggacggcaggcgcttgggacgcagcagcttgccttcgcgcttgatcacgacatcgccgttgcccagtgcggcctcggaaacttcttcgcaatcgaggaaggagttgtacaggtcacccaggtcgcccggctctttggttacggcgatctgcttggtcaggccggcacccagggagtcggtacgcgcaacgatcacaccgttgtcgatgcccagctcgaggaaggcgtagcgtacggcagcgatcttggcgaggaagtcggcatgcggaacggtcactttgccgtcctggtggccgcactgcttctcgtcggaaacctggttctcgatctggatgcagcaagcgcctgcttcgatcatgcgcttggccagcaggtaggtggcttccgggttaccgaagccagcgtcgatgtcggcgatgatcggtacgatatgggtttcgtagttatcgatctggttctggatttcgttcgccttggcggtgtcgccagcttcacgagcggcatccagcgcggtgaacaacaggtccagttcgcggctgtctgcctggcgcaggaaggtgtacagctcttcgatcaggtcggaaacagctgtcttctcgtgcatcgactggtccggcagcggtccgaactcggagcgcagcgcggcaaccatccagcccgacaggtagaggtaacgcttgttggtggtcttcaggtgcttcttgatggaaatcagcttctgctgaccgatgaagccatgccagcagcccagcgattgggtatagacagacgagtcagcgtcatactcggccatgtctttgcgcatgatgtcggcggtgtactgagcgatttccagaccggtcttgaaacggttctgagcgcgcatgcgagcgacggattcagggttgatagcgctccagctgcttccagctgcttctttcagagcggcaacggccttgatgtcgttttgataagcggacatggtcaatccttcaaaaaatacgtggttggttaagcacgactttcccacttgaacctgcatgcttccgctgatgatgcgggcaacacgcggcagagcgtcgaaataccgaccgagacgaggattgaaccgaggagaggagggtgtgcagttacgaccgacaagaaggcctaggcgagctgcggaatgtgcgtggcattcctgtatcttcggcgtggtgccgtcgatgactcagcgtactgacatcttcaagctggtacgtcaatcgcttccccgtccctcaggacgactcgttccagtcgcaacctcgtcagtccgccttgtgggcagtaaagtcacggaacgcctcgctggttggctgagtgcgatccggaggcccttctcagggcctctggttagcgggagcggggccataatgcgccgggcgaaatggttcgtcaaatgttttgtagtgcttttttgttgtcactacattttgtccgaatcgggcgtatgtcgcccaccaacctaatccagggtctctaccttgagtcgtagggaaacgtcctgactgccttgagtggagtatcgacggaaggtcccgctttgatcgctgctagcgctctcgtcgataccacccagcgaaatccactcgccaagccgcccgctgacgcgtgtgtcggtttcctgaatgtcgatggcattcggacggacgctgttcaggcgatcctgatgactgctgatactcacctgcacgcggtcgccatgtaccgtagcggtggcatagaacccacgggtgacgtcgcggtattgcgtctgttggtagacctggccataaccatccgtaccgctggtggtaatgggcacgctctggcctacctggatcagggccggatacccctcggtggcctggacctgctgaatgccgctgccctggctgctggtgctgcggcgaataatgcgaacctgatcgcgaccgttcttctcgccgcgtcctgcctgtatttccacgttgccgctgccaatcgagccgtcaacgcggtatccgttctcacggcctgccgccgagttttgcgtatcgatgctgatgagcagccttcgtggctcgctatccagctgagacagcacattgcgcagctcactgataaccgcatctggcgcgttgacgataagctgattgccataggcgttgaccttgccttgatcgccgacgacggattgcgcgatgggtaaaacgtcttcggccatgcggtagttcagcgggatcacttcggttgcggcctgcagcgacagactggtgaatagcgcgagggcagcgagcagatggcgagtcatatcaaaaagctccgcaggtcggggtcggacaggctatggtcccaggcggtatcgaattgtcgttgcagctggcgggcacgccctggatcactgtaaagcgcatagccgccgttctggtcgggctcgggacgaaccagcgcgccacagtcgtctgccacgaggaaagcgcccgattgcacaggatattcggggtgacgcttgcgaatctgcatattgctgctcaatcggcgtgccaggccgagcaggcggtgtccctgtttgacggcacgcgaagcgtcatcgagcaatacccgcagacgattgcgcggatgcgccagaagaaatcgcacacaggcctgttgaatgctgctgtggttgtatagcaggggctcgaagtcagggctgtacaggctcaagctgcggtgcgcctggccgagcagggcgagggcatgctggcgcgcactgtcggaggactcgaaccgttgtattcccaacgtctgccccagaacgaaaggcgcggcttgccacggctcgggcggggtctgcacggcgggcggattgtcgatcgcgaagcgacccggcgacaggaactcgatggcggccagttcaagtactgcgtcggagtggtccgggtcgtcaatgctcatggcgctcagctgctttttcgaagcatgtcgacatgaggcaggccggcctcgaggaactcatcgctgaccacctcgaaaccgagccgttcgtagaaggcggtggcgtgcacctgggcagtgagccgttgttcgctgaagccgcggcgttcggcctcctgaatcaccgctttcatcagcgcgcctccgacatgcatgccgcgccaatcgcgtagaactgagacacggccaatgtgcccgtcgctgagcagtcgggccgtgccaatgggatagccgctttccagtgcgagaaaatgcacggcctccgcatcgtccgcatcccattccagctcgggtggaacggattgttcggcgatgaacacggtttcgcgaattcgacgcaggtcggcgttgtcccgttgccagtcggcgatgcgaacttctatttcactcatcagcgaactccagacttccctgtttgaccaattgccacaccagattacgcccatcctcgtcacccagccaggcggcaaggttctcggcgtgcagtgcatcagcggagcagatcagcttcagcagatcgcgcaagtgtgccggaagcagtcggctttggccgctggcgaagagcagcaagcctatatcgacttcgctccaggccaggcgggcgctgagattgcgcaccaggactgcgccgtcatcgagcgccgaaagcagaccctgttcgtcgatatcgggaccttgcacacgctcggggtagcgcggttcggtcatgaattggccaaaccaggtgagcaacaaccgctcatcacccatatgctcggcgagcatggcgcgaaggcgctgcaacgcgtcgctctggatctggtgcggatcctcggccggaaccaggtcggcatcgctgtagcgttcttcatcaggcaggaactgggcgaggaagtccgtgaaatgggtgaggacctccgctgcgctgggcgcgcgaaagcccagcgaataggtcatgcaggcatcttctgcggtcccgaagtgtgccagccggggtggcagatagagcatgtcgccaggctcgagcacccattcgtcagtaccttggaagtccgccagaatgcgcaggtcggcgtggggcaacagtgggctgtcgctgtcgcacatctgtccgactcgccagcggcgctggccttgggcttgaagcaggaacacgtcgtaattgtcgtaatgcggcccaacgccgccgcccggtgcggcaaagctgatcatgacgtcatcgattcgccagttcggcaggaagcggaagtgctcgatgagatcggcgacctcgggaaccagctggtcgaccgcctggaccaacagcgtccagttgcgctccggcaagtcctggtaggtgtcttcgccgaagggtccgcggcgcagttcccaggggctgtcgccgtgttcgatgaccaggcgcgactcgacttcttcttccagcgagaggcctgccagttcgtcaggagaaaccgggctctcgaacgaggggatcgcctggcgaatcagcaaaggcttcttctgccagtaatcgcgcaggaactcgcgtgcgctgatgccgccgagaatttgcaaaggaatatcggaagtcatgcttgttaccttgctctgctacagagctgcaaataaaaacgcccggcacagccgggcgtgcaaaagaggtgatggctcagatacgcttggcctgggttgcggcattaccgatatagcctgcaggggtcatctggcgtagcgctgccttcgcctcggcgggaatttcgaggccgtcgatgaaagcctgcagcgcctccgggccgatgcccttgccgcgcgtcagttccttgagcttctcgtacgggttttctacggcgtagcgccgcatgacggtctggatcggctcggccagcacttcccagcaggcgtcgaggtcctcggctatgcgcgcttcgttgagttccagtttgccgatgcccttgaggctcgcctcgtaggcgatgacgctgtgagcgataccgacgcccaggttgcgcagtacggtggagtcggtcaggtcacgctgccagcgggagatgggcagcttgctcgccagatgctgcagtagcgcattggcgatgccgaggttgccttcggagttttcgaagtcgatcgggttgaccttgtgcggcatggtcgacgagccgatctcgcccgcaacggtgcgctgcttgaaatatcccagcgagatgtagccccagatgtcgcgatcgaaatcgataagaatggtgttgaaacgcgcaaccgcgtcgaacagttcggcgatgtagtcgtggggttcgatctgggtggtgtaggggttccacgaaaggcccagatctttctcgatgaactcgcgcgcattggcttcccagtcgacgttcgggtaggccgaaagatgggcgttgtagttgcccacggcgccgttgatcttgcccagtagcggcacggctgcaacctgcgcgatctggcgctcgagtcggtatacgacgttggccagctctttgccgagggtggtcggcgaggcgggctggccatgagtacgcgacagcatcggtacgtcggcgtgcgctacagccagcgtgcggatggcgtcggcgagttggcgcatcaatggcagcagcacttcgtcacggccctcgcgaagcatcagcgcgtgggagaggttattgatgtcctcgctggtgcaggcgaagtggatgaactcgttcaccttggccagttcgggcagctgcttggcctgttccttgagcaggtactccaccgctttcacgtcgtggttggtggtgcgttcgaattccttgacccgttcggcgtgctcgagctggaaattttcagccaactggtccagcagggcgttggcttcgtccgagaagggggcaacttccggaattccggcgtgtgcggccaggcgttgcaaccagcgaacttcaacctgaacgcggcagcgaatcagaccgaactcactgaaaatggggcgcagagcgctggttttgccggcgtagcggccatcgacaggggaaaccgcggtgagcgaggaaagctgcatagagggcattctcggacagtcgagcaacgaaaagagggcgcagattatacatgaaagcggacaggtgacggtcgctgtgaccgggtcggttgcgttgtagcctggttcattccgcgcgaagcatggcgtaaagcgcgtcgagcaacctgcgccggctaaagaccatttgccaacgatggcctcccagctggcgccacagccgcgccgcgcgaatgccggctagcaggagcgcgcggattttggcggcattgtcggtttgctgcagatgacgcatgtcgccttgcacctggatgcgctggcgaaaggtgctgagcgtgtcctgatagaggccgccgaacgaggcgatcacattctcgtgggtcaatccgaaatggtcgacctgttgttgaatctggtccagacgactgccgatgacttgcagcatgtcgccgcgtttatccagttgccgctccaggccgatcatcgccagcgcatagcgcaggggctcgcgctgaaggctgctggtgtcacgctccagcgcgccgaccagggcgcggtagccatcgcgcaggttcaggtcgtctccaccatatatctccagcgccggcttgttctcgcgtacgagcaggctgcccaacatgctaccgagtgcggcattcggcacttgaccagttcgggcgatgcggtcgaccagtaccgcggcttcgaataccgcccccagggcgatcaactgttcctgctgcggtgtcatgcgtgagctccggcaagccagcgctcggccgtttcgatcacgccgccgccgaggcagacgtcgccgtcgtagaaaaccacggactgcccaggtgtcaccgcgcgctgaggctcgtcgaagacgacccgatagccatcgccgatccgctccaacgtgcaagcctgatcggactggcggtagcgtaccttggccgtgagacgcagcgatgcgggcaattcgatcgggttgacccagtagatctcggacgcgagcagggcgcgagaaaacagccagggatggtcattaccctgtccgacaaccaggacattgcggtcaaggtctttgctcaacacgtaccagggctcgtcgccggcatccttgagaccgccgatgcccagtccctggcgctgaccgatggtgtgatacatgaggccatgatggcggccgatgacttccccctccacggtctcgatgtcgcccggctgagccggcaggtactgcttgaggaagtcgctgaagcggcgttcgccaatgaagcagatgccggtggagtccttcttcttggccgtggcaagcccgtgtttctcggcaagcgcacggaccgcaggtttctccagctctccgacagggaacagggtcttgctcagctgttcgccgcccacagcgtggaggaaatagctctggtccttgttgggatcgagccccttgagcagctcgctgcgcccgtcacggtcatggcggcgcacatagtgcccggtcgcgatcaggtccgcgccaagtgacagcgcatagtcgaggaacgccttgaacttgatttcgcggttgcagaggatgtccgggttcggggtccgcccggccttgtattcggcaaggaaatgctcgaacacgttgtcccagtactctgcagcgaaattcgcggtatgcagcgggatgccgattcgatcgcaaaccgcttgcgcgtcggccagatcctcgcgtgcggtgcagtactcggtgccgtcatcctcttcccagttcttcatgaacaggccttcgacctggtagccctgttcgagcagaagcagggcggagaccgacgagtcgactccaccggacatgccgacaatgacacgaagtttttcaggagcagcggatgttgaagcgggcatagaaactcgaagtcaactgcaaaaaaacgtgattctaacaggccggtcaagtgagcggttaaggcggatcagtcccgaacgaccgcaaggtcatatggctgccctgccaggtagtcatcgatgcaacgcagtatcaactcgcttcgccaacgttccggctgggcgaccaactcgtctcgagtcatccagagcgcacctgtgatgccttcgtcgagtgtccgctgcggatcatgcgtgagcggtgtggccgcaaagcagacacgctgataggtcacgccgttgctcggcgcggtgtagagatagatgcctaccacgccgcttagctcgaccgtccatcccgtctcctcgagcgtctcgcgtaaagccgcctgacgcagtgtctcgttgggctccaggtggccggcaggttggttcagtaccagccggccgcccttggattcttcgaccatgaggaagcggccatctgcttcgacgatcgtcgccaccgtgatgtgggggtgccaggtcatgtcgggtcttcctgtgtaaaggagcgatagtatcgttcgcacgtagcgaaaacagaaaaccccggcctgggccggggtttcgtttacagcgaacgccgatctacgctagcggatcatgccagtgcggcgagcgcggcgttgaaggttgcgctcggacgcatgacctggctggtcaactccgagttggaacggtagtagccgccaatacccactggcttgccctggaccgcggccatttcggcgatgatggcttcttcgttgtcgctcagctgtttggccagcggtgcgaagcgagcttgcaactcaagatcttcggtctgtgccgccagttcctgggcccagtacagcgccaggtagaagtggctgccacggttgtccagctcgccggtgcgacgcgaaggcgacttgttgttgtcgagcagcttgccggtggccgcgtccagcgtcttgccaagcagcttggccttggcgttgccggtcttgatcccggtttcttccagcgataccgccaacgcgaggaactcgccgagcgaatcccagcgcaggtggttctcttcgatgagctgttggacatgcttgggcgcggaaccgccagcgccggtttcgtacattccaccgccggccatcagtggaacgatggaaagcatcttggccgacgtgcccagctccatgatagggaacagatccgtcagatagtcgcgcagtacgttgccggtcaccgaaatggtgtcctggccgcggatcaggcgctccatgctgacgcgaatggcctcgttgtagcccatcaggcggatgtccagaccggtcaggtcgtgctcctgcaggtaggtttcgactttcttctgcagctcacgatcgtgggcgcgctcgggatcaagccagaagattgccggcgtgttcgattgacgggcgcgggtgacggccagcttgacccagtcgcgaatcggcgcgtctttagtctggcaggcgcgccagatgtcgcctttttccacgtcgtgctgcatcagaacggtgccatcggcgagtacgacgcgcatggtgccgtccgcaaccatctcgaaggtcttgtcgtgcgagccgtattcttcggctttctgcgccatcaggccaacgttcgagacgctgcccatggtggtcgggtcgaacgcgccgttggttttgcagaagttgatcatctcctgatagatccgcgcgtaggtgctttccggcatcacggctttggtgtccttgagcttgccgtccttgccccacatctgcccggagctgcggatcatcgctggcatggacgcatcgacgatcacgtcgctcgggatgtgcaggttggtgatgcccttgacggaatcgaccatcgccatttccgggcggccggcatagcaggcgtggatgtcgtggaggatctcttcctgcttcgaatcgggtagcgccttgatcttgtcatagacgctgctcaagccgttgttcggattgacgcccagttccttgaacagctcgccgtacttatcgaagacgtccttgtaatagacgctgacggcatggccgaacacgatcggatgggaaatcttcatcatcgtggccttcacgtgcagcgaccacatgacgcccgtttccttgcagtcctgcagggtctcttcgaagaaggcacgcagtttcttgcagctcatgaacatgccgtcgagcacttcgccttcctgcaaggaaagcgtcttcttcacttcaacctggccgtctttgccgacgaactcgatacgcacgtcgccagctttgtccatggtgatggactgctcactggagaagaaatcgccaccgcgcatgtagtctgcgtgggactgggaggccttgctccacttgcccatggagtgcggatgcttgcgggcaaaggctttaacggccgcaggtgcgcggcgatcggagttgccttcgcgcagtaccgggttcacggcgctgccgagcaccttgctgtagcgcgcacgggcgtccttttcggcgtcggtctgcggatcttccggatagttggggatgttgtagccaagcgcctgcagttctgcgatggccgccttgagctgcggtacggatgcgctgatgttaggcagcttgatgatgttcgcgtccggctggttggtcagctcggcgagcttggccaggtcgtcatcgactgctttgtcggcgtccagctggtcggcaaaacttgcaagaatgcgccctgcaagagagatgtcacgtgtttcgacggctatgtcagcagaggcggcaaaggcttctacaatgggcagaagcgaataggtggccagtgccggtgcttcgtcggtgaaggtgtaaatgatcttcgagcgggtggacatgtagtgttgactctctcttgctgagcgtgcacagagcctcgaggtgcgcaggtaggcgcgctggctgttttgcgccagttacgaagctcgccgcgatgatgttggttgcagcaccactagagtgttgagcgtttgaaccgtccggccgcggttggcagcctggcgatttccggagcaaggatcccgttggagaccgattgacccttcatgactcgttagtcacctaagcagtatatcaccgcagcctgttgtcgaagaatgccggagccatacgacgaacgaacatatggtttcggtcgattcaactggggtactctttgaagatgaccactgtttaatgtttaaccacaaaacggagtccagcatgggataccaaaagatccaggtgcctgccagcggtgacaaaatcaccgtcaatgccgataacaccctgaatgtccccaacaacccgatcatcccttatatagaaggtgacggcatcggtgtggacatcagtccggtgatgatcaaggtggtcgatgccgccgtcgagaaagcgtacggtggccagcgcaagatctcctggatggaaatctacgctggagagaaagcgacccaggtctacgatcaggacacctggctgccgaaggaaaccctggaggccgttcgtgactatgtggtttccatcaaggggccgttgaccacgcccgtcggtggcggcattcgctcgctgaacgttgcgctgcgccaagagctcgacctctatgtatgtcagcgtcctgttcgttggttcaccggcgtgcccagcccggtgaagaagccggccgatgtcgacatggtgatcttccgcgagaactccgaagacatctatgccggcgtcgaatggaaggccggctccccagaggcggagaaggtcatcaagttcctcaccgaggaaatgggcgtcaagaagatccgcttcacggaaaactgcggcatcggcatcaagccggtctcgctcgagggcaccaagcgcctggttcgcaaggccctgcagtatgcggtggataacgatcgtagctcggttaccctggtgcacaagggcaacatcatgaagttcaccgaaggggccttcaaagagtggggctacgaggtggcacgtgaagagttcggcgcagaactgctcgatggcggcccttggatgcagttcaagaacccgacgaccggcaagaacatcgttgtcaaagacgccatcgccgacgccatgctgcagcagatcctgctgcgtcccgccgagtacgacgttatcgctacgctcaatctcaacggtgactacctgtccgatgcgctcgcggcagaagtgggcggcatcggtatcgctccgggtgccaacctgtccgacacggtcgccatgttcgaggcgacacacggtacggcgcctaagtatgccggccaggacaaggtgaaccctggttcgctgattctttcggcggaaatgatgctgcgccacatgggctgggtggaagcggcggacctgatcatcaaatcgaccgagagcgccatcgccgcgaagacggtgacctatgacttcgagcgcctgatggaaggtgcgaagctgatgtcctgttccgaattcggcgacgccatgatctcccacatgtaattcatgcgggcaacacgaaaaggccgatcaatgatcggccttttcgttacctggagtcaggcgtctacggtcgagccctgtgaaacaggcgccactgtttcagtcgtgctctgcagcgattgaatgttggttgcgtgcaggcccttgggaccttgcaggatgtcgaacatgaccgcctgcccagctttgagcgttctatacccttccatttgtatggccgagtaatgggcgaacaggtcctcatcgccgccgtctgctacgatgaatccgtagcctttggcgttgttgaaccacttgaccttaccgcttagcatgctgttatccctctgcaaaggagtccatcactggagtaacatccatttcattccgcgctgatgcagcacatagcccatacgcgcagcccgttgccgttgtggcacatactgtttgtatcaccgttttgccgatagtcaaggcgactcgtcaggtggctgtgaagccattccaattacccggcctcggcgccccgatctagaaccgttatacgcatgcgtgcatctccagagattcgactaatattcaatcatgatcgtcccaaaccgctggacgacgactccaccggcctagctgtcgaagaggccaaaccgctgctgaaggcaccaccgatgttcaaagttgtcatgttcaatgatgactacacgccgatggatttcgtcgtggaggtgcttgagggaattttcaatcacaatcgggagctcgccaccaagatcatgctggcggttcataccgaagggcgggccgtttgtggcgtctacacaagagacgttgctgaaaccaaagcgatgcaggtcaatcaatatgcaagggagtgccagcatccgttgctttgtgagatcgagaaggacggttaaaccccgagtgctgggtaagaggtgaaagctatgttgaaccgtgagctcgaagtcactttgaatctggctttcaaggaggctcgtaccaagcgtcatgaattcatgacggtcgaacatctcctgttagccttgctggataacgaagcagccgcaacggttttgcgggcctgtggggccagtctcgataaattgcgccatgatttgcaggagtttatcgactccacgacgccgttgattcctcaacacgatgaggaacgcgaaacccagccaaccctgggcttccagcgcgtgctccagcgtgctgttttccacgttcagagctccggaaagcgcgaggtcactggcgcgaacgttctggtggccattttcagcgagcaggaaagccaggcggtgttcctgctcaagcaacaaaatgtagcgcgtatcgatgtggtcaattacatcgctcacgggatttccaaagtgccgggtcataacggcaacccggaaagcgattcggacatgcaggacgaggagggcggcgagtcggccgcctccggcaatccgctcgacgcatatgccagcaacctcaacgatttggcccgtcaaggacggatcgatcccttggttggccgcgagcatgaagtcgaacgggtcgcgcagattcttgctcgacgccgcaagaacaacccgttgctggtcggtgaggccggagtcggtaaaacggcgatcgccgagggtctcgccaagcgtatcgtagatcgccaggttccagagttgctggcggatagcgtggtttactcgctcgacctgggtgcgttgcttgccgggaccaaatatcgcggcgatttcgagaagcgcttcaaggcgctgctgaacgagctgcgcaagcgtccccaggcggtgctgttcatcgacgaaatccatacgatcatcggggccggcgcggcctcgggtggagtgatggacgcgtccaatctgctcaagccgctgctgtcgtcgggggagattcgctgcatcggttcgaccacctttcaggagtttcgcggcatcttcgaaaaagaccgggcgctggctcgacgttttcagaaggtcgacgtttccgagccctccgtggaggacacgattggtatcctgcgcggcttgaaaggccgtttcgagcagcatcacggcatcgagtacagcgacgagtctcttcgcgccgccgccgagctgtcttcgcgttacatcaatgatcggcacatgcccgacaaggcgatagacgtcattgacgaggcgggcgcttaccagcgcctgttgccggaggataagcgtgcgccgcgaatcgatgtcgagcaggtcgagaacatcatcgcgaaaatcgcacgcataccacccaagcatgtcagcacgtcggataaggaattgctgcgcaatttgcagcgtgatctgaagctgacggtcttcggtcaggatgacgccatcgactcgctcgcgaccgctatcaagctgtcccgggctgggttgaaagcgcctgacaagcctgtcggttcattcctgttcgccggccccaccggggtcggtaagacggaggctgcccggcaactggcgcgcgcactgggtatcgagctggttcgcttcgatatgtccgagtacatggagcgccataccgtgtctcggttgatcggtgcgccgcccggctatgtcggtttcgatcagggcgggttgctgaccgaggccattaccaagcagcctcattgcgtgctgctgctcgatgagatcgagaaggcgcaccccgaggtattcaatctgctgctgcaggtcatggatcacggcactctgacggacaacaacggccgcaaggctgatttccgcaacgtgattctgatcatgaccacgaacgctggcgcggagaccgctgcccgggcttcgattggcttcactcatcaggatcacgcctcggatgccatggaggtgatcaagaagagcttcacgcctgagttccgcaatcgcctggatacgatcatccagttcggtcgtctgagccatgaagtcatcaagagcatcgtcgacaagtttctcatcgagctgcagacgcagcttgaggacaagcatgtcacgctcgaagtgtcggatgcggcccgtggctggttggccgagcgtggctatgaccctcagatgggcgcgcgaccaatggctcgtttgattcaggataagatcaagcgaccgctggccgaggagattctgtttggggagttggccgagcatggcggcgtggtgcacatcgatattcgcgacggtgaacccttcttcgagttcgagacgtcagccgaactggcatagcctaggctagcttgttgcgcctagatgaaacgcccggcatttgccgggcgttttcatttcactgcacttgtcgcctgcgagtgcttccaatacatgctgcgcggtggctgagcaataaatagttcagcgcaacaaaaagcccggcggttgccgggcgttcgtcctcgcggtccgttaacgggcgcggtaagtgatacgacctttgctcaagtcgtaaggcgtcagttcgacgcgaaccttgtcaccggtcaggatccggatgtagttcttgcgcatcttcccagagatgtgcgcagtaacgacgtgcccattttccaactccacacgaaacatggtgttgggcagggtgtcgacgacagtaccttccatttcgaagctgtcttctttcgacattcagtaaagccctcggtgtccaatgagtaacccggcgcgaaaaatgcccgggtaaaagcggcaagtattgtgcctgaaagggccctgagagccaagggctcagctcagagtaatccagcgctggttgaccagcagttcgatggggcgatactcggttttgtaattcatcttgcggcaattcttgatccagtaacccagatagattgccttcagcccgagccgcgccgcctcgccgacctgccacaggatggcgaagcggccgaggcttcggcgctcttcgttcgggtcatagaaggtgtacaccgcggacaacccgttgggcagcacatcggtaaccgccaaggcgagcaaccgtccttccaggcggaactcgtagaaacgggaaaagggaaggtcgcgtaccaaaaaggtatggaactggtctcggctcggcgggtacatgtcgccgtccgcgtggcgttgctcaatataggtggcgtagagcgaatagtactcttcggtgaacgaggggcgaacgttggtgaccgtcagatcggcgttgcgcttgaggatgcgtctctgctggcgattgagctgtagcccttcggcgggtatgcgagcggggatgcaggcggtgcagcgttggcagtgcggacgataaaggtggtcgccgctacggcgaaatcccatttcagacagctcggcgtacacttgcacgtccatcggctggctggggtcgaggaagagcgtcgtggcctgttcgtcgggcagataactgcacgcatgaggctgggtcgcgtagaacttgagacgagccaatgaagtcatggtcagctctcggaaatcttgtaatcagtgtaggtcagctcggcttcgtcgactagggctcccatcgggctggaccgggttcatccaggtactttgtgagcgcttcggcgaagatccggcgggggattgttcgcgcgccgaaactggccaggtgttgcgtcggcatctggcagtcaatcaatttgaaatcccagtctcggagacgttccactaatgtcacgaaacccaccttggacgcatcggtcgtgcgactgaacatcgattcaccgaagaatagccgacccatggcgaggccatagaggcccccgaccagctgtccgtcttgccagacttcaaccgagtgcgcgacgccaatctgatgcagtttgatgtaggcgttctgcatcggtgtcgtgatccaggttccgtcggcatagtcgcgtggtgcggcgcagccttctatgacgtctcggaatgcacgatcgaacgtaacgtcgaatacgccctggcgcagttttttggctaggctgcgcgaaacatgcagttcctcagggtagagcactgtgcgtgggtcgggggaccaccacagcagcggctgcccctcctggtaccagggaaagcagccatgacggtaggcagccagcaagcgctcgggcgacaagtcgccgccggccgcgagtagcccgttgggttcacgcatcgccgtctccaacgggggaaacgacagctcgtcgcgctgcagccaggtcagcatatcggtcgtcacgaaggggcggcgaacccgccccggagtgggttactggtccaggtacttttcggcatcgagtgcggccatgcagccggcacccgcggacgtgatggcctgacggtatacatggtcggccacatcgcctgctgcgaagacaccggggatggtcgtgcaggtggcgtcgccctcgctgccgcccttgaccttgaggtagccgtctcgcatgtcgagttggccctggaacaggtcggtgttgggcttgtggccgatggcgatgaagacgcccgccagctcgagcttctgctcttcacccgaaagggtgcttttcaggcggacaccggtgacgccactggcatcgcccaggacttcttcgagggtatggttccaatgcaggcgaatgttgccgttggtcgccttttccatgagcttgtcctggagaatcttctccgagcgcagcttgtcgcggcgatggatcaggtgcacttccttggcgatgttcgacaggtacagcgcttcctcgacggccgtattgccgccgccgatcacggctaccacctggttgcggtagaagaagccgtcgcaggtggcgcaggccgatacgccgcgtccggcgaacgcctcttccgatggcaggccgagatactgggccgaggcgccggtggcgatgatcagggcgtcgcagctgtaggtggcgctgtcacccttgaggacgaacgggcgctgctgcagctcggcggtatggatatggtcgaacaccacttcggtatcgaagcgttccgcgtgtttctgcatccgctccatcaatgccggtccggtgagaccctcgacatcgcccggccagttatccacttcggtagtggtggtgagctggccgccaggctggatgccggtgatcatcagcggtttcagatttgcgcgggcggcgtacaccgcggcggtataaccggccgggcctgagccgaggatgatcagacgtgaatgcttgacttcattcataaaaagccctcataagcctttgttgctaatagagaagcgtgctccagtcgagccgcgtagaaaaaactggcgtttatgctacaccgaagcatcgcgaaaagcccaagccggcgcggaaccggcatgccatcgaatcgacaaacccgtacaatgtccaattatctggctgaatacggttcatagagagcgccgtgggcgcaggaaataaagcgttttgaagaatacctcctctaccgcgccggcttccgtctggcgacagcaattgcattaccgtctcaaagagggtgccttgatcgcgctcggagcgctgtgcgcgtacctctggatggcattgctcacctacgacccggccgatccgggctggacgcacacgagcaacgtccagcaagtccagaacgccgccggccgcgccggggcctggttcgccgatgtgctgttcatggcactcggctatttcgccttcttgtttccgttgttgctgggcatcaagacctggcaggtgttccgtgcgcggcaccaaccctggacctggaacggctggctgttttcctggcggttgatcgggctcgtattcctgattctttcaggctctgcgctggcttatatccatttccagttcgccaataatctccctgcgtcggcgggtggggcattgggcgaaagtcttggccaactcgccgaggcggcgctcaatgttcagggcagcaccttgttgttgctggctttcttcctgttcggtctgacggtatttaccgatctgtcctggttcaaggtaatggacctgaccggcaagatcactctcgatctcatcgagctgatccagagccttttcagccgctggtggtccgctcgcagcgaacgcaagcagctcgttgcgcagctgcgggaagctgatgacgtggtcaacgaagtagccggctcgctctctgatcagcgtgaacgcgccagggtaaaggaacgcttgctcgagcgtgaggagtcgctgagcaagcacatgagcgagcgggaaaaacgcccagcgccggtgatcccacccgctgcaccgccgaagccggtcgagcagagcaagcgcgtcctgaaggaaaaacaggccaatctcttcgtcgacccgctgatcgagggcagcgtgccaccgctgtcgctgctggatgtcgctgaaaagcagcagaagcagtactcgcctgaatcgctggaagccatgtcgcggctgctggagatcaaactgaaggagttcggcgtcgaggtcatcgtagagtcggttcatccgggcccggtcatcacccgtttcgagatccagcccgcggccggggtcaaggtcagccggatctccaacctggccaaggacctcgcacgttcactggcggtgatcagtgtgcgcgtggtcgaggtgattcccggcaaaaccaccgtgggcatcgagattcccaacgaggaccgccagatcgtgcggttctccgaggtactgtcctccgctccatatgacgacgccaagtcgccggtcactatcgccctcggccacgatatcggcggcaaaccggtgattgccgacctggcgaagatgccccacctgctggtcgccggtaccaccggttcgggtaagtcggtcggcgtgaacgcgatgatcctgtcgatattgttcaaatccacgccggaagacgcgcggctgatcatgatcgacccgaagatgctcgaactgtcgatctacgaaggcattccgcatctgctgtgcccggtcgtgaccgatatgaaggaggcggccaacgcattgcgctggagcgtcgccgagatggagcgtcgctacaagttgatggcggccatgggcgtgcgcaacctggccggcttcaaccgcaaggtgaaagaggcggaggaggccggtacgccgctcaccgatccgctgtatcgccgcgagagcatggaagatgaggcgccactgctgaaaaagctgccgacgatcgtcgtggtggtggacgaattcgccgacatgatgatgatcgtcggcaagaaggtcgaagaactcatcgcgcgtatcgcacagaaggcgcgggcagcgggcatccatttgatcctcgcgacccagcgcccctcggtggatgtgatcaccggtctgatcaaggcgaacatcccgactcgcatggcgttccaggtctcgagcaagatcgactcacgcaccatcctcgaccagggcggcgccgaacagctgctcggccacggcgacatgctctatctcccgccgggcaccggcttgccgattcgcgtacacggcgcctttgtatccgacgatgaggtccatcgcgtagtggaagcctggaaagcccgcggcgcacctgactacatcgaagaaatcctcgcaggggctgaagagtccggcagtggtttcgacggcggcagcggtgaaggtggtggcggcgaaggcagcgaggaagatccgctttacgatgaggccgtgcgcttcgttaccgaaagccgtcgcgcctccatatccgcggtgcagcgtaagctcaagatcggctacaaccgcgcggctcgaatgatcgaggccatggaaatggcaggtgtcgtcacctcaatgaataccaatggctcgcgcgaagtgctcgcgccgcctcccatccgcgattagtcgcactgagggcttcatgcaattgattcgcacgctgtttgcatctgcgctgctgtttacctttgttcccgctcacgccgaccaggccgcttcggtacagcgccttaccggtctgttacagaaagccgagaccttgaccggccgcttttcccagctctcactcgacggcaccgggactcaactccaggaaacatccggcgagatggccctgaaacgtccggggcagtttcgctggcacaccgacgcaccgatggagcagctgctggtttccaatggcaagaaagtctggctgtacgacccggacctggagcaggtgaccatccagaccctcgatcaacgactgacacatacgccggctctcttgctctctggcgacgtgtcggcgatcaacgagaacttcgaggtgtcgcaccaggaagcgggcgaggtggtcgatttcaccctcaaacccaaagccaaagacacgttgttcgatagcctgcgcttgtcctttcgcggtggcgtgatcaatgacatgcagatggtcgacggcgtgggccagcgcaccaatatcttgtttcagggtgtcaaattgaaccagccgctcaaggccgacctgttcactttcgagattcccaagggcgccgacgtcatctccgaatgatcctcttcgttgccttcacccacgcatgcggcctgcttgattgcaggccgttcgcataaagaggttccgcccgcgatggaccttttcagtcgcgaacctgccgctcagccgttagctgcgcgtttgcgtgccaccagtctcgacgagtatgtcgggcaggagcacctgctggcgcgcggcaagccactgcgcgaagcgttggagcagggtgcgctgcattcgatggtgttctgggggcctcccggggttggcaagacgaccttggcgcgcttgttggccaaggtctccgatgcacatttcgagaccgtctcggcggtgctggcaggcgtcaaggaaatccgccaggcagtggagatcgccaagcagcaggcggcgcagtatggccggcgcaccatcctcttcgtcgatgaggtgcaccgcttcaacaagtcgcagcaggatgcctttcttccgtatgtggaggacggcacgctgattttcatcggtgccacgaccgaaaacccttcgttcgaactgaacaacgccttgttgtccagggcgcgcgtgtacgtgctcaagagcctcgacgaggctgcgctgcgaaggttggtcacgcgcgcattgaccgagccgaaaggcctgggcgatatgcacctcagcctgcctgaggagagtttccaggtgctcatggctgcggctgatggtgacggccgacggatgttgaacctgttggaaaacgcttcggacctggctgaagagggcggcgagatcagcgtcgagctgctgcaggatctgttgggcgatagccgccggcgcttcgacaagggaggcgaagcgttctacgaccagatttcagccctccacaagtccgttcgtggctccaatcctgacgcggcactgtactggttcgcacgaatgatcgatggcggctgcgacccgctctacatcgcacgccgggtggtccggatggccagcgaggaggtcggtaacgccgacccgcgtgcgatgggactgtgtctgtcggcctgggatgtgcaggagcgcctgggcagtccggaaggcgaactggcggtcgcgcaggccattgtctacctggcctgcgcgccgaagagcaacgccgtctacatggcctataaggcggcgatgcgcgatgtcgccgaaagcggctcgcaggaagtgcctttgcatctgcgcaacgcaccgacccggctgatgaaggagctgggctacggcaacgaataccgctacgcccatgacgagccggatgcctacgccgccggcgaggactattttccagacgcgatggcgccgcgtcagtattaccagccggtgccgcgcgggctggaaagcaagattcgcgacaagctcgagcatctggctcgtctcgatcggcaaagcccacggcaacggaggaaaacatgattcggatggcgcttgcggtggtggctggcggcgtggtcggtacgctgatgcgcttcggtgtcgcgacctgggtatcggcccagtggccccgccatttctatctggcaaccctggcggtcaacctgctcggctgtctgctgatcggttacctgtatgcgttctttctggcgcgcccggacatttcgccagagctgcgcggcggcctcatcatcggttttcttggtgccctgacgacgttttccagtttctcgctcgatgggctgcgcctgctcgagagcggccagtttgcaacggccttcggttatatcggcgtcagcgtgctcggggggctgctggccgcctgggccgggctgacgctcgccaggttatgaacctgatcgcgatgacagtaaactccgttttcgctctgcctttcctcaaagctttcatagacgagacccaccatgcttgattcgaaactggtacgcacacagctgcaagatgtcgccgatcgcctggctactcgcggctaccagctggacgtggcgcgtatcgaggcgctggaagcacagcgcaagaccgtgcagacccgcaccgagcaactgcaagccgagcgcaacgcgcgttccaagtcgattggtcaggccaagcagcgcggtgaagatatcgcccccttgcttgccgatgtcgatcgcatggcttccgagctggatgccggcaaggtcgagctcgacggcatccaggccgaactggaccagttgatgctgagcctgccgaatctcccgcacgagtccgtgcctgtgggcaaggacgaagacgacaacgtcgaggtgcgccgttggggcacgccgaaggcgttcgagttcgaggtcaaggatcatgtggcgcttggcgaaaagcatggctggctcgactttgaaaccgccgccaaactgtcgggcgctcgcttcgccctgatgcgcgggccgattgctcgtctgcatcgcgccctggcgcaattcatgattgatcttcacacccgcgaacacgggtatgaggaggcgtatacgccgtatctggtccaggcaccggcactgcagggcaccggccagttaccgaaattcgaggaggatctgttcaagatcagccgtgagaacgaggccgacctctatctgatcccgactgccgaagtctcgctgaccaacatcgtggccggtgagattctcgatgccaagcaactgccgctgaagttcgtcgcacacacgccgtgcttccgcagcgaagccggtgcgtctggccgtgatacacggggcatgatccgccagcatcagttcgacaaggtcgagatggtgcagatcgtggagccgagccagtcgttcgaggcgcttgaaagccttaccggcaacgccgaaaaggtgctgcagctgttgggactgccgtatcgagtgctggcgctgtgcaccggcgacatgggcttcggcgccaccaagacctacgatctggaagtctgggtgccgagccaggacaagtaccgtgagatctcttcctgctccaactgtggcgatttccaggcgcgccgcatgcaggcgcgtttccgtaatccggaaaccggcaagcccgagctggtgcatacgctcaacggctctggcctggcggtagggcgcacgctggtcgcagtgctggaaaactaccagcaggcggacggcagcatacaggtgcccgaagtcctgaaggcctacatgggcggtatcgaagtcatcggctgatagcgcggccagcaggtgtgttggggccggtagtcggcgcggtgaattgccgctccgcaggccggcacccagcactatcctgacttcttgatacccgacaagggccatcttccgcgcaatggttgagatgggcctacttttcctgccccaggactcgctgatggattttctgccgctgtttcacaatctcaaaggtcgcgcggtgctggtcgtcggcggcggcgagatcgcactgcgcaaggcgcgcctgttgtccgaagccggtgcggtgctgcgtgtcgtggcgcccgagattgagccgcaattagctgacttggttgagcggagcggcgggcaatcctgtttgcgcggctatatccgcgacgaccttgccggttgcgtgctgacgattgctgcgaccgatgacgagccgttgaatgcacaggtgtcgcaggatgccaagacgctcggcataccggtcaatgtggtggattcgcccgatctgtgcaccgtcatcttccctgcgatagtcgatcgttccccgctgatgatcgcggtgtccagcggtggcgacgccccggttctggcgcggttgatgcgggcgcagatcgaaacctgggtacctgcggtgtacggtcagctggctggtctggccaaaaagtttcgcagtcaggtcaaggctaagctaccgaatgtccagcaacggcgagtgttctgggaagaagtcttccagggcaacatcgccgagcgggcgatggcggggcaggcacacgaagcggagcgtctgctggaagaaaaactttccggcgcatcgcccaagcgcctcggtgaggtgtacctggtcggggcgggtcctggcgacccggatttgctgaccttccgtgcgttgcggttgatgcagcaagctgacgtcgtgctctatgaccgcttggttgcgccgaccattctcgacttgtgtcgtcgcgatgccgatcggatctacgtcggtaaacagcgcgccgagcacgccgtcccccaggagcagatcaaccaattgctggtgacgctggcccgacagggcaagcgggtgttgcgcctgaagggcggcgaccccttcattttcggccgtggcggcgaggagatcgaagagctggcggctcacgatatcccgttccaggtcgttcccggcatcactgccgccagtggctgcgccgcctacgccggtatcccgctgacccatcgtgatcatgcgcagtcggtgcgtttcgtcaccggccacctgaaggatggcagctgcgatctgccctggtctgagttggtggcgcccagccagacgctggtgttctacatgggcttggtgggtttaccggtgatctgcgagcagttgattgcccacggtcgcgcagccgacacgcccgtcgcgttgattcagcagggcactaccagccatcagcgtgtctttaccggcacgctcgccaatctggccgcgcgggtcgcaagcgagcaggttcaagcgccgacgctgattatcgtcggcgaggtggtgcagctccgagagaaactcgcctggttcgaaggggctggtaccgcgtccgaatagacgcggcgctcgcatgcatccacatcagacgttgcgcctgctcagcgcgaccagatccccttgccgggcaggcggtcgcgatcatgcgggcggtccaacgccaagtgcgggcctttggggatgatgccgttggcgttgatatggcggtggctggcgtagtaatggctcttgatgtgggcgaagtcgacggtttcggcgattccgggccattggtacagctcgcgcagccagttcgacaggttcgggtagtcctcgatccgccgcaggttgcatttgaagtgcccgtaatagacggcgtcgaagcgaatgatcgtggtgaacaggcgccagtccgcctcggtcaggtattcgccggtgaggtagcgtcgctggctgaggcgctgctccagccagtcgagttcgctgaatagctcatcgaacgcagcctcataggccgtctgcgtggaagcgaatccggcgcgatacaccccgttgttgacccgcggatatatccgctcgttgagcatgtcgatctcggcgcgcagcggctcggggcagaggtccagcgtcgatccggtcaactcgtcgaaggcgctgttgaatatgcggatcaactccgcggattcgttgttgacgatgcgttgctgctggcgatcccagagcaccggcacggtcacgcggccggtgtagctttcgtcgtcgcgggtgtagcgctgatgcaggtattgcaggccatccagcgcgtcaccggtcgagccggtgcgtttgtcgaaggtccagccctgctcggccatcagccagctgacgaccgacacatcgatcaactgatcgagctgcttgagcttgcggtagatcagcgtgcgatgtgcccaggggcaggcgagcgaaacgtagaggtgatagcgtccggcttcggccttgacggcccgttgaccgtccggaccgggtgagccgtccgcggtcagccagtcgcgtcgttgcgcctgctctcgctggaattcgccatcacggctgttttcgtaccagcggtcctgccactgaccatcgaccaagagccccatgtgctgcctcctcagactttcaggttagggacgagtctagggaggatagttcgatggatggatcacaatccccggccaaacgcatcgttcagaccgataggttgcgtcgctcccagtactgccgcgcctgaatgaatgcgttctcgcgcaaatgaccgagcccgcgcagggccagggccatcgtcgccaccaccgccagttcgccataggcatcttcggcctcgcctcgccagatggcgagtagatgctgcggatcgagttgcgccggcttgacgtgacgttgtggcgaaagcgccggccagtcctcgtcccaggactcgcccgcttgcgtgccgtacaggtgcgcaacgccgtccggattgacctcgatctcgccgccttcacccttgatgacgatggccgtgtcgcccagcaaacgactggcttcacgatggttggcctgataaccggggtggaaaatgctctgcaggccgcaacgggcgccgagcggattgagaatccgcgccagcgagtggatcggtgaacgcaggccgagaatgttgcgttgatcgatcatgcgctgcaggccaggcatccaggcaccgagcggtgcgaacgcgaggttgtcacgatccagagcagccgcaacgctttgccagtcttcgcaacgggcgattccgagcagatcgagctgctgctcgctatacattcttcctgcggtatgagcgccaccaccgtgcatcaggatgcgaatgccattttgcgccaggcacatggccgcgagcaggtaccagggcagatgacgcttcttgccggcgtaggttggccagtcaatgtctacggcgattgctggtgcgtgcagccgttcgcgcacggcttcggtgaagccggcaagttcttcggcgctttcttccttgtgcctcagcagcatcaggaaagcaccgagctgggtgtcctcgaccttgctatcgagcagcatgcccatggcttcacgggcctcctctcgggtgagatcgcgggcgccgcgcttgcctttgcccaggatccggacgaaaacggcgaaggggtgttcggggggcgtgacgaggctcatatacagttgctcggtttcggcaatcccgccagctttgcggcaagcttggcgggtgtgcctttgaatagacggttcaggtgcatgctgttgcctttgtcaggaccgagtttcagcgcggtgtacttgatcaatggccgcgttgccggagacagttgaaactcgcggtagaactcgcgcagcagatgcaggatttcccagtgctcgggttcaaggctaaggccttcagcctcggccaacgcttgagcgacaggttcgctccaatccccgagatcgaccaggaaaccctcctggtccacagcaatggccgtaccgttgacgttcaacgcgctcatagccaggcgttcgtccgtgtgtaccgacagcacagctcgacgaagccgtggtagtcgactatttgcaaacgctcgggaaggtccgccaggccgcgagcggtgacgtcttcctccagcgcgaacagacctataccgtctggcatcaactccagcgcctggcgttgtgcggtcgacgtttgtaatgcatagaccgcatcgccgctcagcaacagggcgtcaccggacccgagaaggtgcaggcagctggccagacggctatcggcaaagggcgaatgggaaagcagatgcaaagtgctcatcaaagggtgatcacatggtcgtaacggttgataagtgcattgaggccggcatcgtcgagcacttccatcggcagcggcaacgcgctctcacccagtccgcgctcgtccaggctgcgtttggctacgaatagcgagtcgacgccaaacatcggaagtgcctgcaaattggccgtcaggtccttttgctgcacacgggctgcgtgctgcgcggaggctagctggaagacgccgtcatcgaggaacagcagtccgagcgggagctcgaaggcgccgccggccagcacgatgtccaatgcctcgcgagccgttgggccggaccaaggcgattggcgggtaatgatcagcatcgagcgaaccatcagtggcctccgaagcagacgaggcggtcggcttgctgactggcttcatgaagttgccccaggccggacagctcccaaccgggcgcaagattcgccgcaggccgctgatgccgcttggcttcctgctcgtccagcacgccacggcgtagaccggcggcgatgcagaccacgccatcgagttcatgtgcgttgacgaagcgggcccattgagccgctatgtcttcctcgtcctgtgccgtcaccggattggctgatgcgctgtggacgccgtcctggtaaagaaacagccggacaatctcgtgtccacccgccagcacggcctccgcaaagcgcaacgcgcgtcgcgaagcgggggagtgggcaggggagaacagggcgataatgaatttcatggggcaccgttgaattgctggagcacatgatacgccagccacagaaacgaaaaagcccgccgaagcgggctcgatcgattggctggctatcagtcgtcgccacccatgatgcccatcagttgcagcaggctgatgaacaggttgtacagcgaaacgtacaggccgatggtggccatgatgtagttgcgctcgccgccgtggatgatcgcgctggtctggaagagaatgcagaccgaggagaacagcacgaagccggcgctgattgccagttgcaggccgctgatctggaagaagaagctggcgaccatcgctcccagcaggacgaagaagcccgcagtgatgaagccactgaggaagctcatgtccttgcgggtgatcagcacgaacgccgacaggccgaagaacaccagcgcggtcatcgacaacgcggatgcgatcaattcaccaccgttggctgtgcccaggtacatgttgaggatcggccccagcgtgtaacccatgaagcctgtgagggcgaaggtggaaaccaggccccaggccgagttgcgcagcttgacggtcaggaagaacaagccgtagaagccaaccagcaccacgaagatgttcgggtaggcggcattggcttgcatcgccatgtaggcgacaaaggcactgaaggccagcgtgatggcgagaagcccgtacgtgttgcgtagaacgcgactgacttccttctgttcaacctgcgtgtgcgtggatgcgtactgttgcctgagcatggcgacactcctatagatggattcagcctggaacaaactgcctcgatcatagcagagctttcatttggtcctaataacagagtttgacagtgtgtttcgttcgggtactatggcggccgctctctgcggaggagtggcagagcggttgaatgcaacggtcttgaaaaccgtcgaaggggaaactcttccgtgagttcgaatctcacctcctccgccatatcgcgaactgaaggccccggattccggggccttcgtcgtttcatggatgacaaatcgcgggtcggatgtccatgcttccgatccacgaagcgtttgttggccaggcggcaggtacgcttggctgtcagattgtccgcgcagacaaaggaattgtcggatgacccggatcaggctgcctgaggcgttggcgctcgtgcaggaacatttcaagccattgcggttctgcgccacgatggattctccccagaccatccaagcgatgctgctcgacgagctgaccggcgaatcgctggtgcttcccgggctgccttgtggcgtatcggttacccgatctcagttggccacgctcgtcagcatgatcgaactcgacgtggccgccgtgaggccggctctgctcgagcgcacgagcaggcaacagttcgccgacctgcgcccgtcaggccaccgacgcagtgcgtgaaggttcaccgacctcctcggcgtagtggcaggccaccagcctttcgtccagcggtcggaatgccggtacttcggcgcgacagcgctcggtggcgtgcggacagcgcgtgtggaaggggcagccgccaggcggatcgagcgggttgggcagttcgccgctgaccttgatcttcggtcgcgccgcatcgggccgaatgcttggggtcgccgccagcagcacctgggtatatggatgcaaggggcgggtatagatcagctccgccggacccatttccatcgggctgccgaaatacatgaccagcaccttgtccgccacgtgacgaaccaccgccaggtcgtgagaaatgaacacgtagccggcgttgaactgctcctgcaggtccatgaacaggttcagcacctgcgcctgaatcgacacatcgagcgccgaggtgggttcgtcggcgatcagtaccttggggttgagcatcatggctcgcgccagggcgatgcgttggcgctgaccgccagagaacatgtgcggatagcgctggtagtgctcgggcctcagcccaacctgttgcatcatcgcctgcacccgctcacggcgctcgctacgtgatagcccggtgttgatgaccaggggttcggccaactggtcaccaatcttctgcctgggattcagggacgcgtaggggttctgaaacaccatctgcacgtcgcggcgcagctgtttgcgttgggccttgtcggcgcctgcgacttcctgcccggcaatctgcagcgaaccggaagtgggttcctcgatgagcgtcagcgcccgggcaagcgtggacttgccgcagccggattcgcccaccaccgcaagcgtttccccggccgccagttcgaaagacaccccgttcagcgcacgcacggtggcccgtggtttgaacagcccgcgcgagatctcatagtgacgggtcagctcacgtgcggacagcacgctgcctgtcgatgcctcaatagacatgatgttctccgggtggctggctcggacgttgcgcctcgggcagcacttcaggtgcttcgccaggcgtcatgttgcgcgggaaaaagcagcgcacttcgccgcggtcatagggttccagcgcaggtcgctcttggcagcgcggctgggcataggggcagcgtggcgagagcaggcagccggctggccggtcgtaacggcccggtacgatgcccggcagcgtcgccagccggcggctgttcgagtgctccgggatggaggccagcagcgcttcggtataaggatgggccggggcgtcgaaaagctgcggcacgcgaccggtttccactgcctgaccggcgtacatcacacagacgcgctgagcggtttcggcgacgaccgcgaggtcatgagtgatcaggatcagcgccatgttctggtcgcgctgcaagctcagcagcagatccatgatctgcgcctggatggtcacgtcgagcgccgtggtgggttcgtccgcaatcagcagctgcggctcgccggcaatggccatggcgatggctacgcgctggctcatgccgccggagagctgatgcggataggcatcgaggcggctggctgcgccggggatttccacccgttcgagcagttcgagcgcgcgttgccgagcggccttgcccttgaggcccaggtgttggcgcagcacttcctcgatctggaatccaaccgtgtagctggggttgagcgcggtcatcggatcttgaaagaccatcgccaggtctttgccgatcaaacggcgacgctggcgccctttgagtgtcagcaggtcctggtcggcaaaccggaggcgatcagccgccaccttgcccggcggatctatcaaccccatcagggccatcatggtcacggatttgccggaaccggattcaccgacgatagccagcacttcgccccgctcgacacggaggtccagcccgtcgacgaccggcggtgcgccgtcgtcgccgaaacgcaccgacaggttcttgatttcgaggaggctcatggccggctgtcctccgtttgtgtacggcttgaatcacgcatcgaagacttcctcatgcggcgttcttgagcttcggatccagcgcgtcgcgcaggccgtcaccgagcagattgattgccagaacgctgagcaggatcgccaggccgggcagggagaccacccaccaggcacgttcgatgtaatcgcgagccgaggccagcatcgttccccattccggcgtcggcggctggacgccgagaccgagaaagcccagcgccgccgcatccaggatggccgaggaaaaactcagcgtggcctgcacgatcagcggcgccatgcagttgggcagcacgctgacgaacatcagccgcagcgttccggcgccggccagccgcgaagcggtgacgtagtcgcgattgagttcggtcattaccgccgcgcgggtcaggcgtacataggagggcagtgacacgatggcaatcgcgaagatggtgttgatcaggcccgggccgagaatcgccacgattgccaccgccagcagcagtgagggcagggccagcatgatgtccatcagacgcatgatgaacgggccgattcccgtgggggaaaagccggccaacagcccgagcaggatgccggggatcaacgagaaaacgaccgaggccaggccaatcaacagggacagccgcgcgccatggatcaggcgcgacagcatgtcccgtcccaactcgtcggtacccaatagaaactgggacgtgccggtctcttgccaggcgggcggggtgagcaggaagtcgcggaactgttcggtggggttgtacggggccagggcgggcgcgaacaaggcgcagatgaccagcagcgacatgaagatcaggccgcccagcgcgcctctgttgcggcgaaaggcactccagaactcccggagcggtgaagggtactcggtggtcggctcggcggccggcagggtgtcgatgtggttcatgtgcccgacctccttaacgctggtgacgaatgcggggattggccagcccgtagaggatatccacggtgaaattgaccaggatgaccaggcaggcgaccagtaggatgccgttctgcaccaccgggtagtcgcgtgcgccgatggattcgatcagccacttgccgatgccgggccaggagaagatggtctcggtaagcaccgctccggccagcaatgtgccgatctgcagcccgaacaccgtgaggacgggaatcagcgcgttgcgcagcccatggacgaataccacccggttcggcgacaggcctttggcccgggccgtgcggacatagtcttcgcgcagcacttcgagcatcgccgagcgggtcatgcgggcgatcaccgccagtgggatcgtcgccagcacgatggcgggcaggatcatgtggtgcagcgcatccagaaaagcaccttcttcgtcactgagcagggtatcgatgagcatgaatccggtgactggctgcacgtcgtagagcagatcgatgcgtccggacacgggcgtccagcccaggccgaccgagaagaacatgatcaggatcagcccccaccagaagatcggcatcgagtaaccgaccagcgatatgcccatcaccccatggtcgaacagcgagccgcgcttgagggctgctatcacgccggcaaggacgccgagcgtaccggcgatgaccagcgcggcgatggccagttcgagggtcgccggaaacagcgtggtgaattccttccagacgctggtgcgggtgcgcaacgactcgccgaggtcaccctgggcgagtcgtccgatgtagtcgatatattgcaggtagagtggtttgttcaggccaaggcgctccatggcctgggcatgtaactccgggtcgacccggcgctcgcccatcatcacttccaccgggtcgcccgggatcatgcgaatcagggcgaaggtgagcagcgtgatcccgaaaaaggtcgggatcagcaggctcaaccggcgggcaacgaaactgaacatcgtgacagaactcctgatcgggcgttgccggcgacatgtgtgtcggcaaggcgattgcgcaacggctgatcaaccacgaccgattcggctaccgtcgaacgcgggtcggggctggtaggcaaaagcgcgagcgacaactgggccagcccgcaggccagcccggttgctcatctcactagcgcttgttttccacgccgtagaaggagttgagtgcgaacgggctgatcttgaagccctcaacgctgttgcgcatcggctggtagacagtcgagtgcgcgatgggggtgatcggtacctgctcctgaatgatgtgctgcgcctgctgataaagcttggtgcgctcagcctgatctgtcatgcgcttggcctgtttgacgaccttgtcgtattcaggatcgcaccacatggaaaagttgttgccgcccaccgcatcgcagccatacagggtgttgagccagttgtcaggatcaccattgtcgcccgtccagccgatcagcatggcgtcctgttcgcccgcatggccgcgtttgatgtactcaccccattcataactgacgatgcgcgccttgatgccgatcttggcccagtcagcctggatcatctgcgccatcagcttggcgttggggttgtagggacgttgtaccggcatcgcccagagggtgatctcggtgccttccttgacgccggcctgcttgagcagttcgcgggccttttccggattgtattcggtgcccttgaggctctcgtcataggaccactgcgtaggcgggagggcgttcacggccagctgccctgcgccctgataaaccgcctcgatgatcgacttcttgtcgatcgccatgtcgagcgccttgcgtacttcgagtttgccgagcggctcgtgctccacgttgtacgcgatgtagccaaggttgaagccgggctggtttggcaccttgacgttggggtcgtcctgcagcgccttcaggtcggcggggcgagggttcaatgtgacctggcattcgccggcacggagcttctgcgcgcggaccgaggcatcggtggtgatggcgaagatcaggttgtcgatcttcacatcgtctgggatccagtaatccttgttgcccttgaagcgcacctgcgcgtctttctggtagcggctgaagacgaacggcccagtaccgatcggcttgcggttgatctgctcggcgttgccggccttgagcagttgatcggcatattcagccgagtggatcgaggcgaagtgcatcgccatgttctggataaaggccgcgtccaccttgtcgagtgtgaaacgcaccgtcatgtcgtcgactttttcgactttggtgatgttcttgtccattcccatgtcggtgaaatacgggaactcactgggataggcttttcggaacgggtggttcttgtccagcatgcgctggaaggtaaagactacgtcgtcggcgttgaattcgcggctgggcttgaagtagtcggtggtgtgaaatttaaccccggggcgcagatgaaaggtgtaggtccggccgtcgtcgctgatgtcccagctggtcgccaggccgggctgggcgagggtgccgccgcgctcgaattgcgcgagacggttgaatacggtttcagcggaggcgtcgaaatcggtgccggtggtgtactggcccgggtcgaagccggctgggctgccttcggagcaatacaccaggttgctggcagcgaagctcatggacgagccgaggagtagtcccgcggcgagcaacgctcggatggaaagatcgtttcgcatgcaaacctcattctttttatgttcatcgagggttggtcttgtggaccgaacagtggctcactgcacgccggtgtcgccgttggggttcgcccgctcggcgcagaacactgttggagaccgagtccagaagactacagcctagcctgtctcgaaattaagtcatgctgaaaacgcggtcaaccgaaattaagtgcggctaaatatcgtcgacgtggtttcaggttcgagatcaagcaatagcgatgccagttaacgggtggccaggtcgtcgaacaggcccatggtggtgacggtgagcacttcggcaacctgatcgccgatgttggccaggtgatggggtttgcccgcatcgaagtgaatggagtcgccgcaagccagcggatagtcgcgaccatcgactgtgtagacgattcgcccggacaggacataggcgaattcagcgccttcatgagcgatgagttcggactggtaacccaccggcatgctgaccttgacggcgttgagcagattgcccggaaagttcgtcgacagccgttcgtaggtcaacggctggccctcgatggtgtagcgcacacgctcgccctgatgcgagtccggttgtgcctggctgggctggtcgaacagtgagttgagcggaacgccgagtgacttggcgatgtttgccaacgacgatatcgagatgcccgtgaggttgcgctcggcctgggagagaaagctcgccgtcagcccggactcctgggcaacctggttcagggtcttgttcgcggctcgtctgtgccggcgtaaacgttcaccgatgcgatcgactgtcatggggtcccgccttgtgaaagtggccagtatacggccagcccgatgcgctcgcgccagccctggttccggcaaaaaggtcggtgcaatgaaaaaacctttgcttagaaatttaagctgtacttaaattctgccgtcatttactcgaatgaggaacaggcatgaccatcggtgtcggcggcagtacgcaagaggaggcgctcgggcgcttgcgccatatgctcgacggcgtcgaaccgatcgctgcggccgaatatcaggcgcgtatcgacaaggcgcaggaacgcatgcggcatctcggcctggatgcggtctttctcagcgccggggccaacctcgagtatttcaccggggtgcgatggtcgccgagcgagcgcatggttggtgcgttgctgcccgctaagggtgcgctgcagtaccttgcacccgcattcgaacaaggcacgattcgcgacttcatggtcgtcgagggcacgatcaacggctggcaggagcacgaaagtccctatcggctgttgctcgactgcctgcagcgcatggggatcgtcccgaacaccagcctgcgcccgcggataggtctctgcccgtcgttgccgttcttcatgttcgatggcctgcgcctgctcgatcccggttacgcgttcaccgatgcaagcgtggtgaccgcctattgccggcaacggaaatcagccgccgagctggcgctgatgcagcgggccaaggacatgacgctggccgtgcacaaggccgccgcgagcattcttcatgagggaatcagcaccaccgaagtggtccgctttatcgagcgtgcacaccgagcggtgggcgcgtcgggttcgaccttctgcatcgtgctgttcggcgaggcgagtgcctttccccacggcgtgaaatacccgcagacgctcaagcgaggcgatatggtgctgatcgacaccggctgttacgtgcacagctaccagtcggatatcacgcgcagctacgtattcggcgagccggacgagcgccagcgggcgctctgggcattcgaaaaagacgcccagctggcagctttcgccgcagcgcgactaggcgctcgctgtgaagaggtcgacgcggcggcacgccatagcctggaagcttccggcctggggcctggctatcaactgccggggctgcctcaccgaaccggccacggaattggcctcgagatccacgagagtccctacctggtgcagggcgaccagacacctatcgaggtgggcatgtgcttcagcaacgagccgatgatctgtgtgcccggcgagttcggtattcgcctggaggatcatttctacatgagcgaggaggggccgcgctggttcaccgagccgagtcatagcatcgacgatcccttcgggctggaccgctgaccagccgggcgctgcgctgaactgcaccggcaaacaaaacgttgactgtgcttgttcaaggctcatcgggcctgcctagaatcgagggtccagccacccacccggacctcatctcatgtcttcgcgccgcttcccgttgctgctcgtgggcgctttcctcgcgctctacctgatctggggctccacctacttcgtgatcaaactgggagtccaggcctggccgccgatgctgctggccgggctgcgcttcgtcattgccggagccctgatgttcggctggctgcgctggcgtggcgtgccgatgccaacagcgaaggagtggcgtgcttgtgcgatcgtaggctttttgctgctcagctgcggtaacggcggggtgaccattgccgagcaccttggcgtggcgtcggccgtggcggcgttggccatcgccaccgtgccgctgttcgcgctactgttcggcttgatctggggccagcgcaccaccggtctggaatggggcggcatcgtgcttgggctggtggggatcggcctgctcaatctcggccacaacctgcaggcaagcccgcttggggccgtgctggtcttgctggcggcggcaagctgggcgttcggttcgatgtggagccgccatctcagcctgccgagcggagccatggccagcgcggcgcaaatgctcatcggcggagccgtcttgctggcgggcagcctggccagcggcgagcgccttgaacaagcacccgatgccgcaggttggttcgccttggcttatctgacgctgctcggctccatcgtcgccttcagcgcctatctctacctgctcaagcatgtgcgacccgctgcggctaccagctacgcctatgtcaatccggtggtagccgtgctgctgggggtgacgttcgccggggaacggatcggtaccgaagaatggttggcaatgacagtcatcgtatctgcagtggtactgataggcctgccgcagtggcgcaaaccgccagctgccgccgatgcgaaagccgtctgaatggcgaagatcacctggacccgctagggttgtatgatgagttgcgcaggccacgcgcagcggaggcccagaacactgtcgttgagcgagcggttcctgaccctgtcggcttccgctgagcaggcctgccatccaatccgtatctccttaccgacaggcgaaccgatgcccgctgcgaaaacccctgccgccaacgacaccgtcttcatcctttccctggtggtcttcaacttcatctcgttcatttccatcggcattccactggcctcgctgccgggctacatccatgaaaacctcgggttcagcaccgccatcgcaggcatcgtcattggcgcgcagtacctgacgaccttgttatgccgcccgcttgccggtcggctggccgacgagcggggcgcgaagacgacagtgttgatcggtatggcatcaggtctgagcagcggtctgctgctgctgatttccgcgttgctttcgtcctggcccacggcgagcctgaccgtaatgctggggagccgcctgattctggggtttgcccagagcctcatcggtatctcggccatcacttggggtatcagccgtctgggaccggaaagcaccgcacggatgatctcgtggaacggtgtcgctgcttatggcggcgtggggatcggcgcgccgctgggtgtgtatctggagcaatcgctggggttgtggagcctgggcgtggtgaccatgctgctcgcggcgagcggattggcgctggcctggcgccggggcgacgcgccgctcaacccgggcgagcgcttaccgttcggcaaggtcctgtggaaagtcgctccgcctggcctgagcctgtcgctggccaccattggctacggcacgctgaccgccttcattgcgctgtactacagctcgcgcggttgggaaggcgccgcctggtgcctgacggccttcgccttcgcttttatcggaacccgcttgctattccccaacttgatcaaccgtgtcggtggctattcggttgcggtggtctgcctggtggttgagattttcgggctgacgatgctctggcttgccgaggcgccgagcgtggccttggccggttcggcgttgaccggatgcggcctctccttgctctatccggcgttgggcgtgggcgtggtctctcgcgtcggggccgtcaaccgcagttcgggcctcagtgtcttcgccatgttcttcgacctcgcgctgggcttgtccggtgcgatcatgggcgcgctggccgtctacatcggcatgcagaacatttttctcggcgcggcggcgatggccgtggctggccttgcgatcgtttgggtgttgctcaagcaggagcgcaaggccgaaggatgaccccgtgcggtggcgctagttgaatcctgggatcaagctgagtgacgcctgccgcaagcgggctcaccagcgtgaggtagaaaggggagcgggtgttacgggaagacgagcagctgctggggaggggcgccgttgagcccggtacccgctaccgcaacgtttgccaaagggcgcctgtaacgtaacgaatgtccacgcgggtcatcttcctggcgcgcatatgccgagatccagggaggcacgtcgcgcgagggctgcggcgctcggccggtagctgcccttgcctcgctggagctgcttccagaactccagcggctgcttggtgctgaggtccgattgcttcaccagattttccagggtcttgctgctcatatggcctccaatagctcggtcgagtggttggtggtcttgataaaagtcgcgtccttgcgccagccgtcgcggctttccatggagcagagattgcctggagcgagttacagcttgttgacagatcgttcaagattcgcctgctggacgaacggtcagtcttgggcgtgaccgcctgccctgggtgaatcgacccagtcaattgacatgtagctgtaggcctcgttattactcaacttgccgtctcgttgctatcgaaatgcaatcagttagcacgctgctagatatataaagcgaataacggctgcgcttaacctggcatcaaccgttcatcgttcagggagaatcatttcgaactattgcccgcatgtcgccctccgagatagtgaggcggttgtaatgcagtcgccatttttaattagcatcactcacgtaactggagatatctcatgtcgaatgataagagcggaaatccgggcaactttgctaatgatcgcgaaaaggcttccgaagctggaaaaaagggcggccacaacagcggcggcaactttgcaaacgatccgcagcgcgcctctgaagctggccacaaaggcggccagaacagcggcggcaacttcgccaatgaccgtgagaaggcgtccgaagccggccagaagggcggtcataacagcggcggcaacttcgctaacgatcgtgaaaaagcgtccgaagctggcaagaaaggcggccagaacagccacggcggcggtcgcaactcgtaataggttatcgctgctgcggtaactgtaacgaataagcgggacctggataccaggtcccgttttttttgtgcttgcttttacttctctaatgctgttgtaagtttaattttatccgtcaatcggtgagccatatttaatagcgcttataaatcggcgcgtttgctaagccgaagcgttttcctgatttccgtaactaattcatttctgataaggggcgatgccgtccgattgtcctggcgctgctcatcaccttggctgacgatcgcgagctgtttcgttgacggctgaactcatcggagccgttgcggccgaaatagatagatacaaaaacagaagtaggacatggcccagatttttccccgttcggctgacatgtggctgcgtctgaccttgctcatcctgtttggcgggctggtcttgctgttcgtggcgctcgcggtgctggaccgctccgattacaacaccggcaagggctgggtggtgcgccaaccggtgcctttcagtcatgaacaccacgcgggtgcgctgaagatcgattgccgctactgccacgacagcgtcgaagtcagcgccgtggcggggctgccaccgaccgacacctgcatgagttgtcactcgcagatctggacgggcgccgagatgcttgcgccagtgcgccagagcctggtcgaaggtaagccgctgcgctggaatcgcgtagccgagctgccggactacgtctatttccagcacaacgtccacgtcaacgccggggtgggttgtgagacctgccacggccaggtcgacaccatgccgctgatgtatcgagcggagaccttcaccatgagctggtgtctggattgtcaccaggaccccgcgccgcggctgcggccacgtgctgcggtgaccaccatgggctggaagaccgagcacgaccgtcgtgcgttgggcgagcgaatgatcgaggagcaccacgtcgacaccgaaaacctgacccactgctatatctgtcacaggtaacccatggatcgcacgccgctcgactacgccgccatacggcaacgtctcgaaggtcagcacgggccgcgctactggcgcagcctcgaggagctggccgacgaaccggcgtttgccgcattcgtcgaggcggagttccccagcatcgcgccggaaatggaccgtcgccgcttcctccagttgatgggcgcctccctggcgatggccggtttggccggctgtggccaggagccggaggcaggcgtgccctatatcgtgcaaccggagaaggtcattcccggcgaggcgcgctggtatgccagcgcggttccgtttgccggctatgcgcaaccggtgctcgggcggacccatgtcggccgcccgaccaagctcgaagggaaccccgaccatccgctcagccagggcgctgccaccgctttcacccaggcggctatcttgcagctgtacgatccggatcgctcccaggcgcctcgccatgaagggcatatcagcacctggaatgcctttcagcgtacggcggtggagcaggcgagccgcgccgatgctgcgcggggcggcggcctgcatgtgctgatgggcgccaatagctcgccgaccttgcagcgccagttcgccgccatggtcgagcgctggccgcaggcgaagctgtaccgcttcgaaccctgggaaggcgatacctatgccgccagcgagcgagcgctgggacgtccgctggaaacccactatcggttcgaacaggccgagtgggtggtgagtttcgagcatgactggctcgggccaggtccacgcgaattaccgcaggcgatcgcctggagcgagcgcaagcgaagggccgctcgcggagaaggcgaagcgcgcctggtcgtggtggagtccttgtccacggtgactggtgccaaggcggccaatcggcggcgggtcgagccatcgcagctacgcgcctacgtgcaggcgttggtggccgcgcttggcggtgacgctgcgccgagcttgccaggcgatgcgcgccaatggatcgatgagttggccgagcaacttcgggcacggcgcggccgcggcctgatcaccgccggcgagttcgcgccgttggatgtccaggccgcggtgcattggctcaatcagcagctcggcaacctgggcagaaccgttcgatacaccgagccggtgacctggctcgaagccggagggcagcgcctttccggcttgccggagctggtgaccgcaatgcaggacggtgaggttgaaaccctgctgatgctcgactgcaatccggcgcacacggcaccgggtggcctgactttcaccgacgccctgagccgggtaccgctgcgcattcatgctggcctctattacgacgaaacggcggctcaaagccattggcatctgccgttgacccacgcactggatggctggtgcgacagccgtgccgccgatggcagcgtctgcctgacacaaccgttggtgcgcccgttctacagcagccgcacccaggccgaggtgctggcgctgatgatgggcgacctgtcgccagacgctctggccctggtgcggcagacctggcatacgctggacgacgatgcctggcgcaaggcgctggaactcgggtacatccgcgacagtgcctttgcaccggtcgaggtcagcgcaggagcgccacggtgggacgcctcggatacctccgaagcggccggtctgaccgtgctcttccggcccgatccgagcatctgggacgggcgcttcgccaatctcggctggcttcaggagttgcccaagccgatcagcaaactcacctgggacaatgtcatcggtgtttcaccggcactggccgagcgggaaagtatcgccagcggcgaccgcctgcgtgtcaccctcgagcgtaacgtggtcgaggggcctgcctggatcatgccgggacaggccgatgacacgctgagcctgttcggcggctacgggcgggaccgcgccgggcgggtcggcgatgggcttggttacgatgtatcgcccctgcgtaccgccgagcatccctggatgcgggagggcgcgcagctgacccagctggaacggcatatcaagctggcgtcgacccagccgcatcacgtcctgcagggcaaggaactgatccgcagccacccgcgcgaggcagcctatgatgaagtcgcgccgaagccggaacaggtcacgctgtatccgccgccgaagcaggccgacaccgcctggggcatggtcatcgatctggaccagtgcatcggctgcaacgcctgcgtagtggcctgccaggccgagaacaacataccggtggtgggcaaggaacaggtcgagatggggcgcaacatgcactggctgcgcgtcgaccattattacggcggcgacccacgcgaaccgacctcggcgttccagccggtgccctgcatgcattgcgaccaggcgccgtgcgaagtgggttgcccggtcaacgcgaccgtgcacggcccggatgggctgaacgagcagatctataaccgctgcatcggcacgcgcacctgctcgtcgtactgcccgtacaaggtgcgtcgcttcaactggttcgatcttacccaggacgatccgccctcgatccagcatcagcgcaaccccaacgtcacggtgcgctctcgcggtgtcatggagaagtgcacctactgcgtgcagcgcatcagcgaagcgcgaatcgccgcccgcatcgagaatcgggagatccgcgatggcgaggtgaaaacagcctgtcagcagacctgcccgacccaggcgatcgttttcggcaacctccaggatccggacgcagaggtcaaccgcgaacgccacaccaggcgtcactacgcgctgctcgaagaactcaacacccggcccaagacgacctacctgggcctggtagaggagccggcagtattaccgggcgatcccgggcccctggagttgcgctcggccaagggggaacgcgatgtctgaggcgccgcatttcctgccacaagggatgccgcttggcgcggtgtcggagcgggtgctcgatctaccgaccgacttcaaccgctaccggcgggcctggtggatgctgttcaccatcagctgcctgctgctgggtgtgttcgtcgtcgccgctgcggtggcgttgtggagaggcgtcggcgtgtggggcaacaacatcccggtgaactggggcttcgccatcctcaactacatgtggtggctcggcatcggccacgccggcacgttcatctcggctttgctgctgttgctcaaccgcccgtggcgcaactcgctcaaccgccttgccgagctgatgacgctcatggccgtggtctgcgccggggtctatccgatcctgcacctgggacggccctggttgttctactggaccgcgccataccccaacaccatggagctctggccacagttcaagagcccgacggcgtgggactttttcgcggtgctgggttacctcggcgtgtcgctgctgttcctctatgtcggctccatccctgatttcgcctcggcgcgtgatcgcgccaccaagcggcactaccaatacttctacgggctgctcgcgctcggctggcgcggcgcggcttcgcactggagccactggcgccgcacctaccgattcatcgcactgctggcggtgccgttggtgttctcggtgtccagtggctactcgttcctgctcgatctggcgccggaaacgggctggcactcgaccgtctttccgccgtatttcgtcgccggtgcggtgttctccggtttcgccatggtcatcgtcatcgcgctcgggttgcggcggttcttcggttggcacgagctgatcaccaatagccacctggacaagctcggcctgctattgctggcgaccagctggatgaccagttacggctatttcgccgaacccttcatcgcgttctactcaggcaaggaacacgaaatcctggtgaccatgaaccgcatcgccggccccaccgcctggagcttctggacggcgatcttcttcaatctggtggtgacccaggcgctgtggtggccggcggtgcggcgcaacggccgggccatgctggtcatcgccctcggcgtactggtgggcatgtggtgcgagcgctacatgctgatcatccaaccgccgacccgcgattacctggtttccagctggcaggcgtacagcccgtcgttctgggactgggcactgttcgtcggcaccttcggcctgttcatggtgccgttctcgctgttcatgcgcttcctgccgatgatctccaccttcgaagtcaaggaagtgctgcatcgctaccgtggaggcgccaatgagtaagcgccattacggcctgctggccgatttcgcccatcccgatgcgatgctcgacgctgcgcgcgccgcacgtgcggcgggctatcggcggatcgaagcctacagcccgttccccgtggaagggatcgaggaggtgctcgagcaccgcagcaatcgtccttactggtttggcgtggtgggtgcgctggtgggcgtcgccatcgggctgggcatgcagatctacgccaacctcagctacccgctggagatcggcggtcggccgctgatcgcgttgcagagtttcagcatcgtcacctttctgctgatggtcagcttcgcgacgatcttcgccgtgttcggcctgctctggttgtgccggctgcccttgctctggcacccgctgcatgaggcgagcgcgttcgatcgcgccaccgatgatcgctttctgctctgcatccgcgctgacgatccgctgtacgaccagaccgggacggcgctctggctggccgagcgtgcggtgtcggtgaccgaggtgccggcatgattcgctggtcattgctctgtgcgctgctgctcagcctggtcggttgcgacgacatggccgagcagccgcgtgccgctgcgcaggaagccagcacgttcttcccggacggcaaggtcaaccaggtaccgcccgccggcaccgttgcccgcggagacctggcctgggaagccgtactggccgagcgacccgcgctgacggtggcgctgatgcagcatggccgggagcgcttcgagatttactgcacgccttgccatggcgtggcgggcgatggcaacggcaccgtggtcaatcgcggttttccgcggcccccggatttcgccgagcccaggctcgtcgcggcgcccgatcgacatttcatggacgtcatcgcccatggctacggccagatgtacagctatgccgcacgcgtgctgcccgccgatcggtgggccatcgtcggctatatccgcgccttgcagttcagccgtcgcgccgatgttggcggcctgcctgaaatcgaccgcgacactttggagcgcctgccatgaacctgcgcagatgggcatccatcagcgccggactcggcgtgctcgggttgttggcgtgcctgctactggccagtcgcgaggcggtggcggcgagcctggccagtctgctgggcctggccggcattcccttgggtgggttgtgtctgggcttgagcgtggcgctggtcagcggcaatgcgcgggaccagttatggccatggacgctgttcagctcgcgtgccttgccagcgctggcgctgattgcgctcccggtgctggcgggtgctggtgtgctttacgaatgggtcggtcctgatgagggcggttttcgcgggttctggctcgcctggccaagcttcgccgtgcgcggtgtgctgtatctggccgcgtggtgggcgttgtcgacctgggtgctaccgctcagcatcaagcggtccgcgggcgccggtctgggcctgattgcgctggtaatgaccacgtcattggccgcggtggactgggcgatgtcgctcgacccgcacttcaagtccagcctgttcggcatggtctggttcggccggttgatgctcagcggcatcgccttttgttgcctcttcgcgctgggacttggcgttgatcggtcgggccgcgatcggtcgggccgcgatcggccgggcgtgctgcgcggcatgctggccgccgcggtgttggcctggctctacctgcatttcatgcaatacctggtgatctggtacggcaacctgcccgaagaaatccgctggtatcagcaccgcgccgagggtggctggctgtggctgacctggctgttgggtgccggtcaatcgctggtcttcatcgcgttgctctggccgttctcgcagcggggcagggtgttgatggtgctggcgacggcaacgctgttgctggggctcgccgaaggcgtctggatgagtctgcccggcctgagcgagatgcatccggtactgcttgggctgtcactgatcgctgcctggctggctggcggcgggctgctggcgctggccttgctggcgaagagaacactgccgaggagaacgccatgagtgtgccggtggatccggtttcgaaagaagacggcttcgagcatcacgacgccaacgtcaaggtgctgctgatcatcggtttcggcattttcgccgtcctgctggtcgccggtatcggcgtggccggtttgctctggtggtacgacctgcagccggacgaggcggtcaccgcgcttgagaggcaggcggcaaaaccgcccgagccgcgtctggaaagcgatccgcgcgcgggtggcaacgacgtgttggcagcggggcgcgaagtgatcgagcactacggctgggtcgaccgcgacgccgggctggcacgtatcccggtggaccgcggcatgctgctactggcccaacgcggctggccttcccgtgctgagcccgagcccggtgaaaccatgccgcctcgcgagcagcaagccagggggagggcgcagccgtgacgcatcgatctccatgccaggacggggcgacggctatgtgttggcacccatcctacaaatctgcggtacggcagcagcggcgcgagacgcagcaatccacgtgcgtcccgtgcggccaagtcggcgaacagcggccgacgagccagcggccacaggccacaactcgctttcgacgcggcattgctagcgtgtttctggcggttcttgtcctgctgtacggcggcccggtcatggccgatgcgccgttcgatccgttcgcggcagccggtatcgaacagaagcccggcgcacagctgccgatggggctgcacttcagcgacgtgaacggcaaccgggtcaccctcggcgagctgttcgatgggcgcccggtgattctcgcgccggtgtactaccgctgcccgaacgtttgcggcgcacagctttcgagcctgttcaatctgttgtcggcgttgtccttcgatctcggcaaagactacgaggtcattgcgttcagcatcgacccacgcgaaaccccgcaggatgccgaggccgaacgcgccaagctgcgcaaacgctggccgcagctggtggactcgccgcacgtgcactttctcagcgaggtcgcgccggcgacccgtccagaaccgaacccttcacatcccgccgctggcaccgcattggccgaagcgattggtttcaactacagctgggatccggaaatcggcgagttcgcccatgcctcggcgatcgccaccctcagcccggacggcaagctggtgcgctggctgtacggcctcggttatcagccggatgacatgcgcctcgccctgacggacgccggcgaggggaagataggctcgttgggcgaccagctgttgctgctctgttaccactacaacccgcgcaccggtggttacgacaacctggtcatcggagcgctgcaggtcggtggcatcggcaccacgttgctgctgggcgggttcatcggcgtcaccctctggcgcgagcgccacaagcagaagggtgccgcatgaacgaaaccttcgtccgcttctggcccgaaaccgcctcgagctatgccggcaatgtcgactggctggttttcgccttcaccgggatgatgatgttcttcgtggtgccggtgttcgtcctgctggtgctgttctcgttccgctatcgcaagggcacccaggtgccgcgcgaccatcgtccacggggcagcatgaaggtcgagatgacctggatcgccttgcccttcgtcggcgccatggtcatctatctggtgtcggccaagctctattacgacgtgcgcacgccgccgccggacgccatggaaatccaggtggtcggcaaacagtggatgtggaaattccagcaccccggcggccagcgcgagatcaatacgctgcatgtgccggtcgaccagccgatcaagctcaacatgatttcccaggacgtcatccacagcctgtatttcccggccctgcgggtgaagcaggacctgctgcccgggcgttatacccagctctggttcaaggccgccaagaccggacgcttccaggcttactgcgctgagtattgcggcaccgaccactcgcggatgctggccgatctggtgatcctgcctgaacaggagtacgcggcctggctggagcaggccggtagctctgaaagcctggccgatcagggcggggcactgttccgccagttcggctgcagcggttgccatggggcggccaatgtcgcccatgcgcccaacctggccggcctctacggccgccgagtggccctgcagaacggcgagtcggtgctggccgacgatggctacattcgcgacagcattctgttgccgaacaagcacgtggtggccggtttcgagcccatcatgcccagcttcgacaacgtgctggatgaggaagcggtgctgcgcctgaccgcctatatcaagtctttaggacacatcggcgaaggagggcaggatgcatctgaccagcactgaaacgacccaccgtgaaaccggcttgcctcggcacaggagtcccacccgttgagccagaagaaccccgccgcgaaccagcgccccagttacctggccgacgagcacggcctgcgcacctggttcatgaccaccgaccacaagcgcatcgggatcatgtacctgatcgccgtcaccgcgttcttcttcctcggcgggctggcggccagtgcgatccgcatcgagctgatcaccccggaaggcgacctgctgaccgccgatggctacaaccgcgccttcaccctgcacggtgtggtgatggtgtggttcttcctgattccctcgatcccggcggtgttcggcaacttcctcatcccgatcatgatcggtgccaaggacatggcctttcccaagctgaacctgttcagctggtacctgctggtcggcggcggcgccttcaccatcttcgccttgctggccggtggcgtggacaccggctggaccttctacacgccgctgtcgaccatgttcagcaatgggcatgtggtggcggtgatcctcggcgtgttcatcaccgggttttcctcgatcctcaccgggctgaacatcatcgttaccatccacaccctgcgtgcgccggggatgacctggttccgcatgccgctgttctgctggtcgctgtacgccacgtcggtgatcctggtgctggccacgcccgtgctggcgatcacgctgatactggtcgctgccgagcacctgttccatatcggcgtgttcgacccggcactgggcggtgatccgctgctgttccagcacctgttctggttctacagccatccggcggtgtacatcatgatcctgccggccatgggcgtgatgagcgaactggtcaccgccgccgcccacaagcgcgtcttcggctacaacttcgtcgcctattcgagcatggccatcgcggtgatcggcttcatggtctggggccaccacatgttcgtcgccgggcaatcgatgtacgcgagcatggtgttttccctgctcagcttcctggtcgcgatcccctcggcgatcaaggtctacaactggaccgcgacgctctacaaaagcaacctgaccatcaatgcgccgttcctgtacgcggtgaccttcatcggcctgttcgtggtaggcggagtgacgggcctgttcctggcgctgctggcggcggacgtgcatgtgcacgacacctacttcgtggtcgcgcatttccactacatcatggttggcgccgcggtcgctggcttcttcggcgcgctgcatttctggtggccgaagatgaccgggcgtatgtattcgcagctgtggggcaagatcgcggcggtgatgatcttcctcggcttcaacctgacgttcttcccgcagttcctgctcggctacctgggcatgccgcggcgctaccacagctacggcgaggattttcagttcctccacgtactgtcctcggcgggtgcggcgatcctcgcggtggcctatatcctgccgttcttctacttgctctggtcgctgcgctacgggccgattgccgatgacgacccctgggacgccgccgggctggaatggcgaacctcgtcgccgccaccgaagcacaacttcatcgaaacaccgatcgtcgatttcgaagcctacgaatatccacccgaggcgacccatggacgttcgtaagggatacctcgccgagcagttcagtaccgcctcccagcagcgcgaggcgacctatctgggcatgtggctgttcctgtccacggaaatcatgatgttcggggcgttgttcctggtgatcggctattaccgcctgcattacccgcagccggtcgccgaggcggtgcatcacctgcatttcgtactggccggtttcaacagcgcgctgctgctgaccgccagtctgtgcatgagcctggtggtcaaggcctcgcgccaggaatatcaccggcacgtgcagctctggttggtgctggcggctttgctggggctggggtttctcggcctgaagggtttcgagtacgcctgggagtaccgtgaagggctgctgccgggctcgcccaacgaatcgccactgacaaatccgggctcgcggctctacatggtcatctacctgttctccacggcgctgcacgcgttgcacgtgtcgatcgccgtggtgctggcgctcggcatggcggcacgcatccatttcggccacatgaaattgcccgagcgcgccatcaccctggagatggtcggcctctactggcatttggtcgatgtgatctggattctgctctatcccgccctgtacctgctcgggaggcctgcatgagcctgcgttatctgctgctgacttaccttggcctgatcctcctgctgaccgccaatgtgctcctggcactctggctgccggcctggtccgactgggccttgctcggggcggcggcgcaggcggcactggtactgttcggcttcatgcagctgggccagcactcggcgctggtgcgcttcttcgcgttgggcgccgggttctggctgctgctgatgttcaccctgacgctcatcgatctgctgacccgcaaggcgggcttctgaccacccagcgattcagaagggcgggcctcaggttcccgccttgctcagcacgaaggccaccagaaagccgagaccggtgatgatgccggtcatatcgtgggtggtttcgaaggcttcgggaatcatcgtatccaccagcatggcgagaatggcccccgccgcgatggctgtggtgagtgcgatcgcttcaggcggcacgccctggaacagaccgtacccggccacggccgccaggccggaggccagggcgatgccgccccatacgccgaagatgtaggcagcggggcgcttggctttcttcatccccgcagcgctggacagcccctccgggatattcgacagaaagatcgccgcgacggtgaccaggctgaccccgccgccgtggagcatgctgatgccgatcacgatggactcggggatgccatcgagcagcgcgcctaccgcaatcgccaggccgctaccactttgcgactcgtttgcctgctgctggccggagcgcttgcggtggcgcgcgccgcgcctggcgagcagcatgttcgcagccgtatacacgatcgcgccgcccagaaaaccagccgcggtggccgtgaagccgccgcgttcgaacgccttgtccatcaactcgaacgacagcgccgagatcagcacgccgctgccgaaggccatgatcgcggcgatatagcgctgcggcaccttgagcagatagcccacaccggcgccgatcagcaacgcgccgcctgcaagaagtccccagaaacctgcttgtaaccagatcggcacgtcatgccccttttgtcagtgagtgtcttgtggtccgttcaatgaaacagctgcccattatgggaggcgcgccccgcggcgaatgctgaggtctgcccgctcaaaagcacaagcttcgccccggggtcggggctcccacagaaatatgcagtgcacgcggcgccattgtgggaggcgcgccgcgcggcgaatgcggaggtctgcccgctcaaaagcacaagcttcgccccgggggtcggggctcccacacgaatatgcagtgcacgcggcgccattgtgggagccgcgacccgcggcgaatgcaggtctgcccgctcaacagcacaagcttcgccccgggggcggggctcccacagaaaatatgcagtgcacgcggcgggtcgaactagccgacgtagaccgagtcccggcgattgagcgagttctgccaaaggggctgccaaaaatgccctgctaattgcccgcgcgcttcatgcacgccagataccggtcattgacccggttggcgaaccaggcggtggtcaggttgcgggtgatcttcgggctttccaggcggatgccgggcaacactgcgcggggcagcggcttgcccgcgcgcttttccgccagggcgaagacgcgttcatacaggctggtcttctcgaaaccatgggtgtcgccgcgctccaacgcgttgcgaatggccgtctcgctcatgtccagcttgctcgccagcgaacgcaccgcgcgctcggtctgcccggctttgctgctgccatagatgatcagatcgccatcgaggaccagcttggtaccgctggcacggcttaccgcggcctggaaagcggcgttgcggctggcataccagccggcattgaaatcggcgaagcggtacagcggctgggtgtagctggccgggtaatcgagcaggtgggcgatgccgaagtacatgccgccgcgccgggtaaagacttcgtcgcggatcgagcccttgcgctcatagggatagtcccacttgtggtcttcggcaaaggcgatgctgacctgcatcgggccaccggtcttgaccggattgagcgtgccgaacagctgcttgccgagcggcatgatgctgagaaagtcatcgaagatcgcgctcagctgttcttcggtgcgcacggcattcaggcgctcgctgtaggtcttgccgttcggcgagcggacgtcgagtgccgcattgacgacaaactgcggaacatgcagccgggacgctcgccgatagatctcttcgcgcgcgattttcgccaggccaggcacggcaggggtcgcctggaaggtcgattcctgtgcggtgatcgccagcaccgagcagatgttctcgttgctcggcgggatatccagcgcatcgaaggcggtgtagatatcagttgcccaaccttggcgatccgggatgttgctggggatcagccggacgattttcgccctcacctcgtccggccgtggagcgggtgtttccggctgccgaatgccgcagccggccaggctcagcagcagcacgccagaaagcgccgcagcgagccggcggatggagatgggcgtggggaagtcgcccgtcgaagcatggtgcttgaaaaattggacagtcatgcggtcccggatgtggatgagtgatgagtgatgaggttcggacagtaaaacagacgaagcggttctgcgctgcacagcgttaagcgcgacgcaacggcggcccgtgcatccgcaggctgggccggctggcccagcctattgctcgcgggttcgcgtgctgccgcgcctcactgctccgtctttttaccactgaaggcggtgatgggtttctccggctctttatccagcccgccggcgaacgacttgagcccttcgatgatgggcgtcagcgccgcccagagttcgtcgtcatgcagcatcttgtaggcaccggtcacacccggcgcctcgtcgtgcttgccgtcgggcttgtagccgccgatcgcatggaaggcgtcctggaaggcgaacaccaccttgcagaactgcgctggctcgatgcgcgacagcgccatgccgaggatcgacaggttctgcacggcgttgagcgagccttccttgctcatcccatcgaccagcaccttgagcacgcggtcatgggagccggccaggtcgttggcaaaacgcagcacgccacgctggtgcagggtttcgagcagggtatcgagttcttcgcgcgcgctggggccgatcggcgtgggtttgacgtcgtagtcgattcgctgggccatcagaatctctccggatgcggggcttgggcgggcggggcgacatagtcgtcgcggtaccacttcacctcgacgggcacgccttcggtgggcgtgcgcttggcgtggcggaaactgttcggtggtagcggcggttcgcctttctcgggcagcacctcgagcttcaccgcggtttccttgtacgccggcgtgttcacgtcggggtcatggtgttcgccggtgagcaggttcaagcccggtttgccctggtgaatgggcatgaacagcgtcttgccggcgacccggtcggtcaccgtggcacgcacctccaccgagccgcgccgtgaggtcacgcgcacccaggtgccgtcctcgatgccgcgttcggcggccagttccgggctgacctcgacgaaccagttcggcgcctgtgaccagatgcgcgggccgcggccggtctggttggtgctctggaactgttcgagcatgcgcccgttgtcgagcatgatgtcgtactcgttgtcggccgcttcggctggcgtcttccactccagcggaaacagtacggccttgccgtcatcggtatgaaaacggtcggtgtagagaagcggggtggtgctgccatcgctctgcatcggccagaacagtgactgccagccttccaaccgctcgtagctgatgccctggaacatggtggcgatgccggcgcactcgtccatgatctggctcgggtgctcatagccccagtcgtgacccatgcgtttggccagatcagtcaggatctgccagtccggccggctgttgcccagcggcggcagcacctggtagaagcgctgaatgcgtcgctcggtattggtgaaggtgccttccttctccaccgaagggcaggcgggaagcaccacatcggcgaactgcgcggtacggctgaggaagatgtcctgcaccaccatgaagtccaggctttcgaagccgctgtgcacgttcttgctgtcggcatcggagaacgcggtttcctcgccgatgatgtacatcgccttgaccgagccctcgtcggcgcccttgaccatggtgaagttgtcgttgcctttctccagcgacagctgttctttcgccacgccccaggccttggcccatttgtcgcggtttttttcctcggtgaccttctcgtagccggggtacatgttcttcaggcagccgaagtcgctggcgccctgcacgttgttgtggccgcgcatcgggtagccgccggtgccgggacggccatagttaccagtgaccagcaacaggttcgacagcgccgtgctggtgtccgagccgtggctgtgctgggtgatgcccatggcccagagcaagcagaccgatttcgcctggccgatcagttcggccgcctcgatcagcttgtccttggcgatgccggtgatctgggcggcgaaatccatggtgaagggctcgagcgactttctgtattcctcgacctgattgactcgcgcgccgagaaactccaggtcggcgtagccatggtcgaacatgtagcgcgacaaggccgaagcccagaccatgtcggtgctggaattgggccgcaaatggatgtcggcgcgttcggccatctcgtgcttgcgcggatcgaacaccacccatttctgcccgcggtgcttcttctgcgccttgagcttggaggcgatcaccgggtggttctccgacaggttgctgccgaccacgacgatcagctcggccttttccatgtcggcaatggtgccggcatcgccgccatagccgacggtgcggaacaggcccttggtggccgggttctggcagtagcgcgaagagttatcgacgctgttggtgccgatgatcgcgcgggcgatcttctgcgtgaggtaggcctcctcgttgctggccttgctcgagccgatgaagccgatggcgtcgggcccatggctgtcgcggatctgcatgagccgatgcgcgaccagattcagcgcctcgtcccagctggcctcgcggaactggccgttctcgcggatcaacggcgtggtcaggcgtttcgggtcgttgatgaagtcccaggcgaacttgcccttgatgcaggtggagatgccgttggccggcgcatcgaccaccggctgcaccttgagaatgtgccggtcgcgggtccacatctcgaacgagcagcccacgccgcagtaggtgcatacggtcttggtgcgcttgatctccggctggcgccagtgcatgtccattttcgaaatggcggtgatcggccgcgcgccgatggtttcctcgagtttcttgaccatgtcgatcatcggtcgcttgatgtcctgcggcagcgacgtgaacgggccggcgtccggctgcatggtcttttccagcagcgcattgcaggggcagacggtgacgcaatgcccgcagctgacgcagctcgactcgtcgatcggcttgccgccatcccagagcacgcgcgggtgctccatgttgaaatcgatcgacagcgtctcgttgacttcgacgttctggcacgcctcgacgcagcggccacagaggatgcactggtccgggtcgtaggtatagaaagggttggagtggtccttctcgtagggcttgcgcttgaatgcgtagcgctggatcggcggattgatctgcgcgtaggtgttatgcagcgtgcagtcgccggtgttgtgctcgcacagcgtgcaatacagctcgtgcttggcgaccagccggtccattccttcctcgcgcgcagccttggcctcggcaatctggctggtgatttcgagcccgtcgcgagccttcagcgtacagccacgcaccagttctccatcgacctgcacccagcagacgtcgcaggtctgcggcgagcccagcgcgcggtgatagcagacgtggggcaggtcgatgtcgtgcttggcgaggaagtcgatcagtggggtgtcggcttcgccgacgaggggggcaccgtcatagtgaatcgtgcaatgggtcatcaggcctccggcttattttgtgctgaggcgcggcaacgaggcgtcgggtcgcgcagcagatgcccgagcctgctccggttccctagcggtggatggctactagaggtgactggtggtccatgtgatcgttcagggaccgcgacgagaggcgcctggcgaagagaggcgggcatttgctcgaagagggcgccgtgcggcggcgaagccttgtgcctggaaacctttcgcggtcgagaccgctcccacggttgctcggtgtattttgcgtggtgcattttgtaggagcggtcttgaccgcgagctcttcggcaactgcgtgcctctcaaatcttcccaatgacaacccgcaccgaatgatccctctgcctgaaagccttcgcggtcgagaccgctcccacgttgctcggtgcatttcgtaggagcggtcttgaccgcgagctcttcggcacctgcgtcctctcaaggcttccagtgacaacccgccccgaatgatccttctacctgaaagccttcgcagtcgagaccgctcccacggctgcccggtgcatttcgtaggagcggtcttgaccgcgagctcttcgatatctgtgcgtctcaagtctcgcagtgacaacccgcaccgaatgatccctctgcctggaagcttcgcggtcgagaccgctcccacggttgcccggtgcatttcgtaggagcggtcttgaccgcgagctcttcgggtatctgtgcgtctcccaggtctacccagtgataacccgcaccgaatgatccatctgcctgaaagccttcgcggtcgagaccgttcccacggttgcccggtgcatcgtaggagaagcctttttcggctaacctgacgcctcttgcagcagccagtggcagcccgtcatgcatcagccagacaccacagatcggcacaccctcgcgggctcgagcttctggcgggaccacacgttgccgttcatcgagtcgcgcagcgtcgcggatggccgccgcgtctgctatgcgcggcacagccatgagaccttctccgtcggcttgatcgacagtggcgccagcacctacatcaatggcgatcaacagtgccgcatcgaggcgggcacgctggtgctgatgaatcccggtgacgtgcatgcctgcaacccgatccgcaatcagccatgggcgtaccgcatgctgtatgtcgatgccgactggctgagcgatctgcaggatgagctgggcatgggcggcgcggggtttcgcggcttcgcgccgattctgacgcgcgatgccaacctgcaggccggcttcagacggttgcacacggtgttgaccgacgaccaagccgaccacttgcacaagcacagcactgcagtggagttcttcagcgccatgcatcagcgcctggggatgcagaccacggccccggtgagcgacccgaagctgaaacgtgccgccgagtacatcgccgacaactatcagcgctccctcaagctggaagagatctgctcgacggttggtgtgtcggtatcgggcctgatccgatcgttcaggaggcattacggcatgacgccgcacgcctatctgaccaaccgtcgtgtccagttcgctcgcgagcaattgcgccgtggcgtgccgatcgccgaggtggccctggccgccggtttcgccgatcaggcgcatctgcaacgtgccttcaaacagctgctggcggcaacgcccgggcactaccgcggtcagcgtcgcgcctagccgggcgagtggggcggctggactgatgcgggctcgctagagcgccaaccctagaacgccaacagataggccgcgcagccaaccagcagcgccgccatcacccggttgaacaatcgcagccgcgcggcattgttcaggtaatgccgcagaaaggtgccggcataggcccagcaggccaacgaggcgtagcagatcacgaagtagatcgccgcgaagcgccacaccgaaggcgtatcaccggcagccgcgaacaaccccatgccggccaccgaggccagccaggccttcggattcaaccactgcatcatcgcgccgtagagcatcgtcggctgcagcgccggtttgtcggtgctcaggcgcccgtcgtcgtgcgccagccggtaggccatgtagagcaggaacgcgacgccggccaaccggatcgactcggtcaaccagggccatcgtcccagcacctcgctcagccccagaccgatcagcaacagcagcagggtaaagccgatggtggcgccgctgacatggcgcatggcggcgcgcaggccgaactgggcgccgctgctcagcgcgacgatattgaccgggccgggtgagatggacgaggccagcgcaaaggcggccatggacaggaacaggctcatcgaaactcctaggttcacgcagggatgacagcgcgaagataggaggaggcgttgcgcaggtattgaatgaaatgcgcgttgtagcggcttaccagcgcagcaggcgcggccccagcaaggcaccgatcgccgtaggtaccagcatgcccagcacgtaccagaccgcccagaaggccacgctcatctccgggcagtgcaggctgtaggccagcgtcgccatcgagcctgccaacaggccgctagccgccccggccaggcgcaaccgggttggcgccagtccgcgtatggcccagaacacggtgaagaacgccggtatcgaaagcacggcgatattgaccgggcagcttcgccaggtattgccgagcaccagcgcccagcggctatcggccgacacgctggccagcagccccgctgccgcaaaccacacgacgatcaccggcaggccgatcgccgcccagctgccgccagcacgcacgccgggccgagagaggcgggtggtcatcatcagagcgccgccgagcagcgaagccggcagtgccaacttgccccagaacagcggcgtggctgcaacctcggccagatccggccgcacgccgaagaacgtcagcaataccagcagtgcgagaaacaggccgatcaccacggcaaggctgaaccgcttggcgacgatccgaggttcgaccggcggcacgttgctggcaagcatggaaatcaggtcgtcggttttcatcgggaacctctaatcagggcggcgagcgccttcaaaccgcggtgcacgccgaccttgacggctgatacggacaggcccgtcagtgtggcggtctcgttcaccgatagcccctgcagcttcacgtaaagaatcggcaggcgctgtttgtccggcaattgttcgagcaactgggtcagatcgcgctgtgcctgctcggcctggttgtcctcatcggcaagcagcatcgcgtcgtcgtccagcgggtcgttgagcgcgtcatgtcgcgcatgggcgcggaaatagtccatcagcttgtagcgtgcgatggcctgtacccaggcggtcagcggctgatcggcgcgataggtgtgccgcgcgttatgcaccgccagcaaggcttcctgcagcaggtcctcgacgtctgccgagtgcagccgacgcctgagaaagctgcgcagatgcgcaccgagcaatgtcaggaattgccgataagacgcctcgtcaccctccagtcctcgcaacagcagcgcttgcaggcgggtttcgcgcgccttcaatgcctcatggtgtgtagttcgttccatcgggtgctctggttacaaggggagagaatttttgctacggcaatttctctgggctcggtgagccatcaggctggggcgtcgctacggtagggcggcccgaaagaaatctcaaaaatatttttcaccgcctgtaaccgttgccccacaccttgcgaactatcgattgagtggccggcaaatccgctggccgcactgcgacccccacggagaatcacatgaacactctcgctcttaccgctgctgccgttgcgcttgcttcccttgccgccggtgtaacagctgccgaaaaaaccgaaggcgccatggagaaatgctatggcgtggcactcgcggggcagaacgattgcaaagcgggcgcgggaacaagctgcgctggcacgtcgaaaatggactaccagggcaacgcgtggaagaacgttccagccggcacctgcacctcgatcgagacgcccaagggcaagggctcgctgaccccgatcgaatcctgattgcgtaggctgccgatgaatatgtcagctcagctgggtgccggcctcagtctcaagccggagtactacgaggcggcgcatgcatgtaccgcctccgggctctggttcgaggtgcatccagagaactacatgctcagcggcggccctcgtctggcctggctggaggctgtcggcgagcggcacccgttgtcgctgcacggcgtgtcgctgtcgctggcggcggactgcccgccggacgagttgcacctgcaacgcctcaaaaccctggccgaacgagttcacccaaccctgatttcggaacaccttgcctggtccgcctggcgaggtcagtaccatcccgatctgttgccgtttcctcgcacggacgccgcgctcgcgcggatcgtcgctaacgttcagcgcacccaggagctccttggacgacagatcgccgtcgagaaccccagccattacctgcgcatcgaggggcatgagtgggacgagatcgactttctcgccgagctggccaaacgcagtggctgcggcctgctgctggacatcaacaacgtttacgtcagcgcacacaaccttggcttcgatgcgcacgcctatgtcgatcgatttcccgctcacgcggtgctcgaggtgcatctggccgggcacagcgaggaccggcaaagcgaatcagcgttgctgatcgactcccacgacgcgccgatcactgcggcggtctgggccttgtaccgacgattgatcgaacgcatcggtgcacggccgacgctgatcgaacgcgatgatcagttgccggctttcgcagacttgctggacgagcgtgattgcgcgcagcgcctgctcgatggccagaggagggcggtatgagcctttcgttgggacgatttcaggacgccttcgtcgatgccctgcagggtgtcgagccggcagcgttagacgaagcggatagattgatcgcgacgctcacggctcagccgggcttcgcggtgtatcgcaacaccgtgatgaaaggctgcgtggatgcgctgcgggccaacttcccgacggtggagcggctggtcggcgccgagtggttcgccgccgcggccgccattcatgcccggcgttcgcctccggtactggcgcagctcatcgagtacggcgccgacttcgcggactttctgcagaccttcgaacctgcacgggagttgccttatctcgcgggcgtggcgcacctcgatcgactctggatcgaagcgttcagcgcggcggagcaaccgcggctgaccttggcggcattcgccgcgcaggcgccggaaaagctcgcagacctgcgcctcacgccatgcgctgcggcacgctggcagtggttcgcattgcccgtcttcaccatctggcgttgcaaccgggagcagctggacgtgccttgcgatctcgtttggcaaggcgaaggcgcgttgctgtgccgccgggatggccgcgtcgtctggcagccgttgagtgccggcggctatgcgttcctcgatgcgtgcgcggcgcaatgcaggctggacgaagcctcggcactggcgcttcaagctcaacccgatctggacttcaacgacctgctggcacgcctgttcgcggccggcgtttttgccgctgagcccagcgaactgacgaaccatggaggcgattgaaatggacaggccacacagcacctcatccaccgctcagccgcggttgctgcaacattggaatcggatcgccggctggctgcagacggttatcagcgactccagcttgtcactggttgcccgcttggcgattgccgccgtgttcttctattccggccggaccaaggtcagcggcctattgaccatcaaaccgggcacctacgacctgttcgagaccgaatatgcgttgccgttgctttcgccccacctggcggcgcacttggcggcctacgccgagcacctgtttcccctgctgctggtgctgggcctgctggcgcggctatcggcgctagcgctgttggggatgacgctggtgattcaggtattcgtctatccagatgcctggccgactcacttgacctggatcggcctgatgctgatcgtgatcggccgcggcgccggctggtggtcgctggaccgcctgctgggaattcgctgagccgtgcgggtgaacgggctccgctgcgctgtaggagcaggctctgcctgcgacccggtttcagccgtgcgtcgtggcctttttcgcaggtagaacctgctcctacataaagcctctgccctgtaggagctggctctgcctgcgacccggtttcagccggtgcgcccgcggccctgttcgcaggtagaacctgctcctacacaaaaccgccgcctgcgacctgttatttcagccggtgcgtcacggccctgttcgcaggtagaacctgctcctacataaaaccgccgcctgcgacctgttatttcagccggtgcgtcacggccctgttcgcaggtagaacctgctcctacacaaaaccgccgccctgtaggagcaggctctgcctgcgacccgaggtttcagccggtgcatcgcggccctgttcgcaggtagaacctgctcctacaaaacctctgcccctgtaggagcaggctctgcctgcgacccgatgttcagccggtgcgtcgtggcccttttcgcaggtagaacctgctcctacataaacctctgcccctgtaggagcaggctctgcctgcgacccgtggttcagccggtgcgtcgcggccctgttcgcaggtagaacctgctcctacataaaactcgacgggctggttgcagtccaaggcctgtccgcgcattggaggcgtcgcgccgttgccgcgcattccaccaccaggagacccgatggccactattgacctgctcatcagcgattgcgatggcgtgatcgtcgacagcgaaatcatcagccaccgtgtgctgtttgaggcactgagcctccatgttccggctgaccggctgggcgaagccctcgaggggaccttcggcctgacggtgccgagcatcatcgacctcatcgagaagcgcttcgacctgaagatgccctcgacattcgacgaggacctgcggcggcatagcgagaaagtagtggccgaagaagtccaggcgatccccggcgtacgtgacgcgctgcatgccatcgatctgccgctggccgttgcgtccaacagccgcctgcacaatgtcgaggcttcgctgcgtcgcgccgggctgaccgagcgcgtggcggggaacatcttctgtgcggaaatggtggcctcgcccaaacccgctccggatgtctatctgctggccgccgagcgcatgggcgtggcgcccgggcactgtctggtgctcgaggacagtccgaccggcgtactggcggcgcgcaccgccggcatgcaggtgatcggtttcaccggcgccagccatattccggccggccacgaccaggcgctgcgtgagctgggcgtctcggcggtcatcagcaacatgcgcgacctgccggcgacggttgctcgtttgttggggcattgaattgtccgattgcagcgactgaatgcaacagaccccgcataccgtgcgcacggcctgagcctgatcttgtctgtactgaaacctgtggaagtgagtagcagatggtcgagcgctggaagtggtttctcatccgtatcagcaagcggccctggttcagagccagcctgttctctgtgctgggcatcgcgactgcgctggtggccctggcggtagcgccctatatccccgacgacgtccccaccaggatcggttcggatgcggtcgacaacatcctgaatgtgctggcatcgagcatgctcgcggtgaccaccttctcgttgagcatcatggtcgcggcctacggttcagcgaccagcaacgtcaccccgcgggccatctcgctgctggtggaagaccccaccacgcaaaacaccctgtcgacgttcatcggctcgttcatcttcagcctggtcggcatcatcgcgctgagcacggggctttacggggcggaagggcgagtggtgttgttcgcggcgacgatccttgtcgtcgtcctggtggtctacgcgctgttgcgctggatcgatcagttgtccgggcttggccgcgtcgcggaaaccaccgcccgggtcgaacgcgcggcgacgcatgcactgtgccagcgcatggaacaaccctacctgggcggctgcccgctcgacgtggatccccggggcctgcccggtgcgcgacccttgtacgccgacaagttcggcttcgtgcaacacgtcgacatgcctgcgctgggtggcttgaccgaggccgcgcactgctcggtctacatctgcgtgctgcccggcgtgttcgtggaacccacccagccgatcgcctggtccatcggcatcgaggaggagtgtgacggcgcgctgcgcaacgccttcgtcatcggcgcgcaacggaccttcgagcgcgacccgcgtttcggcatgaccgtaatggccgaaatcgcctctcgcgctttgtcgccaggcatcaacgaccagggcaccgccatcgacgtcatcggccgcggcgttcgcgtgctgtcgcacctgtgccgacgcgcatcacccgaagccccaaaatatgagcgcgtattcgccccggcactgagcgtggcagacatgctggacgacttcttcaccccgatcgcccgcgacggcgcagcgatcgtcgaagtagggatgtgcctgcaacaggcactggcatcgctgggacggcttggcgacgcagcacttatggtcgcggcccatcggcaggctgagctggcgcttaaacgggctgaaacagcgctcaccttgccggaagattggcagcgtttacggcatgctgcggttgatgctggtctgtctgataacaggggctagcggggcgttgaaaaagcaccgggttgccgacacggggtgagaaggcgttggccccagttcgattaacacgtttgtctacaacgcgttaaccgccatttttcggctgtccttgcctcgcctacctttttccactgcctgctagaagctaacgtggcggccgccggggatcggccaccaatagctgccatgaccggctgcaaatcagccagaagcggacttgtagagtagagaacccctttcactcgtcaacgccagtctgccgttccagttcgcgctcaaggcactgccactcgtccctgagcagatgttcaaggtaggccacacggaaccggtcgcgtaggcggcgcaacgtacaagcacgacgggcctccttagcgttgtcgatggcatccgcaagccagtcgctgtcgaacgccgtccagatcggcgggatgggcgcctgcaggttcgagtagcaaacaggagccacctcctcgaagaacgccgcctttaccgtagcctgatcaaaattcactagttgccgagcgatggcggcatagtcaacttcattgtcaatgaaggcattggagagcactgaccataaccggatgcgctcatcgcgtgtcaaaacacgtcccacttggagaattcctctagctcgtcatccagagaatcggccgtcatgctgcctgcaatcccaccaaccgcactgcctgccagtaccacggcaatggcacagaacggagcgcccggaccgcaaatgagcgagacgccgagcccagcgagaacaccacccgcggctcctccgccgatgatcatgctttgacgagctgtttccttgaccttgttttcggcactgagaatctcataggtcgcgaacgctgcggtcaccagaatgcccaccttacccataatgcgcaggcgatccgttcctttggtgaacttggcattgtctcggccggaggattcgatgacttcatagtgaatctgctttttctgctcggcagtgagtgcttcgtagggcgtgccgaatttgccggttgcgtacttatcaagtaattgtggcaaggccggtggcgttttcttgtactgctccgccttggcgaggccggtgacggacgtcattttacggtgctctgccatgatcttgttgcgcatctcatgacaaaactcgacacctgtttggctgctgattcgtccggccgccacgtctgctcttatctgggcagacatccgcctgatgttagcggcatagctgactcgggttccggcgtcattgatggcgtcgagcgagaaccgcgtcgcagcgccttccatgccagctatggcgtcgtcaagcggcgaacggggcagggtatgcccgctctgtgtcgtgtattgacttttaatcgtgatgctttcggtcatccttggctgccctctacgatgagagagagcagcctgtctgtcactgagggctagtggcccgtattgggcaacggtatttcaactcgtgtgcaggttgatcctgaagggttggcgaaggtcgccagattgtcgctgttgaaagtcccggtgagcaccgacccatcatcgaaatgggcgatgcattgccagccggtgtagcgctcggctgcgggaattttgaagctgatccacttactgcctgccagaggtgctggagcgatgaatggggccgttacgaccgtatcgccgatcaccacattgcccgatcctccgatgatgaccccgccatggctaagcgtgctgtcgagcgtggcggcgttctttccgttgatgaatacagtggcggagtaggcgccggagatggtctggccgcaatcggcgatgtcgcccagacgcgctgcgggtaggccattgaccagcacgtcgggggagccggactggatctgtggcgtgccatgaccgggtaccgggcaggtagtgggatcgctcttgcgagcagcaggtttacctgacatgagagtcccttctctggtttgagcggcaatagatctgtcgagtcagtgaagcgcactatagcgaagggaatcgaattacgaggtgaccttcatcgcgctccgattgattgtcagccctatttgaggcctcttagtctttggtcgaatctcgctgtggggtgcggccgacggctcagcccttcgcagctgagcggactccggactcactgcttatcttccgatgactcgcatatccactgactggacggcgtaaagcgggctgcgatagaccctttccggaagttggcggtcgataatgcgcaggtaggccaacccgttgcccggcgcgagcaggccggtcagcggcacgctttcgatcaggtagttacctaggggacttgtttcggacacggaggcggtcgcgtcgagggctgagtttgcgagccagccgggtaacgctgtcaacaggaggataggcagggcaatcaggggcaggcgtaaggtgggctttccagccatttcaacctcctcgttggtgatgctcagcagccaggggcgcaagcgaaggcatagcgcagcagcgatcctacctagcacttctgcgtttagcgcgatctgcgggtcgcagctatcgggttcgaactcaatgggaggctcaatctctccgagactcaaccggccacgttcagtcaaaaccttactttccctttacgtccgcttcacacgaagctgaccgttagcggcgtacagttatttcctggctgatggaatagccggctccattgggtggacccgccgcggccgggttgtcgagtcgacagctgttgcagccgcggtggtccgctgcttttttacctagactttggcatcgtgcgaaagcaggtcggtttaacaattcgtggggagatgcgtcaccatgatcgttcaaaaaaatttcctggctgtcgtggcgggcgttgcgttgctggcgcagacgcttgtcgctcatgccgaactgccggacttcacgccgctggtcgagagtgcctcgccggcggtggtcaatatcagcaccaagcagaccacgcccgtacgcggcgggccggtgcagatgcctgatctggaaggcataccccccatgttccgtgacttcttcgagcgcggtatgccgcaacagccggatcgtcagcgcgaggtgcagtccctgggctcgggcttcatcatttccgaagatggctacatcctgaccaacaaccacgtggtcgctgatgccgatgagatcatggtgcggttgcctgatcgtagcgagcagcaggccaagctggtcggcgccgatccgcgcagtgacgtggcgttgctgaaaatagatggagacgatctgcccatcgtgaagatcggcaattccgagaagttgaaagcgggggagtgggtcgtcgccatcggttcgccgttcggcttcgatcacacggttactgccggggtggtcagcgcgactgggcgtagcctgccgaacgagagctatgtgcccttcatccagacggacgtggcgatcaacccgggcaactcgggcggcccgctgttcaatctgaacggcgaggtggtcggcatcaactcgcagatattcacccgttccggtggcttcatggggctgtcgttcgcgatcccgatcgatgtcgccatggacgttgccaagcaactgcgtgaagacggcaaggtcagccgcggttggcttggcgtggtcatccaggaagtgaacaaggacctggccgagtcgttcgggctcgagcgtccggccggtgcgctcgtggcgcaggtcatggacagcggtccggcagccaagggcggcctgaaggtcggcgacgtgatcctgagtgtcaacggccaggcaatcgacatgtccggcgatctgccgcatctgatcggggcgatgaagccgggtagcaaggccaagttggaggtggttcgtgatggcgaccgcaagacgctgacgctggagatcggtgctctgcccgaggagggcgatttgctggcttccgctggcggccagggcggcgccacgagcagcgacaaccgcttgggtgtgtccgtgaccgaactgaccgatgcgcagcgtcaggcgctcgaaatcagcggtggggtggtcatcagggaagtcagccaggggcctgcggcgatgattggcctgcgtccgggcgatgtcatcacgcacctcaacaacgaggcgatcaactcggtcaaaacctttaccaaggtggtcaaggcgctgccgaagaaccgctccgtgtcgatgcgtgttctgcgtgaaggacgggcgagcttcattaccttccggcttcccggctaacccgaacgagtcgctctagtcatgaggcccgctaaatgcgggccttttgctgtccaacggtgcttagtcgacgacgaacagcttggcgccgaccgtggtggaggagcggtgtgcttcggcattgtcggccacttggtagctcatgccgggtttgaggatgaaggtgcggccgtcgtccagctcggtgtgcagctcgccttccaggcagagcaggatatggcctttgctgcaccagtgatcggcgagatagccggcgctgtactcgaccatccgaacgcggatgtcgccaaactggcaggtgcgccagagcgcgctgccggtttcgccaggatgttcgctggggtgaatctgcgaccagtctgtcgtgccgaagggaatggcattcaattgcacgggatctatcctttcaggtgtcccggtttgccgggttgcagcccagcggcttgtatacgcgctgggtggaggcggggttgttggccagcttggcagcgggcctgcgtggacgcgtgaccaactcaccgccgcagttggggcagatgaagccgagcttggtttttgcgcatgtcgtacagaaggtgcattcaaaggaacagatcaccgcgtcgggtgagtgtggcggcaggtcgatgtcgcaacattcgcaacccggtcgtagctcgagcatgtcgattaccttatttgcgtgtcagggtcgaatctccaggcacagccgtggtccagtgggtgcgatgaaccggttcggggccagaggtaacgatggcggggcttcccggtatagggatggtccttgcgatcgcttaagctagcgctttcgatccggccgtgcaccttctttgtggcgcccggacacggcccgaccggcatcgcgccccatgtgcccgcgcccgacaattttcatgcttccatccaggtggggcactggaggtaacgctattttgagtcatgcaagtggggcgaaaccggcccgcacggtacagctgcgcagccgcctgctgaccatcgcgctcgctggaatactgccattggctttggtcgcgggccttggcctggtatcgatcatcagcgaccagaagcacctggccaagcaacgcagcctggaggcaacgcgcctggccgcgacggcgatcgagctggagctggtgcgctccttgaacgtgctgcaagccctgtcgcagtcgccgttgctcgaagagggggctatcgacagcttcgccgaaatggtgcggcgcgtgctgcccaccgttccggggtggcgttcattcctgatcattgcgcccaccggcgaggtactccaccgcgtttcgctgcagcaggccgcggtagccggggggattgcggagcccgacagttttgctgagctgctgcgaacgaaggagccacaggttggcaacatggggcaggggccgcgcgggtcgtgggggattcccctgcgtgtgccggttcgggtgggcgaagaggtccgttacgtgctgaccgctgtgctggatccgcgcgccatctcggacgttatcggcaatcggcgcttaccggagggttgggtgactacggtactggatgccaatggcttgcgtatcgccaggtcccagcgacatctcgagacgttggggcaacccgcatccccaacgctggtggaactgctaaaaaagaacaaggctgaagaaggcaccggcatgagcacgaccatcgaaggcgtgtcggcctttaccgcattcgtgcggctttatccttcgcggtgggtggtggcgaccggcgtccccaccgatgtggtacaggccggtgccgtcagggcctttacgctttatggcggcggcctgctgctctcgctgctgtttgcggtcgccgcggcattgttcgcgacccgtcggatcaacgggccgatgcgccaactgcgtcgggcggctcaggcgatcggccgtggccagtcggtgcatgaagcgcccgagagcgaaatcgaagaactccgcgaggtgggtcgcgcgctggtggccgccgcccaggcgcgacgggagagtgaggccgagcgcgacagcatgctgtcgcgtctggagcttgctcagcaggatctcaccgagcaggtcagcgacctgcaagcgttgcaggcgctcggcaaccagttgcttcaattgccgacgttagatgcgcaattgcagaccatcgtcgaggtgctgtgcgagctgcacggtgccgagcatggcctgctgaccctcagcgagggcgaggacgcgctgcgggtccatgcatcgaaaggcttttcgccggcgtcgctggagcaagtgggcgcgctgccgatcgagcagcgcgtggatgttgccgccgtccgccaggggcaacgggtgacagtggccgatatcgaagccacaccctgtttcgccgggttggtgccgattgcccgtgccgagggttttcgctcgctgcatgcgacccccgtccggcatagcgacggcggtgtgctcggcgttctgaccgtgcatctgcgagagtcccgattgcccaccgatcgcgagatacgcctggccgacctcgcggcgggcctcgctgccgtcttcatcgatcgggcgcgggcgcagaccaaggccggcatgtttgagcagcgcctacaggtcgcgctggattcctcgacggtgccgttcagcattgtttcggtcattcacgatgcgtcggggcaagtgaccgattttcgactgtcgttcatcaacgcgaccggtgcggcggcgcttcgcggcacggttgcggggctgaccgggcggcgcctgaccgacgtgctcgggccggatgcgaacgcccaggcgctggaaacgctcatagcggtcgccacccatcaacaaccgcacgacatcgagctgcgcagcaccgcgtttggcggcgagcgctgggttcgcctggtcgcgacgccgttcgatcagagcatcgccgtctggtttgccgacgtgacggatgcaaaacaccaggaacaggcgatcctggaggccgaccggcgcaaggacgaatttctcgcgaccctggcacacgagctgcgcaacccgctcgcgccgatccgcctggctgccggcctgtttggcgcgcctggcgcaaccgaagcgcagaagctgcgcagccagcagatcatcgagcggcaggtgcggcacatggcgctgctgttggacgatctgttcgatatctcccggatcacgctcggaaagctggtactgcgcaaggagtcgctgaatctcggcgccgtaatcgaggcggcggtcgagacagcgcgcgccaagatcgaatccaagcagcacgagctgatcgtcgagctgccggcgcagccggtgatactggaggccgatccgctgcggctcgagcagatcctggtcaacctgctcaacaatgctgccaagttcaccgagccgggcgggcggattcgcatcagcgccacgttggcgaacgatacggcggtggtctcggtgagcgacaacggacagggtatcgcgcgtcaacacctcaagctcatcttcgaacgtttcgctcaggtgcccaccactcatgcgcaggtaaataccgggctgggcatcggtcttgcgctggcgaaaggcttggccaacctgcacggcggcgatatccgcgtcagcagcgccggcttgggccagggcgcggaattcaggctgagcctgccggcgctcccggcgctggcgtccgcatggcaacccgctgcgccgctggaggtaaggcgagatacgcggcgcgtactcattgccgatgacaaccgggacatcgccgaaatcatggccgaagtgctgcgcctcgaaggacatgaggtctttctggcttacgatggcaccgaggcgttcgagcgctatcagcaactcaagccgcaggtggtgctgctggacatcggcatgccgggactgcgcggcgatgaggtggcacgaaggatccgtgccgaagacgcgcaggtgcgtctggtggcgatcaccgggtgggggcagcctagcgacaaggagaacgccatggcggcgggcttcgacatacacctgaccaagccggtggacatctcgcgtctggtggacgtggtaggaggttgagcggagattcgcacgccgggctatcttccgccgagcaactgcggtaaaacgtcgcagtgtttcggtgtcgggtgtcgcgcctctgcgatacgggcgagaccgaaggatttcggtacttgagtgccgacgctgtagccgtcgggcgctttgagcgctcggcgcgtgatatcgggagagactgcctcggcttcgccgtacgcagcgccgaaggagcaaccgccccggaaactctcaggcaaaaggaccgatatcgcttgtgaactctgaagagtcgccgggtcgtcgtccggtgcaccgaaggagcaagtgggccccgcccatgaaactctcaggtccagaacagagggggcgctcgatccgcttattgcggacgggctctaacctcccgacgttctggagcttcaaagatgaaaacgatcgctgtgattggtggcggtatcaccggcatcactaccgcctatgcgttggccaagcgtggattcgccgtcaccctgttcgaaaagcaccgctacgcggcgatggaaacctccttcgccaatggtggccagctctccgcgtcgaacgccgaggtctggacgcattggtccaccatcctcaagggcatcaagtggatgctcaagagcgacgcgccgctgctggtcaatcccaagcccagctggcacaagctgtcctggttcgccgagttcatcggctcgattccgcaataccgccagaacaccatcgaaaccgcgcgcctggccatcgctgcacgcgagcacctgttcgcctgggccgaggaagagggcatcgacttcgacctgaagaaggccggcatcctgcacatctaccgcgacaaggccggcttcgaccacgcagccaaggtatccacactactggcccagggcggcctgccgcgccgtagcgtgacatcggaggaaatgcgtgccatcgaaccgacgcttgcggggcaatattacgggggctattacaccgagtgcgattccaccggcgacatccacctattcaccaacggcctcgcggcggcggccattcgcctgggtgtcgagtgccggtacggtcaggatgtgaagggcgtggcgaccgatggcaggcaggccagcgttatcctcggcacgccgggtggcgacgaaaccctgcagttcgacggcatggtggtctgcgccggtacggccagccgggcgctggcagcgcagttgggcgatcgggtgaacatctacccggtcaagggctattcgatcaccgtcaatctcaacgacgaggccagccgtgccgccgcgccgaccgtcagcctgctggacgacgaaaccaagctggtcaccagtcgcctcggtgataatcgcctgcgggtcgccggcactgccgagttcaatggctacaaccgcgacattcgcgctgatcggatccgccccttggtggactgggtcgccgagtgcttccccggtgtcagcacccagagcgtcgtgccttgggcagggttgcgtccgatgatgccgaacatgatgcccaaggtcggccgcggcagttcggcgtgcgtgttctacaacaccggccacggccacctcggctggaccctgagcgccatcaccgccgacatgatcggcgacgtggtgagccaatcgatgggctcggtcgctgctccggtctctgccagccggcagccggcccacgcataaaggtggtggccctggttgcggcgctcgccgcaatcagggtctgatcagtcgtgatggttgtagcgatggcgtgtcatcgctccggccgatcagctcgtctcggccgtgaccctggcgatggcgcccagtagcgccgcctgcgaaaaaggcttggccagtaacggcaactgctcggcagccgtgcccgctggaaactccgcataaccgctgaccagcagaaccggcaggctcggctgcaggttgcgcacttcctgcgccagctgcgcgccggtcatcttcggcatcgcatggtcggtgatgagcagatcgaatcgcgtctcgcggacctgatcgagggcctgcgcggccgaatgcacggtggtcacctgatggccttcgtcacgtagcatttcggcggtgttgaacaacaccagcacatcgtcgtccaccgcaagaatgttcaggccgctagccttgtctgccgtctgctccggtgctggctcggtgatcaccggctggtggatgtcttccttcgccggcagccagatctgcgccgtggtgccgacgcccacttcgctgcgaagcagcaatttccctcccgattgctcagcgaacccatgcacgatggacagcccgaggccggtgcccttgcccacacccttggtggtgtagaagggctcggtggcgcgctgcaaggtggcttcgtccatgccttcgccttcgtcggttaccgccaggcacagatagagcccgccagcgagcccttgttcgatatcgatgcgttcgcagtgagcgctgatgaggatgcggccctgttcgccgatggcgtcacgggcgttgaggaccaggttgagcaacgcggtctgcaattggttgggatcggcctcgatgccgggcagattcgcttcgacctgcgtctcgatgatcaccgtgggatcgagcgagcgctcgagcagctcggtcatttcctcgatcagttggccgggctggattcgttcggcctgcaattcctgcttgcgcgcgaaggccagcatgcggcgggtgagtgacgcaccgcgctcggcgccaatgcgggcgttgtcgatcagccgcagcagaggcgagtcgtccggcacccgtttgcgcagcaattccaggttgcccatcacggcggtcagcaggttgttgaaatcgtgggcgatgccaccggtcaggttgcccagcgcctccatcttctgtgcctgttgcagcgcttgctcggcctcgatccgagccgtgctgtccacggcttccgggacgatcccgaccacacggccggcggcatcgagcaccggccgcatggagaagtcgaacgaacgggtgccgatcggcagtcgcagctgcatgtgcatgttctcgctgcccccgtcgatggcgttggcgacgcaagccatcacgaccggtggcattccgggcgtcgcggtgaaccagggcgtaccccagaagggtaggccgacaacatcgtcgcgttgggctgcggcggcggtcaatgatgtcgggttggcgtagaccaccgtgccatcgacgctcagcaaccactggtagaggtgagaactggcggcgacggtgcgaatctgcgcttcgctctgcgcgagcgcggcggtgcgctcggcgacctgacgttccagctccctgcgaaatcgctgttcggcacggcgcacggcggcttccgagcgtacccgctcgatgtgtgcccaggagcgctccgtgacctcggcgagcagaaccagctcttcggtcttccagacccgcggacttttgtcgtgaatggccatcaatgcggtcagcttgccttccttgatcaagggcatgcagctggtggccgccagaccgagatcaaggaaggtcgccgcttcgtggtccggcaattgcgccgcggtgtcgtggagaaccaggggcaggccggcacgcagtttgcgcagggccagttgaccgaagtcggcgaggcggtagcggccgacgatgccagtggcgccgggggtcgtccagttgccgcgaatggtgaagccgtcctcgtccgggtccatgtcggcataggcgcagaccgaggcgcacagatgctcgccgagcagctgagtggtgatcgccaggatggtatcggcgtcggtgctggcggcgatcgccttgcccagcacgtcgagaaactgcatgcgccgctctgccagggcccgttgggtaacgtcgtgaccctccaggaagatgccgctgacgttgccgtcgctgtcgatcaccggctggaagacgaagtcgaggatgaagcgctcctcggcttcgcccaggctgtgctggatggccatctccaccgagctaccgacataggcgacgccggtgtggtagacctgatccagtagttcgacataaccctgccgggcgatctcgggaagcgcttcgcgcacagtcaggccgatcagcttgcggttgccgaccagcttggcgtaggccgggttgaccatctcgtagcgatgttccgggccgttcagcatcgccatgatgccgggcgcctgttcgaacaactgcgtcagtcgattcttctcggccagcaggcgacgttcggccctgatgcgctcggtggtctccaccacgaaggcgatgacgccggccgggcggccgctctcgtccagtaccggcgagtagtcgaggttcatccagacctgctcggggcggccgttgcggtgcagggtgagctcctggtccttgtaggcgagcgtgccgccagccaggcagaccttcatgacgttgtcattgaagtccgccacttccggccaacccttgcgtacctccgagccgagcagctgggggtgccggccggcggcgaacactgaataggcatcgttgtagagcatgatgcccttgcggccccagagcagcaccatgggtaccggcgacaacagcagcatgcccgtcacggtcttcaggctctgcggccagctgtcaggtgggccgagctcggtgtcggaccagtcacgagtgcggatgagttcgcccagctcaccgccgtctataggaaaaccgaacgagttgatggcttcgtgcgcgacgcttgcttcagctgtcatcgaaaatgttccaacctgagatgcgctttgctggctaccctgccatcgggtgtggtgcgcaacgcggctgccgtgcggcctgcacgccagaaaccgatggcctgatagcgctttgattgcaatggtgaagcaaagttgaacgagggcccggaaatatgcgctacgtcacgttcagtcgtcgcgagtcagcacttccagaagttcgatttcgaacagcagattggagttcggctttatgtgttcgccgatctggcgctcgccataagcgaggtgggaggggacgaagagcttgcgtttgccgccgaccctcatgcccatcaggccttggtcccagcccttgatcacccggccggtgccgatcacgcactggaagggcttgccgcgttcatgggaggaatcgaaggtggtgccgtcctccagttggccacggtaatgcgtggtgatcagtgcgcccttgaccacggccttgccgtcgccttgcacgatgtcctcgatctgcagttcgtcactcatggcttttctctaaggttgtctagaccagcacctgacgggtgctggcgataagtctgtgcacctgcttctccacactcggggcggtgggcgtatcgggacctcggccgcgcgggcagggcaggctggccgtggtgccgaacagccgacagatcagcgggcgctcgtcataggcttcgcagccgtttggcccgaggtgtacgcaattccactcggccaacgccttgtcgtgctcgatggcgctgcgcacgggcagccttgccatttcttccgaggaggcggtcaccgggccacagcagtcatggcagccgggttcgcaggcgaaacccgggatctggcggcgcagctgatcgatcttgcgctgggtgcagctcatgaggtcatgacggagggcgagagaggcggtgggcgcgcatggtacccgaccacggatgtgacgtgtatctcaccaacgcgtcgaggctaaacgctctcgacgacgtcgtcccagtcgtgatgcttcttgatgtaggccgcgacgaacccacagaccggcacgatgcgcttgccctgctggcgggtgtcgtccagcgctccacgcaccagcaggctgcccatgccttgcccctcgaggctctggtccacctcggtatgggtgaagacccggcgcgagccgtccgattggtattcggcgaagcccagctcttgcccaccaacctccagtacataacggttggccgcttcgtcgtgccgcacgcgtgcgttttcgttgtcgctcatgcttgtgctcctgttgccaaaagggtttttgcagccgtgccggaggggcgtcggttacaacgcgtcgaccagcgcccggcccaggtcgcagccgcgttgcagcgcatcgtcgaagctgcggtagtgctcggcctggtcgacactgaccggaacgatgatttcgcgatccttgaccacctcggcgcccacggcccagagcgtctcgccgaaggtttcgtattcgtagccggtgatgtgcacgatcacgtcgtagccgcgatagctcaagcgatggctatgcggaatctggtggtcgctgccgctcgggatatgcccgggcgtctcgaagtagggctgttcggcgtccggtttgacggccttggtcattgctgggcctcctgtgcgtggctgatcggatggcttgtcaggattgggccgggccgacagcccatcgttcccctggccagaaaaaagcgcaccagcctctgtaggagcgggctctgcccgcgatcccggggttcggtttacgcctcggtatatgaccccaccaacggccgcaggcagagcctgctcctacacgcgatgcctgaggtccgatttcgcaacgcaaacctgtaggagcgggctctgcccgcgatcccggggttcggtttacgcctcggtatatcgcccacaacgttcgcaggcagagcctgctcctacgcgatgcctgaggcctgaattcgcaacgctaacttgtaggagcgggctctgcccgcgatcccgggggttcggtttgcctcggtatatgaccccaccaacggtcgcaggcagagcctgctcctacacgcgatgccggaggcccgaattcgcaacgccaacctgtaggagcgggctctgcccgcgatcccggggttcggtttacgcctcggtatatggctcaaccaacggtcgcaggcagagcctgctcctacacgcgatgcctgaggcccgaattcgcaacgctaacctgtaggagcgggctctgcccgcgacccacttgcggcctgcgctggatcgcgacctagaccgaagtagtgggtgaccgaccagcaagtcgcatggcgctgccggcgcggctgactagcatgggtccataactacaaaaccgagaggccctcatggctcgccgcgcctgtttgccgtcatcgttgcgcaccttcctggtgtggctgtgcctgttggctagcccattgctggctgcgcaggagctggacgagcagatcctgcagctgtttcccaaggcgacgcgcatcgagccgaagcaggacaatccgccggtctacagcgcctaccaactcgacgatctgctcggctacgccttcgagtccaccgattattccgatctccagggcttttccggcaagccgatcaggctgttgatcggcatgaatcctcagggtgtgctcaccggcgtccgggtgctggagcaccatgagccggtgtttctgcatggtctgggcgagcaggcgctgttcgatttcgtcgaccagtatcggcagcaatcgatcgccaagcccatcgtcgtcggcggccgcgaaggcaccgccaccagcaacgactcggtcacccgcatcgatggcgtgagcaaggccacggtatcggtggtgatcgtcaacgaaaccgtgctgctctcggcgctgagcgtggcgcggcagctgctcgagggctttgccggcggtccgctggccaccccgaagcctgacctctacgagccgctcgactgggacgcgctgcttcagcgcggctacgtccagcactggacggtgagccgcgaggaggtggaagcggacatcggtcattccctcgacggctaccaggcgctggataccgacagcgatgaccccttcagcgagctgtatttcgcctacctgaacgcaccgatcatcggccgcaatctgctcggtgaggcggggttcgagaagctgatgaccgagctgcagcccaacgaacaggcgttgctggtgctgtcgtccgggctgtacccgcacgtgccggacgacttcgtgcccgcgaccgccccgagccggctggtgctgatgcagaatgagcatcccatcgacctgcaggacatgaacttcaacaacggtgcggtcatggatctgctggacgcgccggtcgagccagccgaagcgcatatcttccggatcaaggcgcacaacgccttcaaccccgccgagccggccgggctgcggctcaacgtgaagctgcagcgcaaccatctggtggaaaccaatacccagttcacccgcgagttccagctcgatccggcgctgttcgacattcaggaagcccaggtcgtggccgagccggtgccgatctggttgcatatgtggcaggagcgctggtggcaggtcggcctggtcgggctggcgctgatggtgctgacgggcgtgttcatctggcagcaccggataagccggcacagccgcggtttccacctgtttcgcgccggttatctgctgttcaccctgttgttcatcgggctctacgcccagggccagctctcggtcgtgaacatcttcaccttgctgctggcgctgtggaaagacttcgatatccgcgtgttcctgatggatccggtgatcttcatgctctggagcttcaccttcgtcagcctgttcctctgggggcgcggggtgttctgcggctggctgtgcccgttcggcgccttgcaggaaatgcttggctgggtcgccaagcgcctgcggattcgccagtggaagatttccgaccgcacccattcgcgcctgcaatggctcaagtacctgatccttgtcggactggtgccggtggccttctattcgctgaccctggccgagcggctcgccgaggtcgaacccttcaagaccagcatcaccttgttcttcgtacgctcctggccgttcgtgctctatgccgtggtgctgctcgggctcgggctgttcgtgcacaagttttactgccgctacgtctgcccgctgggcgccgggctggcgatgctcggcaagttccatctgttcgcctggctcacgcgaatcgacgcctgcgggcagccctgccagcactgcaagaaccattgcgagatcggcgcgatcaagcgcgatgggcgcatcgactacgacgaatgcatccagtgcctggaatgcatcgtcatcctcaacaatgacgatcagtgcgtggccaccatcagtgcgcgcaagcgggcggaaaaggccgagcggcatgcccagggcgagctgatcgccaccgacgccatggcgccgcacgcgctgcctgcgccttgacgacgagcaaggcgcaggtagtagccacctgaccggctggttctgcaatgctgcacagcggctctgcgtccatggctattgttcgcccgcactagttcgctagcatcggacgcctttggcgaatcggctggcccggtccgcccgtaccccttgctgtgaagaggtcccccatggcagaacgtgaaatcgtcgttgtcggtgcggtgcgcaccccgatcggctcctttggcggcgcgctgaaggatgtcgacctgatcactctcgccaccacggcctgccgcggggcgctggagcgctccggtaccccggccgatgtggtcggccatgtagtaatgggcaacgtgatccccaccgagccgcgcgatggttacctggcgcgcgtggccgcggtggacgccggcattccgctggaaacgccggccttcaacgtcaaccgcttgtgcggctccggcctgcaggcggtgatctcggcggcacagtcgatcctgctcggcgacaccgatgtggccattggcggcggtgcggagagcatgagccgcgggcctttcatcctgccgaacctgcgctggggcgcacgcctcggcgacagccaggcgatcgattacatgaacacgctgctgcacgatccctggggcaagttccacatgggcgtgacggcagaaaacgtcgccgagcgctatggcatcaaccgcgaacagcaggacgcgctggcgctggaaagccagcagcgtgccgcccgtgccatcgagcaaggacgttttcgcgagcagatcgtcccggtggcggtcgagacgcgcaagggaaccgtccacttcgaggccgacgagcacgtccgcgcggacctgaccgccgagcggctcgcggcattgaagccgatcttcaagaaggagcatggcaccgtgaccgccggcaatgcctcgggcctcaacgacggcgccgcggcgctggtgctggctgaggcggggcgggctcgcgccttgggtttgcagcctatggcacgcctggtcggttatgctcacgccggcgtcgatccggcttatatgggcattggtccggtgcccgcggtacgcaagctgctggagcgcaccggcatccgcctggagcagatcgacgtgatcgaggccaacgaagccttcgccgctcaggcctgcgcggtgatgcaggagctggggctggacccggtgcgggtcaaccccaacggctcggggatttccctcgggcatccggtgggcgcgactggcgccatcatcagcgtcaaggccattcatgagctgcaacgcatcggcggccgctatgcgctggtgaccatgtgcatcggtggcgggcaggggatcgcggcgctcttcgagcggtgctgagcgcaagcgttcgcgtttgtcgggcatggccatttcgattgaagattccgccgggatagccgacaaccttcggcgagggtgataactacgccaagagaccggcttcccacaggactattcatgaacaacgcatccgcaaccgacgccttatcgcttctgctgttcacgctgcgcagcggcaaacagatggcgatcaacctgttgaaggtcagcgagatcattccgacgccgtcattgacccggctgcccgagtcgcacccccacgtgcgcggcgtcgccaccttgcgggggcagccgttgtcggtgatcgacctgagcctggccatcggcatggcgccgttgcaggacccaaaaggcggctgcctgatcgtcaccgaaatcagccgttcgaagcaggggcttcatgtgcaggcggtggtcaagatcgtgcacatccagtcgtcgaagatcctgccgccgccctacggtgcacgtagcaactccttcatcaccggcacggcggaagtcgatggcgagctgatccagatcctcgacgtggaaaaggtcatccataacatcgcaccggtgccggacgatgccgacatttccgaccttgatgatcaggacgcccaattgctcaccgaaacccgcgccctgattgtcgatgacagccaggtggcgattcacatgtcggtgtcggcgctgaccaagatgggcgtgacctgccatgcggtgcgcagtgcacgcgaagccttcgaaacgctcgatcgcctcaaggacagctacgaggctatcaacgtggtggtatcggacatcgagatgccggagatggacggctactcattcacccaggcgctacgcaagcaccccgattacgcctcgatctatgtgctgctgcacacctcgctggacagcaccatcagcaccgacaaggccaaggcggcgggcgccaacgacatcctcaccaagttctccccgccggaaatggccaaatgcatgctgcgcgcggcgcgggtgattcacctcggcgaggacgcctcggtcgcttgagtccgggtagcgcactggctttgtaggagcgggctctgcccgcgacccgagggttcggtttacgcctaggtgcttgatctccgctccgttcgcaggcagagcctgctcctacacacaatgcgaaggcccgagttcgcaaggtagccatgcggacctgtaggagcgggctctgcccgcgatctgggggttcggtttacgcctcggtgcatgatgtccaccccgttcgcaggcagagcctgcccctacacgcgatgcgaaggccggagttcgcaaggcgccatgcggaccggtggagcgggctctgcccgcgatccgggggttcggtctacgcctcggtgcatgatcgccacctccgatcacaggcagagcctgctcctacacgcgatgcgaaggcccgagtttgcaaggcggccatgcggacctgtaggagcgggctttgcccgcgactcgggagttcggtttacgcctcggtgcatgatcgccacctccgatcacaggcagagcctgctcctacacgcgatgcgaaggcccgagtttgcaaggtggccatgcggacctgcaggagcgggctctgcccgcgactcgggggttcggtttgcgcctcggtgcatgatctccgccccggtcgcaggcagagcctgctcctacacgcgatgcgaaggcccgagtttgcaaggcggccatgcggacctgtaggagcgggctctgcccgcgatccgggggttcggtttacgcctcggtgcatgatctccacccgttcgcaggcagagcctgctcctacacgcaatgctgaaaaggtgcgggttggcgcaccggccgttgtaggatcgccagccggtcagctgccgtgtttgccgaagctcgcgtcgcgtgtgttgacgtagagcgcatacaacgaatggctgctggccatgaacagtcggttgcccttgctgccgccgaagcagagattggcgcagcgctcgggcagcctgatcttgccgatcgccttgccctgcggattgaagatcatcacgccgtccagctctgcggtgttggcttccggtgcgcctgagctgccccagccgcaccacaggttgccgtcctcgtcgcacttgatgccatccagtgcgccgaaggcgggcgcctcgatatgcttgcggcgctcgcccagtgtgccgtcctcgttgaccggataggcccacaccagccgattgggctttgcgcggccttcgacgacatacagcgttttctggtcgggcgagaagcacagcccgttggggcccgagatcgaatcgatcacgcgggtcacagtgccggtttcgccgtcgatgcggtagacggcgtccggcagctcggtttgaattttgtgaccttcgtagaagttgctggtctggaagggcgggtcggtgaaccagatcgagccgtcctgcctgatcgcgagatcgttcggcgaattgaaacgcttgccctcgaacgtgtcggccaacaccgtgatgctgccgtccggctcggtgcgcgtgacgcgacggccctggtcattggtggtcgagccttcgcaggccaatagccgcccttgcagatcgcggctcaggccgttggagtggttcgagggttggcggtagacgtcgaacgagccggtgatctcgtcccaacgcatgatgcgattttcgggaatgtcgctgaccagcaggtaacggccatcgccaacccagaccgggccctcggcccagcgcatgccgccggcgatcttctcgacgctggcgttgaacagccggtatttggtgaagctctcgtcgaggatttccacgagttcatccgggtagcgctgggtcagcggttcggcaaaggcgagccggggcaggcccaggctgcccatcgaggcgattccagccgataccatcagcgagtttttcagaaagtctcggcgggcattgcgcggattgttgctggcggaatcgtcgttcattgcggtcatggcgtgcgtccttcgtaagtttttatgggcgagcgaatccgttccgctgaaataaggcggtcaggggttgcgcaggtgatcagcgactcggtcgaggcgggctgtgcgcgtggcgcaacagcggcagaacgcgctcggcagccgggcgtggcgaagggggcatgcgactatccattgttattgttgggtaatgttgtcgtacaacctggctgagtattgtcagcgtatggcagcttgtcaaagccgattcttgcctcaaataagaaggtttatagcgagaactgtcttctggttcgacatcgtatgagttgattgcctcgctttgtcgcgtcctccaagggcattgccacgtagaatgggcgcctcgaaagaataaggacggcggacggtgaatctgcaacagggctttgtcctgacccgacactggcgcgacacggcggctggcaccgaggtggagttctggctggcgaccgatgccgggccgcgccgactccgcgtgccgtaccagccttcggttgcgtttatcccggcggcgcaacagcgcaaggccgaaatgttgctcaagggcgagcgcgacgtggagttgcgcccattgaacctgtccgacttccgccatcggccggtggttgggctgtattgcaagcagcaccgtcagttgatgaatctcgacaagcgcctgcgcggggcggggctcgatgtctacgaaggcgacatccgcccgccggagcgctacctgatggagcgtttcatcacggcgccggtcagctttgccggccagttggatgagcaaggcgtgctcgtcgaggcgcagatcaagccggcgtcggattaccggccacagctccggctggtctcgctggacatcgaaaccaccatgcgcggcgagctgtattccattgcgctgcaaggctgcggcgagcgtcaggtctacatgctcggcccggccaacggcgatgccggtgcggtggatttccggctggactattgcgacagccgcaagcagctgatcgagcgcttgaacgattggctggagcggcacgacccggatgcgatcatcggctggaacctggtccagttcgacctgcgcgtgctgcgtgaacaggcccagcgctatcaggtgccgctgcggctggggcgcggtggcgaggaaatggcctggcgcgaacatggcagccgcagcaatcacttcttcgccgcggcggcgggtcggctgatcatcgacggtatcgaagcgttgcgttcggcgacctggagctttccttcgttcagcctggaaaacgtcgcgcagacgctgctcggcgagggcaaggcgatcgacacgccgtatcagcgcatggacgaaatcaaccgcatgttcgccgaggacaaaccggccctggcgcgctacaacctcaaggattgcgagctggtcacgcggatcttcgacaagaccgagctgctgacattcctgctcgagcgcgccacggtcaccggcctgccggccgatcgcatgggtggttcggtggccgcgttcgaacacctctacattccgctgatgcaccgccagggctttgtcgcgcccaacctcggcgagcggcctccggaagccagtcccggcggcttcgtgatgaactcgcagccgggcttgtacgaatcggtgctggtgctggattacaaaagtctttatccgtcgatcatccgcacctttctcatcgacccggtggggctggtcgaaggcatgcgcaatcctgacgacagcgactcggtgccgggctttcgcggcgcccgattttcacgcgaccggcattgcctgccggccatcgtcgagcgcgtctgggaagggcgcgaggcggccaagcgcgagggcaacaagccgctgtcccaggcgctgaagatcatcatgaacgccttctacggcgtgctcggatccagcggttgccgcttcttcgacccgcgcctggcttcgtccatcaccttacgcggacacgaaatcatgcgccgcacccgtgaactgatcgaagccgaaggctacagcgtgatctacggcgacaccgactccaccttcgtctggctcaaacgggcacacagcgacgaggacgcggcgcgtatcggcaagcggctggtccagttgatcaacttgtggtggcgcgaacatctgcagcgcgagttcggtctgcagagtgcgctggagttgcagtacgagagccacttcaagcgctttctgatgccgaccattcgcggcgcggaggagggcagcaagaagcgctatgccggtctggtgacgcgccccgacggcagcgacgggctggtgttcaagggcctggaaacggtgcgtaccgactggtcgccactggcccagcagttccagcaggaactgtaccggcgcatcttcaaccgtgagccgtaccaggactatgtccgtgactacgtgcgccgcaccctggccggtgagctggacgagttgctgatcctgcgcaagcgattgcgtcggcgcctggacgactatgaacgcaacgtcccgccgcacgtgcgcgccgcccgcattgccgatgaatacaacctgcagcagggccggcagcggcagtaccagagtgggggctggatcagctatctgatgaccgtgggcggccccgagcctctggaagtacggcgcgccgcgattgactacgaccattacgtgacgcgccagttgcagccgatcgccgacgccattctgccgttcgtgggcgacagcttcagtgcactgatcgacgagcaactcgggttgttctgacgggcattcgcgttagcggacgctagccatcggagcggcgcgccgtgtagcgctctgccaggcgttcaacgggcacgccgcaggcgaactgcaacaccaccaggcgattacgcagcgagcgccgccaccagccgtcacgctgccagcgccgaggatcgacgcgaacgccttcgttcaggcaaacgaatcggccccgtcggcgcatgcacttcaccagttcgacttcctcgaacagcggccaggggctgtgctgaccgcagcgctgataggcctcggccgttacgaacagtccctggtcgccgtagggcacgccgacgcggttgcgcagtgcgatcagatgctcgagcaggctgccctgccagccggtgctgccagcgaaacggaatcggaaataaccccctaccgcacccgtagcgactgcggcctgcatcgagggcagcgggttgccatgtagttgggcgtcggcatgcaggaaccacagcaatggatgccgcgcatggctggcgcccaggcgaagctgcgtgccgcgacagggcgcggtcggcagccaggttgcgccgtggcgtgcgcacaacaagcggcacggctcgctgctggcaccgtccacgacgatgatttcgccgtccaccgtcgcaccctggagaagcgcggcgagagcgtccagcagctgcgccagggcctgctcatcatgccagcagggaatgatcacactgacggccggatgttcaggcatcgctgccgattccgagtcgttcgagggtcgcgtgcaatgcctggcgcgccggtcgcttgtcgtcgtgcagcaccgcggcgaggtgcgccaggtcttcggcgtggtcgatgtcgaaggattcgccggcgatggcgacgctgtgtccggcctgccggcatcgctgcgcaagggcatcgccgagccgcgggctgctccagggcagcggttgcaggtccggccagggacggttggatgccatcaacacgacgccaccgtcgcgggcggcgaacaggaccgtgtcgaaacgctgtaacgactgagcgacgtgcaggtagtcggccgggcgcagggctggacagtcgctgccgatgaatatcaggctgtgctggccgtcgctgcgcaggtcatggtccagtgcgttgatccgctcgccgaggttgccgtcgccttgtgccatgcacagcgcctcgccgaccagtgatcgcgcccagctcaggtgctgacggtgctccggtgctattacctgctggccgggccattgccgcaggtcttccagcgcgcaggcgagcagcgcctgtgctaaggacagcgcgacctcctgtcccagtgtggctgccagccgctgcttggcgtggccgagggcgggtcgtttgcagagcagtaccaggcagggcggcgctgtatccatggacggtcggtttctcctgtcgccgctatggccgtgcagccttggctattcttcgtgaagacgttatctcgcgattcacgcggactgtaatcctgaaatgcccggggagtcgaaacaagacttgggagcgccaacgccatgcgtgacaccttgcctctgctcgatgcgctgagctttccaccgatccgtcgcggccggctggaagccttgcaggtcaacctgacctaccgctgcaatcagcgttgcctgcattgccacgtcaacgccgggccgacgcgcgaggaggcgatgaccgacgacagcctgagcctgctgcgtcgggtaatcgatgcgcatccggtgcacacgctcgatctgaccggtggcgcgccggagctgcatccacgctttcgcgaaatcgtccggcatgctcgtcgcgaagggttgcgcgtgatcgatcgttgcaacctgaccattctgagcgagccggggcaggaagacctggccgaattcctggcggagcagggcgtcgaggtgacggcgtcgctgccttgctattcgcgcgataacgtcgaccggcagcgcggcgatggggtgttcgacgcgagcatctctggcctgcgtatgctcaacgcgctggggtatgggggcgagcccggcgggctgatcctgaacctggtgtacaacccgcaaggcccttcactgccgccgccgcaggcgcagctggaggcggactacaaggcgcatctggccgaagatttcggcattcgcttcaatcacctgctgaccatcaccaaccagcctatcgcccgtttcggcagtaccttggtaagcaaggggcagttcagtgattacatgcagctgctgcgcgacagctatcggccggagaatctcgatgccgtgatgtgccgcaatctggtgagcgtcgattggcagggctatctgtatgactgcgacttcaatcagatgctggaactgccgatgacgcttcctggaatcatcagccgggcccgcgcgcacttgtgcgatttgctcgagccctcgagtctggacggcaatcccatcgtcactcgcgaccactgctatgcctgtaccgctgggcagggatcgagctgcgggggcgctttgaagggttgattccctttacctcgccgtttgtaaccgaccggaagaccgtcaagcgaccattctgaaatggcctcgcaatattcgccgttgccgcgcgtaggaataactgttcaatgaactgatcattcgcatgcatggttattcgtatgcgtagttagttgttgaaattatccgtatgcggagtaatctgtagtcggtggcaataaccaggcggagttgaagatgaaactcgaacaggcggtcagcaaaccggacattgcttcgccagaggcaggacgagtagcactgacgtttttcttcaacctcatggggttgtggaattgcagtgccgagcagcagcggatactgctcggctcggtgggcaatacgacctacttcaaatacaagaaacttcctgaagttcgcctgccgcgcgatacgctggagcgcatttcctatttgatgggcattcacaaggcgctgcgcatcatcttcagtaaccagacggagcgagcatacgaatgggtgcacaagcccaatgatgccgcgccgttcaatggcgcaagtgcgctcgactacatgctcggtgggcaagtcgtcgatctggccgatgtacgacgctatctcgactgggtacggggctgatgcaggagatcctaccggcctggcggcgggcttaccgcatcgtcaacagctcgtttccgccgctggccgtgttcgaggacacgctcagcccggacgatctggaaatcgccttcgcgcttgaagccatgacaaacgatcgcctgcgagaagaggcgggttcgctacagcgcgtcgcgcccagtgatcgcgtcagcgggccggggtcgacggcggtgatggccgcctttacccatatcggcaattccagccgcttcagcgacggcagctacggcgtctactattgcgccagctcgatagacgccgccattgccgaaaccaagtttcatcaggagcgtttcctggcggcgacccgcgaaaccaatgtcgaaatcactgtgcgtgcgtacgtcaacaaggtcgtcaaaccgctggtcgatgtgcgtgatctgcccgagttgcatcagcccgatccggccgcctatggcaatagccaggcattcgcccgggagcaccgcgacggcaagacctggggcttgctgtacaaaagcgtccgcctggcggggcatgaatgcgcagcggcgtttcgtccgcgggccgtctcgttgccagtacaggggccgcatttccgctatgtgtgggatgcccgtgcaggcgccatcacccatgtaatggaacttaccgaggtcaaggtctgagggagatcaccgggcggttcttgagcctggtcaagtccgttgacgattacactggttagcctgagggctcattctcaagcgaagaccggggcctgcgatggccaagaaatttccactcaacccgccacatcccgagcgcatctgctgggggtgcgatcgttattgcccagccgattcgctggcctgtggcaacggcgccggcagaacccagcacccggctgaaatgatgggtgacgactggtatgaatttggcgactggggagacctgatcgcgaccgacaaggcaggcaaggcggacaaggttaaaagctagcgccgctgctctcaatcggcagaagtgatcgctgcctgatcgagcatctgccgcactttgccgagcagatcgccgatctggaagggcttgaccaccatgtccattccggccgcgagaaagcgatcacgacgcacggcgttttcggcgtaaccggtcatgaacagcaccggtagcgcagggcggtgggttcgcgctgtgtcagccagttcccgtccggaaagctgtggcagccccacgtcggtcaatagcaggtcgatgctggcgtcgtcctgcagtaccgacaatgccgtggcgacatcgcccgcctcgctgcatcgatagccggcctcgctcaacatctcggccaccagcatgcgtactgccggcatgtcttcgacgatcaggacatgctcgccgttgccttgcggcagttcattgatagacgccgcggcggtgtggtcagccatggctgccggcagcaccagcgacacttcggtgccttcgccgaggacgctgctcagcctggcttcgccccccgattggcgggcgaacccgtagatcgatgacaacccgaggccggtgccttggccaagcggcttggtcgtgaagaaggggtcgaagactttgccaagcacctccggtgcgataccggtgccgtcatccttgaccgtcaacacgacatagtcgccgtcagccaggtccgcatcgccctcggaccgcaacggcgcggtccggatggtgatgttgccgccgcggggcagggcgtcgcgcgcattgatcactagattgaggattgcgctttcgagctggttggcatcgacctgtgccacagcgccttgctcggacagctccagattcagcgctatatcctcgccaatggttcgctgtaacagctcctcgagcgagcgaatctggtcgttgaggtcggccgggcgcgcatccaacggctgctggcgggcgaaggccaacagccggttggtcatcgacgcggcactgcgggccgagttcagcgccgtatcggcaaaccgtagaacggcatcggtgcggccttcgtgcatgcgttttttcagcagctcgatgccggtgatgatgccggtcagcagattgttgaagtcgtgggcgattcctccggtcagcttgcccagcgcgtccattttctgcgcctgcatcagctgcccttcggtgcggacgcgctcggcgacttcgcgggcaagctcgttgttggcgttgtcgagttgctgccgttgcgatcgctcgcgttgacgctgctcggtgatgtcttcgatgacgaccagaccgagctcggacgcccggtagggcgacacctgccacttggtttcgcgacgcttgcctgccacttgcaagatcagggtgtcttgccagcgagaaccgctcgccagactctcccgcaacgcttgcagcttggcttcctgcccgtcggcaaggcttgcggccagtgccgttggctccggctggacggccagcagcagggacagcgcacggttgctttcgtgaattcgcagctgagggtcgatgaccgcaatcggtgccgcgacctgggagaagatttcacgaaaccgcgcctcgctttcacgcagcgcatgctcggtgtcgcgcacacgcagcagggtgcgcagggtcgccaggagcacgtccggatcgacggggtgaatgaggtaggcgtcggcccccgcgtccaggccggtgatgatgtcgccggtctggatcgacgcggcggatacgtgaatgaccggaagcaggcgcgtgcggtcatcggtccgcagttggcgcacgatgtcgaagccgctcatgtctggcagattcacgtcgaggatcagcgcgtcgatgtctccggtcgcgatcagggccagcccttcggtgcccgttccggcttccagcacggcgtaaccgtggcgttccagcacccggcgaatcgcgtagcgcgtggcggcgttgtcatcgacgatcagcagccgggtcttatgctccatcagcgcgctccgtggaaatcgcgacaggaatgacgacgtagaacgtcgatcccacccccggtttgctgtcgacgccaacgcggccgcccagcagttcggcgaagcgcttgcacagggacaatcccagacctgtgccgcgcaggcgcttctgcaacggcgtgtcgatctgtacgaagtcctcgaacaggttgccgtgcaggtcttgcggaatgccgatgccggtgtccgtcacggcgaagcgaacctctctgtcgccctcggcgcaggcggaaatccgcacctcgccgctctgggtgaatttcagcgcgttggagatgaagttgcgcaaaatctgcgcaagcttcttgtcatccgtatagagccgcggcatatcgtgcggctcctcgaatatcaggtccactgcgttggcatcgacgatcggccgaaacatcccacgcaaggccgcgaacagatccagcatgtcgaaccaggccggcgatatggtaatgcggccggcttcgatcttcgccagatcgagcaagtcgtcgaccatgtcgctgagctcgctcgccgcgccactgatgaacaggacctgcttatgctgttccggactgagcgggccgtccagttcatcgctgagcaaacgggtaatgctgcggatggagcccagcggtgtacggaactcgtggctcatgtaggaaaggaagcggcttttcaggtccgaggcctgtcgcagctgttcggcctgggtgtcgagttcggcatacagcgcgaggacgccctggttggtttcctcgagttcggcgcgcagcagatcgttctcgctgcgcagttgttcgatgaggtcgttcgtattcgagtcagtcaacgattgcctccagcgcaatcaccataacggtcacgtcatcgcgaccacggcagaagtcgcggtgcagcagcgcagcaatgatagccgggtgtcgatgcaccagaccggggtagtcgcgcagatcccaacgcgactggagcccatcgctgtacatgaccagaagctgcgccgcatcgaccggataatcgaatgcgacggccttgcgaaattgagagccgacgatgcctgggtgagacgccatgccgcgactcttttcagcgttcagcaggcaggccccgatgttgccgatgccggcgaaacgcaccttgtcggcgtcatacagggcgatagccgctgcgccaccgcgtgagccggtcatcgcctggtgcatgtcgagcatgctgaccgtcgggtcggcgaacgggtccatggcgaaagcggcagcgccggccaggccggcctgttcagcgtcttcgccatgtccgatgccgtcgatgaccagcgcactgagccgtgtaccctcgacagccagatgccagacgtcgccacaggccggatcgtttttcagggaatgctggctgacgccgaaccgaagtggcagggccgatacgtggcgtgggtaaagctgcgccagcaccactgagcctctgctgtcggaatggatatcgaacagctgggcttggcgcgagagagcaccgagcccggttccctgggtgccgccggtggagaaaccatcggcaaggcattcgttggggttgaagccggggccgcggtcgatggcgatcagctcgattccctgtccactttgtgccggtatcgcacgcaggtgcaaagcgccatggtgcgcgtgtttcagcaggttggtggccagctccgtggcgaccagggcgacgcgtccggcatcggtttcatcgaatgcgagctcgactgccagcgattgcgcgacgcgccgcgcatggccgatctggctttcgtcctcgatcggcaggacggtggtcatcgagccctgaatgttcatgaccatttggtaatgctgatgcgtgtgccgacgccgggagtactggcgagctcgaagtcgtccaccaggcgcttggcgccggtcagtccaagcccgagcccaccaccggaggtccagccgtcggtcaatgccagtttgatgtcggcgatgccaggaccttcgtcgcgaaaggtcagccgaataccgctgcgcggaccttcgtcgagcacttcccagtccatatcgccaccgccgccgtagacgacggtgttacgggccagctcgctgacggcggtgaccagcttggtctggtcgatcagacgcatgccgcaatcctgcgccagcttgcggaccgcctggcgcgcgagcaccacatcctgctcgatccgtaccggtgtgctgccgctgctgcgcacggtcatttttcagccatccgcttgtgcagcagctgcattccgcgttcaacgttaagcgccgtgctgacgccctgcagcgtcagacccagctcgaccagggtgatcgccaccgccggctgcataccgaccacaacggtctcggcgtccatgatgctggacaagcccgagatcgaactgatcatgcggccgatgaaggaatcgaccatgtccagcgccgagatgtcgatcagcaccgctttggcagacgtggcgctgatgcgctcggccaggtcgtcctgcagcgtcatggccagttggtcgtgcatatcgacctgaatggtgacgagtaggaactcgcccattcgcagtattgggatgcgctccattacaccgccttgctgacagtcagcccggagcgccgcaatgccagcgccagtgcatcggccagggaggccttggtgacgatgccctgcaggtcgagacccaggtgcacgatggtctgggcgatctgtgggcgtacaccgctgatgatgcagtcagcgcccatcaggcggatggcggtgacggtcttgagcaggtgctgcgccaccagggtgtccacggtcggcacgccggtgatgtcgatgatggcgatttccgaacctgtgtcgacgatgcgctgcagcagcgactccatcaccacctgggtgcgttgcgaatcgagggtgccgatcatcggcagggcgaggacgccgtcccacagcttgaccaccggcgtggacagctcgagcagctcttcctgctgacgcttgatcaccgcctcgcgggatttctggaacgtgcgcaccgtgtgcagaccgagttggtcgatcagctccgacagcgcccagagctgctcggccagcagcgccggttcatcggcgtattcggtctgcagcagcggcatcaatgggcgtttgaacgagaaaatgaaacccgcggtttgctgcgaatcgaaccccagcagcacgcggctgtgcgacagctgttcgaggaactggcgcatgtcttcccagttgcccgcccggagatcggtggtttcggactgaccggcgccctcgatcagcaaccgaatgaagtcggccgtctgctggcgaaactcttcgatcttgacgttgcggtacatgccgctggcttcgagttcacgggtccagctgtcgagcaactcgtgctctttcttggcaatcacgttgaatgtgcgttgttgcaatgaggccattggcgcgggtccttatgggagatgcagcgtcgggtttgatccgtattgccgataggcgttcctgtggggcagaacgactttcgtccgcttgcggccaggcggcacggattcattggcaagctgtacagaatggaacgagtagagggctgaacgatcgcgctcgacggcgcgcgaaagtcggagtggaacgcattgccagtggcaaagtgctcgcatttcgcctcaagttgaaagctcggtcaagctccgggctcgtctgtaccgaccgtttggcagataacgctgcgtatcgacttcagggttcgacaaacgagccgataacagaatggtacggccgcgtccagcagggtaaccaccgacctgatttgacaaatggcacttcgcctttatccttcccaggctcatattcgcgcacgctattcaaggaagattgatgctggttggtagttacaacaacattctggtttttttctcgtttgttgttgccatgttggcctcttacacggcgctggacatggccggtcgcgttgcgacgtctacaggtcgcgccgcgcggtggtggttgctcggcggtgcgttttcgatgggcctcgggatctggtcgatgcacttcatcggcatgctggccttcagcctgacgattccgctgggttatgacccgtttatcacggccggctcgctggtcatcgccatcggtgcttctgcactggcgttatggctggtctgtcaacgccaactgtcatggactcgcctggtgcagggagccctactgatcggggcaggcatctcggcgatgcactacagcgggatggccgcgctgcgcattcagcccggtatcgtttatgacatcgcctggctgaccgcatcggtggtgattgccgtaatagcgtcgggcgccgcgctctggctggccttccggctgcgctccaatctgcggcatgtgcgggcctggcgcagcgccgccgcgctggtgatgggcctggcaatcgtcggcatgcactacaccggcatggccgcggcgggctttccggagggcagcttctgcggagcggccaacggcgtgaacaccaactggctggccctgctggtcatcgtgctgaccctcgcggtgctggcgatcaccctgatcgtctcggtgctcgatgcgcgcctgcaggcgcgtacttcggtgctggcctcctcgctggaaaaggccaactccgaactgatgcagttggcgttgcatgacaatctgacccgcctgccgaaccgcttgctgttggaagatcgcctgagccaggcgctgaaagtggcacagcgcgagcacacctgcttcgctgtgatgttcatggacctggacgggttcaaggcggtgaacgacgcctatggtcaccacctgggcgaccagttgcttataggcgtgactgagcgtctgcgggcctgcgtgcgtgcccaggacacgctggcgcgcctcggtggagacgaattcgtgttgctggccgccatctccagcccggacgatgccgccaccctcgccgagaaactggtgcagtgcatcagcgagcccttcgtactgtcgcgctacaccctgagcgtctcgctgagtatcggcatcgccgtgtacccggacgacggcgatgccgaacgagaccttctgctacacgccgatgccgcgatgtaccacaccaagagcgcgggccggaacggatacagcttcttcgaagcgtcgatgaacgagaacgcggtggagcacctgcaactgctccacgaactgcggctcgccgaggccaatgccgagctacgcctgtactaccaacccaaattcgaagcgcccgccggcccggttagcggcttcgaggcgttgctgcgctggcagcacccacggcgcggcatgctgtcgcccgacgtgttcctgccgatggcggaaaagaccggattgatcgtcccgatcggcaagtgggtactgaacgaggcctgccggcagctgcgtgaatggcacgagcgggggctaagcaactggacggtcgcggtgaacctgtcggccgtgcagttcgagcaaccggatctgctggaagtagtcatcgaggccatcgaacgccacagcatcccgccggagatgctgaccatagaagtcaccgaaacggtggccatgcgcaacccggaaaccaccatcgaaacgctggagaaactgacggcgatgggtgtcaaggcgtccatcgatgacttcggcaccggctattcgagcctgctctatctcaagcgattgccggccagcgaactgaaaatcgaccgggcgttcgtcaaggaaatgagcgtcggcaatgacgattcggtcatcgtctcggcgatcatcgcgctggccaaggcgttggggctgcaggtggttgccgaaggcgtggaaaccgccgagcagcagcacttcctgaccggcctcggctgcgagacgctccagggctttctgttggatcggccgatgacgccgacgcagatcctcgcacggatcgaccaggtgccagcgggggagtcgatcttcacgacgcagcggttaccccggcccgggccggcctgattcgagcggggggtaggcgtcagaaccagcggtcgttgcgtttgcggccgcgcgtcatggctggaatgatcaagccggccagcagccctgcgccggcgatgctgccgccatacaccatgtagcgcatcagcacctggttgttttcatcgcccagccgagcctcggcatcgcgcagttccgattcagtggcggtcagcgcttcgtccagtgccttgcgccgtgcctccagctcatcgatgagagccttgcgtgagtcgagggtttcctgcatgccctggacgcgcgttttccaactgtcgtcgatggtcttcaactgctcactgagttcggcgaccttctgttccagctcgggtacgcgctccgcttgtccgggaacttcctgcaggtcactggtgcgaatccagacgcggtcgccgttttcgccgcggacctggctgtagtcaccgctggtttcgagcagttcgaccttctgcccggaggtgaggctgccgacaatgcgatagccatcggtcgggccgctgcgtacgtaggtgctcaaggtgtcgctgacccagcgatcattggattgctgggcctgggctggcgacatgaccgccagcaatgcgctgaacagcccggcgcaaagggcgtggcgcgggctggtcgacagggaaacaggggatggacgtgaatcggattgactggataagggcatggtggtcttcgcgctgactgaatgaaggcccggtggatgggccaaaaacatagatgaaccgggctgacgaaaccgccagaaggcctgccgcaaacgaaaggaaggcaggcgtgccggatgtactgatcgtggttgggaggatgcattcccccgaggcttgaccggtcgcctcacgtagtaccgcagccaggactgacaataagaaacctgccaggttcaccagaaattcatctttttatgctggggcggttgccgttgggttccggcatgcctgtccggaggccgagcatggagtgcttgcgcagccgggttccggtgcagttgttgtcgctacaaaacctcgatccgttgcgccctgatcagcacttgttcctgacgaaagcgtcgttccaacgttgcgcgatagctttgccaccagccacgatcgagctcggcggtcatcacctcgtatatcaacagatcgtcgcgcaccgcgtggctggagtcttcttgccacaggcctttggcgggcgcgcgggtatgcgcggtcaggccgccgaactgctcgagcagctcttcccggacctgggcgaacagcatgttcggcaagggtttctggtcgttgtcgtacagcggcaagagaagatggatcaggtgcatatcggtctccgagcgcagcgggtgatgcttcttggacctccgacgtcgacgcccagcgttgcggtgcggacggacgggacccgggcggctaaccccggacgattaacaggtgggtgtcgccgcagccggtttacagcgttcggctgatgggcggagacgaatttgcaggcgccgacggactccaacccagataagaacctgctggaggtagtccaagatggaaacgtcgtatccctcggtaagtgcgctgcagaaggctcaggacatcacgtcacgctgggccgacggcgaactgggtgccgaagaagcgcagcacgggctcaaggccgtgttcgatgggtggcaaccgggtgaggcgagttcggaaaccgagcggattgccgagacctcgctgagcgcggcacggatcgccttccaggactggcagcagcgcggcgagaattgcgaagagctggtgacccagctgcgctggattctcgacccgtcgaaagacggcatcgccgatcccgccctcaacgtctacgcgccccagcgtcccgaatgagcagcaccggattcagcgcgtcagcaatatgagcacagtgaccgccagcaccagtgatacacctttccagaacaggacggggttgcgctccatcagtggtggccgggccttgttgaggaaggcctggttgggttggcgcagctcgaagacgaattccgacaaatcctcgtagcgcttgtacgggtcgggatgcagcgctttgcgcagcacatcgtcgatccaggccggtagctcacggtcgtgcgcgcgaatcgggcggtagctgagtttgttctgcgcggcgcgggtgcggcactgtgcgacctgaacgccataaggcagtttgccggtcagcatctgataggtgatgaccgccagcgagaacatgtcggagcgtggcgtgccgctttcgccaaggaaatattccggtgctgtgtactgagccgtgccgagcaactcgctgcgctcggtcggcgaggcgatttccatgatgccggcgacgcgcgtcgagccgaagtcgatgattttcaccgtgccggtcgcgtcgatcatgatgttctcggggcgtagatcctgatgcagcatttccagccggtgaaaggctcgcaagcccttggcgatctgctcgacgatgccgcgaaccgtttccagatccggttgcggatggtcgatcatccactgcgtcagcgtctggccgtcgatgaattcgctgacgctgtagagaaagttgcgcttgcgcgtctgccggcacggctgggcgacgtgtgcgctattgatacgccgcgcgacccattcctcggtgaggaagcgctctagataagccacatcctgttgcaggtccatcgacggcgtcttgatgatcaccggcgtgccgctgtcatcgtcggtcgccaggtaaacgtggctgcggctgctggcatgcacctcccgaacgatggtgtagccatcgaaccgcgcacgtgcctccagcgttggcgggaagggcaactcggtgagctgctggtagagctcgtcggcttgctgcaggggcagggcgtcgatgcgcaggatctgcaccgtgaggttgtcgtcgctgccctgatccagtgcctgttcgacgatggctcgggcggcagcgtccaggtcgtcggggtgatgagcgatggcgccgatcatcgacgccgcgctgatgtactcgtagaccccgtcggtggcgaggatgaaggtgtcgccgacgtcgaccgattcggcgcggtaatccaggtccagctgcggatgaatgcctagcgcccggctcaggtagctcttgtcctcgcccagccacagccggtgatcctgggtcagttgttcgagcgccgtgccgtgtacccgatagatgcgcgagtcgccggcgtggaagaggtgcgcggtagtcgatttgatcaccagcgcactgaaggtgcagacgtagccgcggtccttgtcgtagcgatattggctctgctggctttgcgcgtgcagccaggaattggtcgccatcaagacccgctgcgcggaggtcttgaccgaccaggcgtccgaggtgcagtagtagtcggcgaagaatccgctgactgccgattcgctggcgatatggctgaccgcgctgctgctgatgccatcggccacggcgagggcgacgcccttgctgctcagttggggttcattgggaatcgtggccccgtggaaatcctggttggtttccttcacgcccttgtcggtgtgttggcccaccgaaacttttaatcgagtgctcatatgggattcgtgggttgttaggcgtggatggttggtggccgggtgaatggtcggagttcggctgaataccgctgcccctcaccccagccctctccccggaggggcgagggggcagtccgagttgtttgagagtgagtggttggtctgcaggtctggcggacgcaacagttcggcaggctcggtgcttggcgtcttctgcccagcgccagcgcggtcggcgctcggcattcggctgaactccgcagcccctcaccccggccctctccccggaggggcgagggggcagtccgagttgtttggagtgagtggttggtctgcaggtctggcggacgcaacagttcggcaggctcggtgcttggcgtcttctgtccagcgccagcgcggtcggcgctcggcattcggctgaacatcgttgcccctcaccccagccctctccccggaggggcgaggggcggtccgagttgtttgacggggatgtggctgggctgccggtctgatggaaggagaacttcgccttgctcagtgcgtatgactggcgcagatctggctccctctcccctttggggagagggctggggtgaggggacggtggtcggcacaccgcatgacgcttcgacaccgcacggcaccaaagcgcacctgacggaaacaggctgactcaacgcgtcagagcacgtttcggtgcagtccgaacatgcgtcgtgtagagcgtcagaccggtaaaggccagaccacccaccagattacccagcgcagtggggatctcattccagatcatgtaatccatgaccgagaagccgccgcccatgatcatcgccgaggggaacagaaacatgttcaccaccgagtgctcgaagcccatatagaagaaaagcatgatcggcatccacatggcgatgaccttgccgctgaccgaagtggagatcatcgcgccgaccacgcccatcgacaccatccagttgcacagcatgccccgcacaaaaatggtgaaccagccggccaggccatactcggcgtagcccagggtacgtgcttcgccgatgtgcgcgatcttttcaccgatggcgcccggtgaggtggagaagccgaaggtaaagacgaaggccatcatcaccgcaacggtcagggcgccgccgaagttgccgaggaataccaacccccagttgcgtagcacaccgttcactgtcacacccgggcgcctgtccagcagcgccagcggagtgaggacgaacacgccggtgagcaggtcgaagcccatcaggtagagcatcacgaaaccaaccgggaagagcacggcgcccaacagcggcgcgccggtctgcacggtgatgctcaccgcgaatacagcggccagggcgaggatcgcgccggccatgaaagcccgaatcaaggtgtccctggtggacatgtagatcttggactcaccagcgtcgaccatcttggtgacgaattccgaagggatgatgtaggacatggcggcatctctgtgggcgttgtgaagcccggccaagggaggcgagggctggattcgttactggccagctattggccgggcagtggtgcggtaaacggttgaaaagctcgcggtcaagaccgctcccacaatggcgcgatcgtggatgccatgtcggagcagtcttgatcgcgaaactcagtcgacggcgacctccacggcatcgcctttgagccgcacgggccagacctgcaggcgctgctcgggatattccaggcaggtgccgtcctgcagacggaagtgctgcttgtacaacggtgaggcaatgaccaggtcgcccttgagctgcccgacgatgccgcggccgatgacgttggcgccggatttggggtccttgttggcaatggcgaagacctgctcgccggtttcggtctcagggaggtggaagagggcgacctgttcaccgtcgagccaggcgaccacgccggagttggccaccaggtcgcggcggctgcacagggctcgccagctggctgattgaacggaatcaatacgtacggcgttggactggctcatcagagaacctcctcggtgacagggatcaggtgaagttcgtgtgcgtgcaccggccggcgctgcccgcgctccttgacgaagtggatgtccgggtcgccgcgctggtcgttgacgaaggtgcggaagcgcttgagtttttccgggtccttgatggcgttggcccattcgcattcgtagcgatcgaccaccagctgcatctgcgcttccagctcggtcgcaagattcaggctgtcgtcgatgatgacttccttgaggtaatcgaggccgccttcgagcgattcgcgccacaccgaggtgcgctgcagcttgtccgcggtgcggatgtagaacatcaggaagcggtcgatgtagcggatcagggtttcgtcatctagatcggtggcgaacagctcggcgtgccgcgggcgcatgccgccgttacccgccacatacaggttccagccgttttcggtggcgatcacgccgatgtccttgctctgcgcctcggcgcattcgcgggtgcagccggagacaccgaacttgatcttgtgcggcgagcgcaggcccttgtagcgatcctccaggcgcagcgccatgccgacgctgtcctgcacgccgtagcggcaccaggtgctgccgacgcaggatttcaccgtgcgcagcgacttgccgtaggcgtgaccggtctcgaagcctgcttcgatcagttcgtcccagatgtcaggcagttcgtgcagctgggcgccgaagaggtcgatgcgctggccgccggtgatcttggtgtagaggtcgtatttcttggcgacggcaccgagcgcgatcagcttgtccggcgtgatctcaccgccggcgatgcgcggcaccaccgaataggtgccgttcttctgcatgttcgccatgaaggtgtcgttggtgtcctgcagcgggatcagctccggatcggtgatcggctggttccagcaggaggcgagaatcgaacccacggcgggcttgcagatgtcacagccggtgtggccgcggccgtgcctggcgagcagttcctggaagctgatgatgccttcaacgcgaacgatgccgtacagctcctggcgagtgtgggcgaagtgttcgcaaaggctcttgtccacctcgacgccgcgggcggtcagctcgtgttcgaagacctgcttgagtagcgcgctgcaaccgccgcagccggtgccagccttggtcgctgctttcaattcgcccaggtcggtgatgccggcatcgacctggcagcacaccgcgcccttggtgacgttgtggcaagagcaaatggtggcggtgtcgggcagcgcgtcggcgcccagcgtcggggcgccgtcggacagcggcaggatcaggctggacggatcggccggcagcttgatgccgttctgcgcgtattgcagcagggtgtcgtagtagctgttgtcaccgatcagcacagcgccgatgacccgcttgccgtcttcggacagcaccagacggcggtagctggcgttggcttcgtcgatgaagcgatagcttttggcgccgggtgtggcggcatgagcgtcgccaatggagccgacatcgacgccgagcaacttgagcttggtcgacatgtccgcgccgctgaatggctggtgcggctcgccagtgagcagggcggcgaggttgcgtgccatggtgtagccgggtgcgaccaggccgaagaccatgccgttccaggacgcgcattcgccgatggcgaagatcgaagggtcgctggtgcggtagtcggcgtcgatcacgatgccgccgcgcggtgcgattgccagctctgcgctgcgccccagcgcatcctgcgggcggatgccggcagagaacacgatcaggtcggtttccagatactcacttctaccatcagcaccgtcctggaagttcatccggtaggcgtattcctcgccgatgacgatttcctgggtagcgcgggacagatgcacaccgacgcccagcgcctcgatgcgggctttcagcgcggcgccgccttcctcgtccagctgcaccggcatcaggcgcggtgcgaactcgaccacatgggcttcgaggccgagggacttgagcgcgttggccgcttccaggccgagcaggccgccaccgacgaccacgccgcgcttggcattgctggccgcagcacggatggcgtcgaggtcgtccagagtgcggtagaccaggcgcgagttgccttcagcgcccggaatcggcggtacgaaggggtaggagccggtcgccagaatcagtttgtcgtaggcctggcgaccctcggcggtgaccacttccttgcgctcgcggtcgatctccagcacctgtacgccaaggtggatctgcacgccgtgggtggcgtagtaatcggcttcgcacagggcgagggagtcagcatcgcggccgccgaagtattcggacaggtgcacgcggtcataggcgcgctggcgctcttcgccatagacatggatctggtactggcccagcgcgccgcgctcgaccagttgctcgacgcagtgatgccccaccatgccattgccgatgacgaccagcgtttcactcttgagcggggtgacgattgcgttcatgccgattcctccgtcgaagccgcgatgcggcgccgtcgtacaaaaacaaaaaggcgcctggagctgtcgagcagctccaggcgcctttgcctggtattcgtaggttgtggaggtgactgtccgagcgtcgttgcccgttgcacctgtcccgcgccgtttgcggctgatggtcttcgctgaccgcgggtgcgctgccgaatcgctcggcaggcgttgcatgagccatagcaggttgcgtgccagcgatgagcagccaatggatgcggcgtgccaaacgtccgtatatggcgggaagcagtgattactgcgccccgcacggtgttccgattgcacggtcaggctggtttatagcccggtgccgtcgaaccagaaaggtgcggtatcagctcgaggttcccttttttggggcgatcagctgacgttgtcatcggtaaccgactaacgtagcggtacagagccgaaccttgcttggcggggtcggtcagtacagcatttcacggctcggtaacttcatccgtgccgctgccagccaatctgacgaatcgcggagatcacttgaacaaggtcgtcgaacaacctctcttgctgggcatgatgcgcctgatgcaataccccgaacttgcgcagccgcaggccttgctgagctttctggagcgctgtgtcgagcgcggtctgagcgctttcgatcacgccgacatttatggagccggtgaatgcgaggcgcattttggtgccgcgctgaagctgcaaccggccttgcgccagcagatccagttgatcggcaaggccgacatcgtgccggctgcgcaggatcgctctcgctggagcatcaagcactacaacactcaggcggcctatctcaccgaagcggtggaaggctcgctgaaacgcttgggcgtcgagcgtctggacggcttcctcctgcaccgccccgatcccttgctgcgcgtcgacgaggtggcgcgcgcgctggacgatctggtcggtagcggcaaggtcggctggttgggtgtttccaacgccgagctgctgcactgccagacgctggcccgcgaattgccgctgcgctgcaatcagatcgagctgtccctgctggctcaggacgctgcctgggacggacgcttgcacgccatggaaagcgaagggctgcatgtgctggcctggtcaccgatgggcggtggacgcttcggccctcaattgcaacgggcgctcgaagaggttggcgcggcgctgggcgccacggccaaccaggtcgccctggcctggctgcgcaagctacccggtaaacccgtgcccatccttggcagtttgcgctgggagcggatcgaggaggcattgaacggtgccgagctgacactggatacccaagcctggttctacctggcgcaggcagcgagaggtcacgaggtggcctaacacacgccttcatcgggagtggtgtgcggtttcggttggtactgtgtcggtttatcgacgtctcgctggttttggccatattcctgacacagtggctttctatggttgttctccgacgccagagcgctgcgcatgccgcgcagcgccggctccgaccgagtggagagaccctacatgcgaaccccgaagccgctggtcgtggcgcttgccgctgcgatctccgtccccgccatggccgccagcaataccttggtgggctgggcaatgatgcctgccgacaccttctccgatggcccgacttcgggtcagatgactaacgccaatccctacggcaccttcgcgccgccgtacgagggccgccagccggtacagggtttctccgccgtacttccaggcgcggatgaaaacagcttcatattcatgaccgacaatggcttcggcgggcaaacgaactcggcggacaccttgttgcgcctctacagcgtacggccggacttccgtacggccgagggcggcagtggcaaggtcagcgcgagtgactacctcagcggtgcacccttggcgcgcttcacccatccgtcacgcctgaccctcaacgacatcaaccagaagctggaactgccgatccaggccgactatcgcttctactacaacgacggctccaagccgcgcgtcgacagcgccatcgactttggccgcctgctaaccggtgccgacctggacgtcgagtcggtgcgtcgcgacaagaattgcgcgatgtggtttggcgatgagttcggcccgtacctggtcaagaccgatgcgtccggcaccgttacacgcagcgccatctccctgccgggtgtttacgcgccgcagcacaaggacgtggtggcggggcgcgcgaccgccaacctggctggctcgggcggcttcgaaggcatggccatcaacccgcgtggcgatcgtctgtatgcgctgctggagaagaccgtcaatggcgacccggccggcaccctgcgtatcaacgagttcgacatcgatcaggagcgttacaccggtacggtgtttttctatcgcctgcaagcgcccgaccacgccatcggggacatgaccgccgtcgacgagacgcgctttctggtcatcgaacgcaacggggcgacggccaccagcggcacgccgttcaagaagatctacctgatcgacacccgcggcgttgccagcggcggcgccgtgcacaagaccgaagtggtcgacctcatgcaactggccgatcccgacgacctgaatggcgacggccagcgtgtgttcacctttccttacgtgaccatcgaaagcgtgttgccgctggattcgcgcaccttgctggtggccaacgacaacaacttcccttatggcggcgggcggggcctcaatgcggacgccaccgagtttctgaagatccgcctggccaagccgattccgggcgttcgcccgccgcatctgcaacaggccagggacgcgcggcgctgtgaaatggctgcagggctagggcagggctgagcctcgcttgaaagcgaggttgcggatcagcgagggcgcgcgcccctacaggtgatatcggcgggttgatgcctgctacagcagcgagcctgctttcgtgggaggcccgcccccgggccaaagctttttcagcaccgagctgcgccgttcgccgcggggtcgcggctcccacaatggggcgacgtgcactgctttgtttttgtgggaggcccgcccccgggccgaagcttttttgcaccgagctgcgccgttcgccgcggggtcgcggctcccacaatggggcgacgtgcactgctttgtttttgtgggaggcccgaccccggggcgaagctttttcagcaccgagctgcgccgttcgccgcggggtcgcggcttccacaatggggcgacgtgcactgctttgtttttgtgggaggcccgaccccgggccgaagctttttttgcgccgagctgcgccattcgccgcggggtcgcggcttccacaatggggtgacgtgcactgctttgtttttgtgggaggcccgcccccggggcgaagctttttttgcgccgagctgcgccattcgccgcgggggcgcggcttccacaatggggcgacgtgcactgctttgtttttgtgggaggcccgcccccgggccgaagcttttttgcaccgaactgcgccgttcgccgcgaggtcgcggctcccacaatggggcgacgtgcactgctttgttttcgcgaaagaccaggcggcgcatgcatttcaatatcgggcgggcaggcgtagctcaccaaacaagctgcgcctgaccgcgccggatgagatgggatcaggcctcgcccacctgcaccaccagcttgccgaagttcttgccttcgagcaggccgataaacgcctcgggcgcgttttccaggccctgaacgatctgctcgcgatacttgatcttgccctcggcataccaggcgctcatgtcgcgcgcgaactcgtcgtagcggtgaccgtagtcgttgaaaatgatgaagccttgcatgcgcatgcgctttttcagaatggtgtcgagcaacaatggcaggcggtccgggccgtccggcaggtcggtgctgttgtattgcgcgacgacaccgcagaccggcacccgtgcgctggtgttgagcagtggcagcacggcatcgaataccttgccgccaacattctcgtaatacacgtcaatgccgtccgggcagtgttgggccagctgctccggaaaatcgccggcccggtgatcgatacaggcgtcgaagccgagcgtctcgaccgcatgccggcatttttcagcgccaccggcgataccgatcacgcgacaacctttcagcttgccgatctgcccaaccgttgcaccgacgggcccggtggctgcggcgacgaccagtgtttcgcccgccttgggctgaccgatatcgagcaggcccatatacgccgtgaagcccggcatacccagcaccccgagagcgtgggacggatgcttcatgtcaggggcgagcttgatcaacccttggccgtcggacagcgcgtagtcctgccagccattgccactgagtacccagtcaccttgctggtaatcaggatgacgcgactcgacgacacggcaaaccgtacccccaaccatcacgtcacctatctccatgggcggcgcgtaggaggggccagcgctcatgcgaccgcgcatataaggatcaagcgaaaggtagacggtgcgtagcaacagctggccgtcgtcggggctcggtaccgggccggtttcgaggcggaagttctcgctggtcggtgcaccgtgcggtcgtgaggcgagacggatgctgcggttatttcttggttgctgtggcatgtggactcccaatgggcaagcggatcaggaagtgtaagcagtgcatggcgacggtcaggcccacaggacccgactgggcccggctctggggagctgctactcgatttctcccggcgttgccgagcggtggggcgggtcgtcggtgcgggtctcctgctcggtatggtgcatgttccggttcggcaccgaatcgttctgcggcaggcccttcaccacgcggccgtcctcggtgacgatctggccttgctgattgcggtgggtttccagcttttgctgtggagcgggattgcccattgggctaggccgcgagccggtatcttcgagcggcgtaccagcgggcgcttgggctaatgcgtgttgggctgcagcggtcaatagcgtagccgccgccagcgacctcaatagagatctattcatacggttctcctcacttgcttcgccaggttgatggggcgcaccgagtgggtatagggcatgccatggaggtcggccggatttgcttgtgtcgtagcgcaaggttgcacagctttgatgcgaccccacccaatcaaagtatgtgaacagggctggcaggctgagttcgcgcgcgtccgaccgggcggcagacatggcgctcgcaccggacgcaccgaagaaggcgcttggccatatttcgttggcattttctgaaccccgtttgccttcccgggtcagagctgagcatcacggcagagccagctgacccgaccttcgtgcgatctcagcgcagtcggaccatggatggctgctgtgtcgagtcctaccgccttcttgcccagataccgagcacatcaatggatcagatatacgccgtcgtactgtcgtacaaacgcaagggcttgctgaaacgctgcctggacggaatcaatgcccagacccggcgttgcgatgccgttatcgtggtggacaacgccagcaatgacggtaccgaggagatgctgctcgagtccggtatcgacaatctcaaggtttatgtgctgtcccataacaccggcgcctccggtggtttcagtgccggatttcgcatcgcttaccagcagggcgccgatttcgtctggatgatggatgacgacgtcatacctgagccggacgcgctggagaagctacttcaggctgacgatcaactgcgcgcgcgtcgggagccgttttcctatctcatttcgcgggcccacaccgaagatggcttgctgaccaacgtgccgcgtgtcgacgaacgtcccaacgccatcgcctacgagaactggccggcactgctcgatatcggcgtgataccggtgcgcccggcgaccttcgtctcgatcctcgtgccacgggcgtcgttacagcgccacggcttgcctctggcttccatgttcatgtggggcgacgacacggaattcaccttgcgcatcagcgaagatgtgccgggttatctggtcgctgcgagtaaggtcctgcacatgcgtcgggtcagcggcaccatcgatattcttcgcgaggtcgacccgaaccgggtcgcgctgcaccgacatctggtacgcaacgagctgttcgtcgcgcgcaggtatttccgaaagcgccgcgtgctggggctgctggggtcgcggttgtggcaagtgctgcagatgctcaagagtcgccaattcaccaaggcccgcatcgtcacgaaagggctgttggaaagtttccgttttgctcccgaaacagaaatggccgatgcgccggtggaggcgctgggagtaaccgtgcgtgaattgatcccaaagtcgccaagtgtgacctcagggattgagacgccaaccgacgccgctggtacgtcgcaggtggcgagcgaggcagcgaagccggatgatcagctgctggagcttccacgccagccgaggccgaacatgcgcatcctgatctgcggtgctggaggccaggttggccactgcctggtcaatcaagccgccagtttcgggctcgagcccattgggctcgctcatcaggacctggatatcacctcgcccgagcagattagccaggcgctcgagcgctaccagccggcattgatcatcaatgcggcggcgtataccaatctcgaccatgccgaggccgaggtcgcgcatgccgaggcggtgaaccgcgatggcgccgccaacctggggcgggccgcggagcgcttcggtatccccttgttccacttgtccagcgaatacgttttcgccggcgacggtaccgagccctatcgtgagaccgatccggccttgccaatcagcgtctacggggaaacgcggcgagcgggggaggtggccatcactgaagcgctcgatcgccacctgattctgcgtaccagctggatctatggcgaacacggcaacaatttcgtgaaaaccatgctgaacctgggccgcaaaaccgacgagatttccgtggtcagtgatcagatcggttgcccgactcgttctcgcagcgtcgcacgtgtcctgatcgaactcgcgatgcgctattgccgcgacggagacctggagtggggtatctatcattacagcggtgcagagccctgctcgtgggcagagtttgccgtcgagatcttcagcgaagccgagcgggccggcctgatcgacaaggcaccacgggtgctcccggtcgctagcggcagcctgccgcgtgcggcagcgcgtcctgcctggtccgtgctcgattgcagccgtatcgaaagcaccttcggcattcggcccaagtcctggcgcgatgagctgcgtcatgtgatcaagcagatgagcgacatgccgtcgctaccgttcgggcctgcgcacagccgtgtgccgttcaggacgtacccgcaaagcggcggcgaaggtcccagcctggcccagttcgcagtggcacagggagccggccagctctgaccacgataaaactttatcaaaatgtaacagtctgatcctctcgtcaaaaccaatggaattccgtaatgaccggtgcagctgttaaacgcgtgggtgtttcaggtacggggatgatctcccactgtttcgttcggctgatcatgcagcattaccaggacctggacatcagccgtgtgctgacccgcaggcgtgtggacaccctgggtgatttcccgctgccggatcgattgaccaattcgatcgacgagctcatcgcgcattcggacatcatcgtcgagtgcacgggcgacgtgttcttcggaaccgaggtcatcgagcgggccttcgaagccggggtgccggttgtgacggtcaatgcggagttgcaagtgacaacgggctcctacctgtccggcaagggcttgctgaccgaggcggaaggtgatcaacccggctccctcgcggcgttacgtgaagatgccttgcagatgggctttcagccgctggtctacggcaatatgaaaggctatctgaaccacaacccgagccccgaggacatggcctattgggccaagcggcagggcatcagcatcgaacagaccacatccttcaccgatggcaccaaggtgcagatcgagcaggtagtggtgggcaacggttttggcgccaccatttgccggcgcggaatggaaggtttggcctcgaccgatctcaaccgtagcggcacggtgcttggcctgatcgccgatggccttagccaacccctggtcgactatgtgttgcccgatggttattcagcaggcggcgtgtttctggtctgtcgccatgacaagaaccaggcgcccgcgatcgaatatttcaagctcggtcccggcccttattacgtgctgactcgcccgttccatctgtgttcgctggaagtcggcaagacggtgcgccgcgtgctggccggtggcggtgtgctgttgaataactcggtcgagccgacactgggtgtcgcggcgatagccaagcgcaagatgaacgccggcgagatgatcgtccggggtatcggtggtttcgacgtccgtggcgaagccgttcggctagtcgatgagctcgatcacgtgcccatcggtctgttgcgccatacggtactcagaagggccgtggagcctgggcagatgatcaccttcgacgacgtagagctccaacccagccgggtgctggacatcatttcccagcagcgtcagaagaccgtgcagcaactcgaaacacgcccgcaaccaggcggcgttttgcaacaggtgctgagctgaacaggctcggcgacgaggctgaaatctgggccgacggccacagcttcgtcgagttccagcggaccggtacggggttggtcccgtaccaccacgagtcgagttcgagcttgaccaaatccacgcagccgataccaggacgcccgctggagcaggcgtcctgcgacgagccgcaaacgatggttttcctggcgtagcaacggcaccgttcagacggactgcgactgactcgctgcggctgcatcaccgatgaccgacaggatgttgcgcgcgatacggacgaccgcgccgctgaaacccgccgcctccttctgagcgtcctgctcgttttcgaacacggcgagaacgccgccatatgaatacaccacgccccagcagccggtgtcttcgatgtccatttgcgtagtatccatgtgctttctccctgagtttgcatcaatgcgacggaaacacggcgcatagatagcatgccgtcaaaacatcgacaattgccgttcggcggccgctgtatccgctgtacgggggcaggccgtccgccgcggttcaggagaggaacgagcgtctggggaagcgacgaactgcacggctcgcacgcccggaccgttcgcaggcgagttgccgccgtgaggcggctcacaggcttccttagacggggcgccgcgcgtccgggtgtgtttcgtggcccatcggagtggtatcgggaagaggggtgtcaggctcggaaaagtccggactgtggacttccgagtccaagggcatatgaccgtaccgctgcttgtctaccacgtcctgctgccgcggttgctgctcgctctctgtcaggatccgcttggcctcgcagcgtccgctgatgccgcgtgccaatgccatgccgcccattgccaattgcagcagaccgcttatgccgccacggcgcaggcctttgcccagcagcatcaggccgccggctactgacgcggtgcgctcccagccatgcacgttctgcggggcggtcttgtcgaaaagtcggttcatggtcgtttcctcacggttcattgccagcgttgtagcttcggcagccaaccggcgggtgcgttctgggcggaggacgagcggcaatcggagcgacggtgtcacgccatgctctgattaaggcttgacactcacgcgtggctcacgcagattcctctaaacgtaatgcgattacgcaaaacaacaattgcgcgttcgagctccgagcgtgtaacgcatacagccatgaccatacctagctattcattcagccattaccacatccccgacgcctgccggtcagccagcgcatgttcgtccgaaagcctggatggccacgctgcagtggtggtcggccagagctatcgtatggatgtgaccctcagggtgtacggctgaatgaagattctcggttttcgactgacccttggcgaccatctgggtcgcagtgttcggggcatttcctgtgcgccgccgggctgacgtgtcctgacgtcatccctatcaatgcacagccagtcaaaggagccaatcatggccgacctgtttgaaaaccccatgggcctcatgggcttcgaattcatcgaatttgcctcgcccaccccgaacgtcattgaacctgtactggagagcatgggtttttcccatgttgcgaaccatcgctccaaggatgtggcgctgtatcgccagggcgaaatcaacgccgtcgtcaaccgtgagcctaagagccacgcggcctatttcgctgccgagcatggcccgtcggtgtgcggcatggccttccgtgtgaaggatgcgcatcaggcgtatgccaaagcgctggaattgggagcgcaggctgtcgacatgcccaccggtccgatggagctgcgtttgccggccatcaaaggcatcggtggcgcgccgctgtatctgatcgaccgtttcggtgagggcagctcgatatacgatatcgacttcgtcttcctggacggcgtcgatcgccatccggtcggcgcgggcctgaagatcatcgatcacctgacccacaacgtgtatcgcggtcgcatggcctactgggccgacttctacgagaagctgttcaacttccgcgagatccgctacttcgacatcaagggcgaatacaccggcctgacctccaaggcgatgaccgcaccggacggtatgatccgcatcccgctgaacgaggagtccagcaagggggcagggcagatcgaagagttcctgatgcagttcaatggcgagggcatccagcacgtcgccttcctgaccgacaacctgatcgagacctgggataagctcaaggccagcggcacggtattcatgaccgcaccgccggaaacctactacgagatgctcgaaggccgcctgcccaatcatggcgagcccgtcgaggaattgaagtcgcgtggcattctgctcgacggcgcatcggagaatggcgagcagcgcctgctgctgcagatcttctcgggtaccttgcttggtccggtgttcttcgagttcatccagcgcaagggcgacagcggcttcggcgagggcaacttcaaggccttgttcgagtccatcgagcgcgatcagatcaagcgcggggtcttgagcacggctgactgatagcgcggacggcagccaggccaccttcggctgccgtccttcgtgctcgattggcgcatgcttcagcggtgtgcgctgagaccggtgggctccggcaacgcctgggcagtcggctttcaggcggtgccgagccttgcaccgtgacgcttcggcatgacgtcgtgtaccacgcaggccaacagccgctccgatcgagaagctggcttggcattccttatcgcaatcccttttatcctctcgcttgggcttggcgcgctcagttgccgcgcacgcccgcgccttgcaaaaagaactgctcgatgatgccggccgaactggcgctcgccgcgcggccacggcgttcggcatcgacgatgccgtaaatcagggaaagaaacagctcggtaagcaccggtgcgcccacctcgatgcgaaaaagaccggcgcgttgacctctcaggaagaaggcatccaatgcgctgtcgtacggaatccatttcgccccctcgttagccggatcgagcgaatcagggcggtactggaacatcaggaacatgagcagttctcggtgtgccaggtgttcctgaatgagtcgtttcagcgccgtgagcggctctgcattgtcgagatcggtacgctggatgacctggttcaacacggtcaggccatgcgccatcagcatttcgacgagattgtcacgggtgccgcaaagccggtgcaacgtcgctttgctgataccggccgcttccgcgagctccttcagcgtcgctcgcgggcggtctacgaatgcgacggccaacgccttgagcaggcgatcgtcgggaaggggctgcgtcatcagttctgactccattattcaggctcgccgtattgtccagataaagactcaaatgacaactcaatagccggttgaagttaattatttccaatatgagacaaagttgactcataagcttctttatcggatcatgcgtgtccggtgcatcgcggccacaggcggccggtagcacgaacgattcgcggctcaagctcgatgtggctcagccggacgaggtagatatgaacccactaatcaaccgctggctgttgctcgccgccgtgctgctggcattcaccccgctcatgattgacgtgaccatcctgcacatcgccattccaacgctgacgcttgatctgcgcgcttcgggaacggaggtcttgtggattgtcgacatctatccgctgatcatggccgggctgctggtccccatggggtttctgaccgatcgaatcggtacacagcgaaccttgctgctgggcatgacaatcttctcgctggcctcgatcggggcagccttctcttcgacggcggccgtgctcatcgccgcacgcgcagcgcttgctctgggctcggcgatgatgatgccggccattcttgccgtggttcgtcgaacgttcgacgatgagcgcgagagaggtattgcgctgggcctctggggtaccgtcgcggcggccggagcggctgtggggccgctggtgggcgggctgctgctggagcatttctggtgggggtcggtattcctgatcaacgtaccgatcatgctagcggtcacgccgttggtgtacgcactggtcccgaatgagggctcggactcccatgcaccttggcctatcgggcaagcgctggtgctgatcgccgggctgatgctctcggtcttcgcgatcaagtcgctgttcaaaccggatcaatccgctctgatcgccggcgcgctgctgggtgtcgggattggcctgttgtccatattcggccgttttcagcttcgctcgccgcatccgatgctggacctttcgctgttcaagcgaggccaggtacgggccgggctcgccatggccctggtcgcgtccggtgccctggcaggagtcgagctgacgatcgcccaggaaatgcaattcgtgatcggcaaaacgccgctcgaggctggcttgtttctcttgccgctgatggcagccgctgctgtgggcggacctatagccggatggattgcgggccgcgtagggctgcgctggctggcgacggcatcgcttgctgcgtccgcggcgagtctaggcggtctggcggtgagcgatttccatgcggcgggcgctgttgtgatctgtctgcttgcaacgctcggtctggcgctctccgtagggcttacggcctcgtccatcgcaatcatgtccgccattaccccggaaaaggccggctcggccggttcgctggaggcgacggcctacgatctgggatccggactcggcatcactggattcggcgtgctgctcgcaaccgcgtatgccaaggcgctggcgacgcctgagaacctcgcgccggcgatcgccgctcaggctcggctttccatcggcgaaaccatgatagtggcctccggtttgccggggcagcagagcaacgcgttgctcgagtccgggcgcgcggcgttctcgctcgcgcataccggggtactgagcacggcggcggcaatgctggccgcgttggcgatagtcctctgcgtttcgttgcgagaccaacgctcggtccgttccgatgatccagccatcgaggcggacggctgatcgcggtttcgccagcatgacgtgcttcgaatcgttatcgcccatggcgatagcgacgaccagtcatgccttgatcactccaagggcgcgctgatcttggaacgttgacaagttggcgacaagatacgtctaataatacgaattactatcatttttatagtgcttcgccaggtcaagggtgaatgtgtcctgccgtagtcgcgacggggagatacagcttttgagcccatgtctggccgaagccaagggagctgcaaagttgaatcaaaacccatccgtgaaccgctggcgcgtcctttcgcgcgtgctggcagcggggctcggcggttatgccgtggcgtacgccgtgaccgcctttctcgccgtctatctgcctctggcacgtcctgaacgggtggtgttctccagcctgggcagcttcgccgtctggattgcggttgttgtatatgtgttcgcggcacgcagcgccttgcgtgtctggctttcgctgatcggcctgaccgcggtgctgtgtctcgccgcctttctttccggcgacttgaggacacggccatgacgctgcgccaaagcatggcggggttgcacacctggggcgggctgctgcccagttggttgctcttcgtgatcatcttcgcaggcaccctggcctgcttcgacaaggagctgacacgctggatgcgcccagcgttgcaccaggacgttgcaacgcatatcggtgcggatgacgtgcgaggctgggtgcagcagaacgtccatgaaaagcttcatgcgttctggatgcacggccctaccgaacgggagccctactggcggcttggctgggaagtggatggaactgacaccttccataacgtcagtttcgatccccgtagcgcgcgggctgtgccgatgccggaaacggtcggcggtgagttcttcttcaagctgcactacaacctgcacgccggtgacattggcatgtacatcgtcggcctggccggtatgttcatgctggttgcgctggtgtccggcgtgattatccaccggcgaatcttcaaggacttctttaccctccggcccaaggccaacgggcaacgtgcctggctcgacgcgcacaacctgttcggtgtcgtgggctttccgtttcacctggtgctggcctatacgggcgtggccatcttcgtcgcgtcctacatgccggccgcggttcaggtgagctattccgataacgtcatgcagtacttcagtgaggtgatgggcagctttgagcgggaggaggtgaacctgccgccggcagctcccgtgtcgctcgatgcgctggttctcgaatcacaacggcagtggggcacaagcgatgtcggctggatcagcgtgcaccaccctgatgacgcttcggcggtcgtggatatccgacgccgggacggctcacgcataggctcgccacaggacacgctgacctatgacgccgccagcggtgagctgctcaatcgccaggacgcttccacgggctaccgtgcctacctctggatgaccgggctgcatatggggcaattcggcggcacgctggtgcgcctgttgtatctgctgatgggcctgtgcggttgcgccatgctggttggcgggctgcaagtctggctggccaagcgcgagcagcggagcgagcggcgtctggtctgggtgcgcgcgctgaacgccgcggtattcgccggcctgccgttggccagcctggcgcttctgtggggcaatcgactgatccctgcgacccttcccgagcgtgcggtggccgaaggctgggtgttcgtcgttgcctggctgttgatcgcattgtgggcggtactgcggcgcgagcaaagccggcgcctgttgcgcggccagctattgctcggtgcggtgctcgcgctgggactgccgctgctcaacgggctgacatccgacggtcatctggcggccagcttggcgcggggcgactgggcattggcctcggtagatctctttctgacggccgtcggtctggtctgcgccctgtgcgcctggcgtctgcgaggcgcatcggaaggtctcaccgtcaatcgtcgactcccccggactcaagagatatgagcatgtcgttactggctttcgccctgagctatctgggcatgctgctgctatgtctaactatgaatcgccaccgtgcggcgctgctgcgtggcgacctgcgattgcccaccacgccagtcatgcgcttgctggccatgggctgtttcggtttcgccgggtggctgtgcatcggtagccagggtgccgagatcggtacggtggtctggttatgcctgacgatgctggccggtgtgctgctggcgttgctgcaagcctggcaggcacgctgggcggtaccgttggcaccgctgctgacgctcgggggcgcgttgcagacggtcttctgagggtttcggtgtgcagtggcgcgcgtgcgcttgcacaccggctcgtctgtcgtagcgacaggtctcgttgtcctgatgcgttaccgaggtgcggttgtacctggcgagtgcgcggcggggaatgggcgaagcgtggtgcgatatgcggttcgcaccaatcgggctcggacggctctaacctcaagcggtcttttaatgctgcggaggtgagtgatgagtatcgatccgctcgatcggccacacgatcagcaacccgtaccggggcagcagcagaaccctgcgcatacccccgacttcattaccgataacccggacgttcagcccgagcccggcaacaccggtcgctcgtctgatcgaaacaccaatgtgcccgcgcccgagacaccggtaccgccagccaggcaaagtggcgaacaggagcagtagcgggccagcaaaggctaccgtcgctccgcgaccttggctgaaggccgtcctaacgagagcgcctgaagcagcggcactgggcaattagccctccatctctcgttgtcgaatgggatgcgctagccgcgcgcctgtcccatccacccgcacggcacgcttttgctaccggaagcagcgattctcgagcaaagcggccgccagtgatcaggcctttttcattgaccagtaggtgggtctgaacaggtcccgctcgccgagcagcagcacacctgccgcaaaagcgcagagcaccagcgcgatatacaggcacaactggagcagcccgtgcggcgcaggcaaccaatgcaggacaatggcgatagccgccgcggtggcaatccagcgcgccaggacgcccggagccagcccggtgggtgatgcacggtagacatacagtcccatgaacaacgcctgcaccgtcgccccgcaggagaaggcaaacgccaggccttcggcgccgtatggcccgtagagcagcgcgtcgaggccgatggtcagcgcggagctgatcagcgtaatcaccagaaacaagcgtgactgatgctgggcgaggagggcgcgcccccaaagtagcgccagccccattgcaggaagacccagggcatacaggatcaccagcgaggccgtggcgtcggtttgcggtgcgccgaattgaccgcgctccagcagtaccgataccaccgtttgtggaaacgagcagagcaccactgccgccgggaccaggaacagcagggtcgccaacaggcctttgcggatcacgctcgcatgctctgtgaggtcgttgtcgctccagctggacacgaagcgtgggaaaagcaccgaaagcaccgacagcgcgtagagcgtgagcggaatggtgacgatgcgaaacgcgaacgacagcatggtgatgctgccttcatcgaggaaggaggcgaacatgcgttcggcaaggatgcagccctgctgcgccccggcggccagcaggaccggcgcgaacgcgaggccgaagccgcccgcgtgccccgtcgtctcgacggccttggcgccgccgcgcagataggcgatgcgtcggtgctgcaccagaatcagtgccagttggggaagcagcatgccgatgaagatcaccatgccggtgggttggaacaacaggatcccgacgatcgccccggcgttgagcagcacggtgcgcgtcatcggcaggatgaatacctcatccatgttgagcagcgcaccctggcaatacagcacagcctgaaccgcgataagcgctgcgccgacgcagaacaccatctggccggaggcgacctgagcgtcagtccagccgggcgccagcaggttgagaatccagtagctgccgacgacggcgatggcgctgaccgccacacccatgagcatcactcgccagtagagccagcggctgacggcctcgaacagggcttcggattggctgcgcaacttttgcaggtacgggatcatcgcatcgcgcagggcgaggccgaggaagttctcgaagaacatcggcaggatcagggcgacgaaaataaggtccgcttcccagctcaggccgaaggccttggcgatgaacaggtcgcgtaggaaaccgaggagaaagctggcgacagtcagtgccagaataaccagtgatgcgttcattccttgatcctgtgcaggccattatcgggtgacctggtaaatagcggcatgtcggccagatgcgatggctcgacggggcagttccggcggctcacggtcgtcagcgacccgcggaacgatacatagactgaaaggctcaagcatggttcctgagcccttgatcgcgggttcctcgacccgttttgaccaggacaattccggatacgtaaaaatgccgtaaatcctctttgcgagcggagcgtgactgcttatggttcacgctcattttcaggcgaacccgttcatgtccgaggcaaacacttcttctgccggctccgtgtggcgctggctgatcatcggcggtgtgatcatcgcgatcgtgctgttgctctggtggctgtggccgaccgccgccgaaaagccgcagcaacagcctggcgggcgtccggctttcggtgcgttcggtggcccgacaccggtgcgggtcgccgtggtcgagcagggccgattcgaggtgtatgccaaggcgctgggtaccgttacgccgctcaacaccgtaaacgtgcgcagccgtgtggccggagagttggtcgacgtacgcttcgaggaaggccagcgtgtgcaagccggcgacttgctcgccgtgatcgacccgcgcccctatgaagtggcgctgcagcaagcagaaggtacgctcaagcagaaccgcgcactgctggagaacgcgcaggtcgatctcaagcgttatcggggattgtttgccgatgacagcattgccaagcagaccctagacacgcagcaggccctggttaatcaatatcagggaaccctcgccgcgaaccaggccgcggtcaacgaggccaagctgaacctgcaattcacccagattcgcgcaccgatcgatggtcgcgtgggcctgcgccagttggacaagggcaatctggtcgcggccaatgacaccacaccactggtcgtcatcacccaaacccagccgatggcaatcgcctttaccctgcctgaaagcgaactgccgccggtcatctcgcgttttcgccgcggcgacgaactggcggtacaggcctgggaccgtggcgagcgggtgcttttcggcgaaggcgtgctggaaagcgtcgacaacctgatcgataccaccaccggtacgctgaaaatgaaggcccgcttcgacaacgaggcggagctgctgatacccaaccagttcgtcaacattcgcctgcgcgtcgaaaccctggacgacgcgattctgattccgtcggcggcgctgcaattcggctcgcgtggcaactacgcctacgtcgtcggcgaggattcgaaggtccagctgcgcgtgctcgaagtgggcccgagcaatggcgataagacggtgatcaccaaaggcctgagcgtcggcgagcggatcgtaatggaaggtaccgatcgcctgcgtgacggcagcgaagtcgaagtggtggaccggcagacacttgccgaggaagcggcagcgaatccgaagatcgatacccagagcgccaaggagcgtccggcgcgatgaacatgtcgcggctgttcattctgcgaccggtggccaccaccttgacgatgatcgcgatcctgctggctggcctgattgcctatcgcatgctgccggtttcggcgttgccgcaggtggattacccgaccattcgggtcatgacgctgtatccgggggccagccctgaggtgatgaccagcgctgtgaccgcgccgctggagcgccagttcgggcagatgcccgggctgactcagatgtcctcgaccagctccggcggcgcctcggtgatcaccctgcgtttctcgctcgaggtcgagctggacgtggccgaacaggaagttcaggcggccatcaacgccggcagcaatctgctgccgaacgacctgccggcgccgccggtgtacaacaaggtcaacccagcggacacgccggtgatgacgctggcgatcacttcggaaagcctggcgctgccgcaactccacgatctggtcgatacgcgcatggcgcagaaactggcgcagatcagcggcgtgggcatggtcagcatcgccggtggccagcgtcccgcggtacgcattcgagtcaacccggaggcgctcgcgtcctacggcttgtcgctcgccgatgtgcgcaccttggtgaccagctccaacgtcaaccagcccaaaggcaatttcgacggcccgacgcgcgtgtcgatgctcgacgccaacgatcagctgaaaacgccggaggaatacgccaatctcatactggcttatgaggatggggcgacattgcgcctgaaggatgtcgcccacatcatcgatggcgccgagaacgagcgcctcgccgcctgggccaatcaaagccaggccgtgctactgaacatccagcgtcagccgggcgccaacgtgatcgaggtagtcgagcgcatcaaggcgctactgcccgaggtcaccgccagcatgccgaccggtctcgatgtggtggtgctcaccgatcgcacgcagaccatccgcgccgccatcaccgacgtgcagcacgaactgctgatggccacctttctcgtcgtgatggtcactttcgtatttctcaagcgcctgtcggcgacgatcatcccctccattgcggtgccgttgtcgcttatcggcaccttcgcggtgatgcatctggccggcttttcgctgaacaacctgacgctgatggccttgaccattgccaccggtttcgtggtcgacgatgccatcgtcatgctggaaaacatcgcccgtcacgtggaggagggcgagacgccgctgcaggcggcgctcaagggcgccaagcagatcggcttcacgctgatctcgctgacgttgtcgctgatcgccgtgctgattccgctactgttcatgcaggacgtggtggggcgtctgttccgcgagttcgcgattaccttggccgtcgccatcctgatctcgctggtggtgtcgctgacgctgacgccgatgatgtgcgccaagttgctcaagcccgccaccacggaaaaatcccagccggactgggtcgagcgcctcattggcggttattcgcgctggctgacctgggtgttgggacaccagacgctgaccctgctggtcgccgtggtgaccctgggactgacggtcgtgctgtacctggccgtgccgaaaggtttcttccctgtgcaggacaccggggtgatccagggcatcagtgaagcgcctcaggcaatctcgttccgggcgatgagcgaacggcagcaatcgctgtcccgtgtgattctcgctgatccggcggtggccagtctgtcgtcctatatcggggtcgatggcgacaatgtgaccctcaacagtggccgcctgctgatcaacctcaagccccatgccgagcgtgacgtcaccgcgagccagatcatcgaccggttgcggccggaactggcgaaactgccgggtatcgagctgtacatgcaacctgtgcaggacctgtcgatcgaggatcgggtcagtcgcacgcagttccagttcagcctcgaatccccggatggcgagctgctacaggaatggacgccacggctggtggcggctctgcgcgagcgtcctgaattgaccgatgttgccagcgacctgcaaagcgatggcctgcagatctatctggatatcgaccgcgatgccgcggcgcgattgggtatcgggatctccgccatcaccgatgcgctctatgacgcatttggtcagcgccagatctcgaccatcttcacccaggccagccagtaccgcgtggtgctggaggcggaagcgggcaaccgtattggcccgcaggcgctggaacagctgttcgtacagagcgagggcggcaccccggtgcggctgtcgagcctggcaacgctggagcaacgcagcgcgccattgctgatcaatcacatcggccagttcccggccgtgacgctgtcattcaacctggccgacggtgtgtcgctgggtaaagcggtggaagtgatcgaaggagtcgaagccgagatcggcttgccggccggcatccagagccgtttccagggcgccgccgaggcatttcgcgcgtcgctgtcgagcaccctgctgttgattctggccgctgtggtgaccatgtacatcgtgctcggcgtgctctacgagagttacatccacccgatcaccattctgtcgacgctgccttcggcggcggtcggcgccttgctcgcgctattgctgaccggtaacgatctggggctgatcgccatcatcggcatcattctgctgatcggcatcgtcaagaagaacgcgatcatgatgatcgacttcgccctcgaggccgagcgccatcagggcatgagcccgcgtgatgcgatctaccgggcggcattgctgcgcttccggccgattctgatgacgaccctggccgcactcttcggcgcggtcccgctgatgctggcgaccggctcgggtgccgagctgcgccagccgctggggctggtgttggtcggagggctgctggtcagccagttgctgacgctgttcaccacgccggtgatctatctgttcttcgatcggttggggcaccggtttggtcgacgggacggtgccggacaggaagcgcgtacatgaccgcttcgaaaaggcgctcgaggctggaggctgaacgaacagccggagccctccgtcgtggatgtcatcgtcctgccctcagccttcagcctccagcggcttttcggccatgaacctctccgcacctttcatcgcgcgcccggtcgcgaccatgctgctgagcctggcgatcctgctactgggtggggtcagcttcggcttgttgccggtatcgccgctgccgaacatggattttccggtgatcacggtgcaggccagcctgccgggggcgagtccagaaatcatggcgtccagcgtggcgacgccgctggagcgctcgctgggcagcattgccggcgtcagccagatgagcagtcgcagcagtcagggttcgacacggatcgtcatccagttcgatctcgagcgtgatatcaacggcgccgcaagaaatgtgcaggcggcgatcaatgcctcgcgcaacctgctgccaagcggtatgcgcagcatgccgacctatcgcaagatcaatccggcccaggcaccgatcatggtcttgtcgctgacctccgaggtgctgaacaaggggcagctctacgacatcgggtcgaccatcctggcgcagaagctttcccaggtgccgggtgtcggcgaggtgcaggtcggcggcagttcgctgccggcggtgcgcgtcgagctgcagccgcagcagctggaacagtacggcgtgtccctcgacgaagtgcgtcagaccatcgcctcggccaacgtgcgtcgtcccaaaggcatggtcgaagacgatgaccgccactggcaggtacaggccaacgaccagctgcacgaagcggccgactatctgccgctgatcatccgctatcaggacggtgcggcattgcgtctgagcgacgtggccaaggtccgcgatggcgtcgaggatcgttacaacgatggcttcttcaacaatgaccgtgccgtactgctggtgatcaatcgccaggcgggcgccaacatcatcgaaaccatcgagggcattcgcaacgagctgcccgcgctgcgggcgatcgtgcccggcagcgtcaacatggcggtggcgatggaccgctcgccggtcatccgcgcaacgctgcacgaggccgagcggaccttgctgatcgcggtgggtctggtcatcgtgctggtgtttctgttcctggggcgggtgcgcaccgcgctgattccggcgctggcggtgccggtatcgctggtcggcaccttcgccgtgatgtacctgttcggcttctcgctcaacgtactgtcgctgatggccctgatcctggccgcgggcctggtggtggacgatgccatcgtggtgctggaaaacatcgcacggcatatcgacgaaggcgtcccgccgatgcgtgcggcctacatcggcacgcgcgaagtgggcttcacgctgttgtcaatgaacctctcgctggtggtggtattcgtctcgatcctcttcatgggcgggctcgtcgagcggctgttccgtgagttctcaatcaccttggcagccgccatcctggtctcgctgctggtctcgctgacgctgactcccatgctttgcgcccgctggctcaagccccaccagcccgagcacgagggccgcctgcatcgttggagccacgacgctcaccaatggctgttgcggcattacaaccgctcccttggctgggcgttacgtcatcaccgcatcacgcttttcaccttactggcgaccatcgggctcaacgttttcctgtatatccaggttccgaaaaccttccttccgcagcaggataccggccagttgatcggctttatccgcggcgacgacgggttgtcgttccaggtcatgcagccgaagatggagaccttccgcaaggcggtgctggctgacccgggtgtggaaagcgtggcgggtttcatcggcgggcagggcggcatcaacaacgcgttcatgattgtccggctcaagccgctggatgaacgcaggatttccgcgcagaaggtgatccaacggattcgcaagaaccagccgaaggtgcctggcggacgcatgttcctcatggccgatcaggatctgcagttcggtggcgggcggcagagcagttcggcctattcctacagcctgctggccagcgacctggacgatctgcgcacctgggtgccgcaggtcactcgagcgctgaaggcgttgccggagctcaccagcatcgatgccaatgaaggcgagggcgcgcaacagatcagcctgaagatcgatcgcgacgcagccaagcggctcggtatcgacatgagcacggtcaccaccttgctcaacaacgccttcagccagcggcagatttccaccatctacgaatcgctcaaccagtatcaggtggtgatggagatcgacccacgttacgcccagcatcccgaggtgctggagcagattcaggtgattaccaacgatggtcggcgtgtgccgctggccgccttcgcccgctacgaacgcagcctggaggaggaccgggtcagccacgacgggcagttcgccgccgagagtattgatttcgatctggctcccggtgtcagcctcgatcaggcgacacgggcgatcgaacgagcggttgccgccatcggtatgccgagcgaagtccaggggcgcctgggtggtaccggagacgtcttcaagtccacccaggaaagccagcccttgatgatcctgggggccttgctgctggtgtatatcgtgctcggcgttctctacgaaagttacatccacccgctgacgatcttgtccacgctgccttcggccggcgtgggcgcgctattggcaatcatcctgatgcgagaggagttcagcctcatttcgctgcttggattgttcctgctgatcggcgtggtgaaaaagaacgcgattctgatgatcgatctggctttgcagttcgaacgtaacgatggcctttccccggccgagtcgatccgccgggcctgcctgctgcgtttccgtccgatactgatgaccaccatggcggccattctcggcgcgctgcccctgctgttgggaggcgccgagggtgccgagatgcgtcaaccgctcggtctgaccatcatcggcggtttgctgctcagccagatgctcacgctttacacgacgcccgtggtctacctgtacctggaccgggcgcgtcatcgtttcaaccgttggcgcggtgtgcgtaccgacgctgcattggaaaatccgttatgagttcgttgtgcttgaaacagccgttgcgcccgctggccttgctgattgctgctgtttcgctgggcgcctgcaccctcggccccgactatcagcgcccggaactgcctgtccccaatgaatacaagcaggccgaaggttggaagaccgcgacaccggccgatgtcttgcagcgtggcaactggtggatgctctacggcgatgccgagctgaatgcgctagtcgcgcggctgaatgtctccaaccagaacctggccgcggacgaggcgcagtaccgacaggcgcgtgcattggttcgcggggcgcgctcgcagttgttcccgacgcttggggcaagtgcgggtgcaacccgtgccggccaaggcggttcggccagttcgacgacgcagagtagcaccggcatcagcggagtcagtgaaagttacagcctgggactcgatgcgtcctgggagctggatatttggggccgactgcggcgcaatctggaagccaatcgagccgacatgcaggcgagcgcggcggacctggccgcggttcgcttgagcctgcaatccgaactggtgcagacctacctgcagctacgcgtgatggatgagcaacagcggctgctcgatcagacggtcgcggcgtacgcgcgctcgctgcgtctgacggacaaccagtaccaggccggcatcgtgccgaaatcggatgtcagccaggcgcgggcgcaactgaaaagcacccaggcgcaggccatcgacctgcgctggcagcgcgcgcagatggaacacgccattgccgtgctgatcggtgtgccgccctcggaactgaacatcgccgaggttcgcgatattccacgcttgcccgacgtgcccctggcgttgccgtcgcagctgctggaacggcgcccggatatcgcctcggccgagcgtcaggtgatggccgccaacgcgcagattggtgtggccgaagcggcctggtatccggatctgaccctgagcgccagcggtggttatcgaaacagcagtttcagcaacctgatcagtttgcccaatcgcttctggtcgctgggcccgcaactggcagtgacgctgctggatttcggaggtcgccgtgccgacctcgaagctgcggaggccagctatgaccagaccgtggccacctatcggcagacggtgctcgacagtttccgcgaagtcgaggacaacctcgtgcagctgcgtgttctggctgaagaagcagtggtacaacgcgaagcactggaggcggcgcaggagtcgctacggttgatcgaaaaccagtatcgcgccgggacggtcgacttcctcagcgtggtgacggtgcaaaccactgcgttgaacaatgagcgaaccaacctgacgttgctgggcgatcggctgaccgccagcgtccagctgatcgccgcgctgggtggaggctggaacgtccagcagctggataccgagccgcctcggcaataagcggggcaaaaaaaaccaggccgaggcctggtttttttgctgcgctcgctcagtgacgctgcttgcgattcaccgtctgcgccgccttgatgatgtcggcaccgatgaccggctcgaactctttccacaccggccgcatggcctcccgccaggcttcacgctgctcggacgtgagctcgatgatctccgaggtgcccgccttgcggatgcgctcgcgatcggcctggttggcttcctcggcggcgcggttcacctcgtaggtgacttcctcgatgataccctctagctcggtgcgaatgcggtgcgggattccgaaccagaagcgcgtgttgctgaccagcatatagtcgagcacgccgtgattggtttcggtgatgtagggctgaacggtatgcatcttcttgctgtagatgttcgaccaggggttttcggcgccctgcaccgtaccgttctgcagcgccccgaaggcttcgccgaacgggatcttcttggtcgaggcgcccaactgggcgaattgcgattccagcacgccggagggttggatgcggaaggccagaccggccgcatcgcttggcatgcgcaacggcttggtggctgacagctgcttcataccgttgtgccaataggccagcccggtgatattttcctgctccatcgaacgcagcaactggcggcccttggcccgtttctgaaagcgattgacggcctccaggtcgtcgaacaggaagggcagatcgaagacctgtacctgcttggtgtatttctcgaacttggccaacgaaggtgcgagcaattgcacttcgttgttgttcagcgcgtcaagctcgttgttgtcgccgaacagggtggagttgggatagacctcgacggttacctggccaggcagacgctcctccaccaggcgcttgaacaatagggcgcccttgcccttgggcgtgtcttcggcgacgacgtgggagaacttgatgacgatcggctcggcctcgacggcagtggccgtcagcgccagcagcagaccgacaaaggtgatgatcggcttgaacattgagaggctctttatttttggtggttggcattaggcccgttatggaccgcttagagctgcaacgggacgttatgccaaataagccgaaccacctaaagccttgtctcgcaaatttcatgatcgggtggaaaagaacgggcatacatcacattttgcccgcttgcgaggcgtcaccgcgtggcgcggcgacgccgtactcctcacgttagcggctggccagctgccaaccgccgccaagcgccttgtacaccgaaacgatgccgcggtagagatcgacctcggccacggcctgggcatcttcagcggcgaggcgttcccgctcggcatccagcagcaccaggaaatccacggttccttcccggtagcgaatttgcgcctgctgtgcggcggcgcgactggcttcggactgacgcaacagtgaaagcagccgttcctgggcgcgggcgtaatcgctgaaggcgttctccgactcttccagcgccaacaatacctgttgttcgtagctggccagcgcgccatcggcatccgcttcggcaccgcgcagtcgggcccggacgctgcccatatcgaacgccgcccagctgatgctcggcgctacgccccaggcctgcgcggcgctcgaaccgatctgcgagccccggccggcgatgaagccgaggaagcccgacaggctgacccgagggaacaggtccgccgtcgccaccccgacattggcggtggcggccgccagctgccgttcggcggcacgaatgtccgggcggcgacgcagcagttcaccgggatcaccaatcggcaatgccttggctatcgccggcaactcgcgaggcgaaagatcgacgctgagctgatccggacgctggccaaggagggtagcgatgcgattgcgcgcacgggtctgtgtcgcctgcagctgcggcagactggcttcggtggaagccaggcgggcatcggcacgcaacacgtccagctcgctgcccatgccggcgtcgcgcagctgtaccgtcagttggtgcgactcgcgctgattgtcgaggttctcccgggcgatacgttcacgcagctgcgcgccacgcagttggccgtaggcatccaccagttcggcgatcaggctgacctgcagctgatagagctcggcttcagcggcctcgctctgtgcctcgctggactcgattcggcgttgaatacgaccgaacagatccagctcccaagccatgtccaggcccagatcgtagcgctcggtgctgctgcgctcgtcgctgaagcctggctgctgcgccttgccgtactcggccgtggcaccggcagtcacggtcggaaaacggtcgttggccgcgtcgtcgcggatcgaccgtgctgcacgcagcctggcgaaggcgatgcgcaactcgcggttttccgacaaggcctcgccgaccagcgcatcgagtgtcgagtcgtcgaactggcgccaccaggccgactcgaagcgcgagcggtcgaagccctcggcggtggcccgctcgatcttcgctggcgccgtttccggcgctcggtaatccgggccgacggcgcaggcgctcaacgtgatgatcgcggcaagcaacaacggagcagtaatgacagccttcatgcatgggcctccttgagcacagcctttttctcctctcgcttttcgacgaacgcgcgaatcaccaggtagaacaccggggtcagcagcagaccgaagaaggtcacgccgagcatcccgctgaacaccgcgacacccatggcatggcgcatctcggcgcctgcgccggaggacagcaccagcggcactacgcccatgatgaaggcgaagctggtcatcaggattggccgcaaccgcaaccggcaggcctccagcacggcggccaggcgagtcatgccttcctcctgtttgtccttggcgaactcgacgatcaggatcgcgttcttgcacgccaagccgaccagtacgatcaggccgatctgggtgaacacgttgttgtcgccaccggagagaatcaccccggtaatcgccgagagcagcgtcatcggcacgatcagaatcaccgccagcggcaggctccagctctcgtactgcgcggccagcaccaggaatgccagcagcacgcagagcgggaagacgaacacggccgtgttcccggcgaggatctgctgataggtcagctcggtccattcgtagctcatgccgttgggcagctcggccttcagcaaacgctccatcgcggcttccgcctggccggagctgtagcccggtgccgcggcgccgttgatttcagcagtcagaaagccgttgtagtgcatcacccgatcgggaccggcgctgtcgctgaccttgacgaaggtagacagcggaaccatctcgccccggttgttgcgcaccttcagctggccgatctgttccggtgaaaggcgaaacttctgctcggcctgcacgttgacctgataggtgcggccgaagcggttgaagtcgttggcatacagcgagccgaggtagacctgcatggtgtcgaagatctcatcgatcgccaccccatgggtcttggccttttcccggtcgatgtcggcgtccacctgcggcacgttgacctgatagctggtgaacagcccggcgagctccggatagtcggcgctcttggcgagtacgttctgcacctgcttgtagagttcttcgtaaccgaggttgccacggtcctgcacctggacgcggaagccaccgatggtccccaacccttggacgggaggcggcgggaagatcgcgaggtaagcttcctggatgcccgcgaactggccgttcaggtcaccggcgatggccccagccgacatgttcgcgccttggcgctcgtcgaagtccttcagggtgacgaagacaatgccgctgttcgggctgttggtgaagccattgatcgacaggcccgggaaggccacggtattcgccacgccaggatgcttgccggcgatttccgacatctttttgatcacgtcctcggtgcggtccagggtggcggcgtcgggcagctgggcaaaagccaccaggtattgcttgtcctgcggcggcacgaatccggtcggggtgttggcaaagcccatgtaaccgagggcgaccagcccgacgtagaccaccaatgcaatgccgctgccacgcaggatacgtcttaccgcgccgacgtagccgtgactggcacgctcgaaaactcggttgaacggaccgaacagccagccgccgaacagcttgtcgagcagacgcgaaaaaccgtccttgggtgcgtcgtggctgcgcagcaggaccgcggccaatgccggcgacagggtcagcgagttgaatgccgagatcaccgtggagatagcaatggtcaatgcgaactgttggtaaaactggcccgtgagaccggaaatgaacgcggtggggatgaacaccgcgcagagcacgagtgccgtggcgatgatcggcccggtgacttccttcatggcctgcttggtcgcttcgaccggtgtcttgccgaggccgatgttgcgctcgacgttttccaccacgacgatggcgtcgtcgaccacgatgccgatcgccagcaccagcccgaacagcgacagcgcattgagcgagaagccgagcatgtgcatcacggcgaaggtgccgatcagcgacaccggcacggccgccagcgggatgatcgaggcgcgccaggtctgcaggaacaggatcaccaccagcaccaccagcaccagggcttcgagcagggtgtgcaccaccgcctcgatggagccgcgcacgaagatggtggggtcgtagacgatttcgtagtccacgccttccgggaaatccttcttcaattcagccatgcgtgcgcgcaccgcgtcggaaatcgcgatggcgttggagcccggacgctggaataccggaatggccactgcgggctggttgttcagcagcgagcgcaaggcgtattggctggaccccagttcgacgcgggcgatgtcgcgcaagcgagtgatagagccgtcttcgccggcgcgaatgatgatgttctcgaactcttcctcggtaaccaaacggccctgggtattgatcgaaagttggaagtccgtcgctccgggcgcgggcggcgcgcccaacgagccggcggcgacctggcggttctgctcgcggatggcgttgaccacgtcggaagcggtgaggttacgcgaggcgaccttgttcgggtcgagccagacacgcagcgaatagttgcccatgccgaacagctgcacatcaccgataccgtccagccgcgccagctcatccttgacgttgagcgccgcgtagttggacagatagagcatgtcgtagcgctcatccggcgaggtgaggtgcacgaccatggtgaggtccggcgaggccttgtccaccgtcacaccgaggcgctgcacctcggtgggcagggtcggcatggtgcgggtgacgcggttctgcacctggacctgggcattgtccagctccgtgcctagggcgaaggtgatggtcagggtcagcttgccgtcggcggtcgcctgggacgacatgtaaagtatgccttcgacaccggtaatggcttgctccaagggcgaggcgaccgtttcaccgattaccttggggtttgcgccggggaagttggcacgcaccaccacggtaggcgggacgacttcggggtattcgctgatcggcagttggaacagcgagatggcgccgccgatcaggatgatcagcgacagcaccgcggcgaagattggccgctgaatgaagaactgggaaaaattcatgacgcactccgggggagagggcgcgcatgacgcgccctgacggaatcggttgttctagaggtgcgccgaggcgcacggacgttgcggggctgcgcaggcgtcagctgctcgggcggcgcgccacgttgtgctcgacgacttcggtcttgaatgccgccgtgatcgcacggttctgctcacgcaacgtggccagggtgtcggcgtcggccatcggcacgttttgcggcgcgactgttgcgcctgggcgaacgcgctgcaggccgttgacgacaatggtttcaccttgatcgagaccgttacgcacgatgcgcaggccttcgagcttgggccccagctcgacggagcggtaactgaccttgccgtcatcgcccaacaccagcacgaacttcttgccgagatcggttcccaccgcgacgtccttgatcagtaccgcctcgtaggtggcgctgccgaccagcttcagccgcgcatagagccccggtgtgaagctgccgtcacggttgtcgaacacggcgcggccgcgaatggtgccggtacgtggatcgacctggttgtcgatgaagtccatgtgcccgaggtgcggatgaccgtcttcgctggaaaggccgaggtagacgggcgtcgcttcaccacgttcaccttcgcgggccagctcgcggtacttgagataggtgcgctcgtccgcctcgaagtaggcatagatcttgtcggtggacaccagtgtggtgagcagggcttcgcctgcgttgaccaggttgccggcggtgatcagcgcgcgtccgacgcggccatcgatgggcgcggtaacgcgggtgaaactgaggtccagcttggccgcatccagctgcgcctggatggccgcgaccgcggacttcgcttcgctggcagcgctgatacgggcgtcggcgagctcggcagaaatggcattcttggcccgtagccgttcaccacgttcggcctcccgggcggtgcggcgctcggcggcacgcgcttgttgcagttcggcttgcaagcgctttacctgtgcttcaaatgggcgggggtcgatctggaacaacagatcgcctttcttgaccagtgcgccttcatgaaaggcgaccttgtcgatgtagcccgacacccggggacggacctccaccgactccggagcctccaggcgcccggtgagctcgtcccattcggtgacctgctgctcgatgacttcagcgacgctgacctgaggctcgggcattgccgcttcggtggcttctggcgcttgcccgcacgcgccaacgagggcagcggcaaccgcgaccagtgggtaacgcaaggctttgagtgaacgttccatgcttgactccgcaactcgagtttttatcgatggcgggagtgtgaagggtggtcccgcgatgcagaaatcgaacgagccgaaggtgaatatcattgccggtgatgggcgcgcataaaacatcagcgcaggcgagggtaaagcttcgcgaccaagtcgctcctacgaaaagctgaaagtgcaggattacagttgcggctgggtgggagcggtctcgaccgcgaatggacctcgcgccatcccacctaccgacgagcaccgtgcagcactcattcgcgaccaaggtcgctcctacgaaaagctgaaagtgcaggattacaagctgcggctaacccgtgggagcggtctcgaccgcgaaaagactcagcccaccgccatctaccaacgagcaccgtgcagcactcattcgcgaccaaggtcgctcctacaaaaagctggaagtgcaggattaaggctgcggctaactcgtgggagcggtctcgaccgcgaatggacttcgactccaccgaccaaagtgcaccgtgcagcactcattcgcgaccaaggtcgctcctacaaaaagctggaagtgcacgattacagttgcggctaccgtgggagcggtcttgaccgcgaatggactccaggacgccgacgcatggcgcgtgacctccaggcgcagcgactgtcagaggctatccgggtcgccgacgaacatctggatacgcgagcgcagccagcgctctgcggggtcgttgtcctgcgcgccgcgccaggccatggacaattcgaagtcctggctggtctcgaatggcaacggctcggcgcgcacgccgccattggcggccagggccgatgcggcgtagtccggcagggttgcgaccaggtcggtcccggcaagcaggctggccagcccgttgaactgcggtaccgccagcaccaccttgcgcttgcagccgtgtagcgccagctcttcgtcgatatagccgttcaggtcgcccgcgaaggacaccatggcatgcggacgcgagcagtaatcttccatggtcatgcgcccgggaatgctgtcggcacgcagcagcatcggtttcggccggcggagcaccttgcgcttggcgttggcgggcagttcctcggtgtaacagacgcccaccgagatttctccggaggcgagcaagcctggcatcaataggtagttggcacggcgcaccaccaataccacaccgggcgcttcggcccggatgcgccgaagcatttgcggtaacagagcgaattcgacttcgtcggtcaaaccgatacggaacaccagctcactggtggccggatcgaagcttgaggcacggctgaccgcggtggaaatcgagtccagcgcgggggagagcaggctggcaatctcctgggcgcgggcggtcggttccatgctgcggccggtgcgcacgaacagcgggtcgtcgaacaatgtgcgcaggcgtgccagtgcggcactgatcgccggctggccgagaaacagcttttcggccgcccgggtcacgctgcgctcgtgcatcagcgtttcgaagacgataagcaggttgagatccacacggcgaaggtcgttgcgattcatgcctttcacttcaagcgagggtcagacgaagggcgcggctgacttcagggtgcgactgcattctagacagatcggcgctacagcggcatgtacatttccgctttgcaattacacaaacctgcaggttgtgatgcggctttacatacagcacatcatcattcctgcgcatggcgactatcgagcggaatgcgggaatctcggctggagttgtgccgaaggtgcagatagagtcactaacacagtagtaatcgaggggtcgttcaatgtcccgtatcattcgtttccaccagttcggccctgccgaagtcctgtgctatgagcagcaggaggtgccacggccaggccccggcgaagtgctgatcggcgttcgtgctatcggcatcagctggaacgacgtgctctggcggcaagacctcgcaccgcgccatgcgcgactcccgtccgggctgggtagcgaaatcgccggtgaagtgctggcggtgggcgatgaggtggacggtttcgccgtcggcgaccaggtggcgagcttcccggcgcatgacctcaatcagtatccgctttacggcgagcacgcgctgctgccgcatacctcgctcgttcactatcccgacatgctcggcccgatcgaggcgtccattcactacacgcctgcgctggtggcgtattttgcgctggtcgagctggcgcagctcgaacctgggcagtatgtgttggtcacccaggcacgccattgcaccggtccgaccgccgtgcaggtagcgaaggctctgggcgcgcgagtgattgccacgtgcgagaccgccgaggatcgcgacttcctgcgcgaactgggtgccgaaacggtcatcgtgaccgaagaggaggacctggtcgggcggctgcagaagattactggcggtgccggtgtcgaagtggtgctggacgcttgcgggggctcgcagatgaagctcttgggcgatgtcatcgcgccgcgcggcaagctcattctctacgggctcaacgggggcaacgaaacggcgtttccagcgtgcgcggccttcaagaagaacttcaagttcttccttcactgcctgtgcgatttcaccggccagccggaattgggtatcaagcaggatcgcgaggcggtcgaccgcgcgttgttgcacatcaaccagctcacggtcgatcggctgattacgcctcaggtcgacaaggtgtttggcttcgatgacgtggtcgaagcgcatcgttacgttgaaagcggcataccgcgcgggcgagtcgcgcttcgcgtcgactgaacagggccggccctgcgcggcccgatcatcgcttcacagaaacttttcccccacggctcaagtcctccgaagacaggttattcaccttgacggaggattttgcatggccgacgagaaccagaccctgccaccgcagcagcaacccgagcccggcaaagagggcttgatgaatccgcgtcccgagttccgtggcgaggactacaaagctgccgggaagctacaaggcaaagtcgcgatcatcaccggtggcgacagcggcatcggtcgctcggtcgcggtgcttttcgcgcgcgaaggtgcagacgtggcgatcctctaccttgatcagcaccaggacgccgaccagacccgtaaggtcgtcgaggaacagggccgcatctgcctgacgttcgctggcgacgtggccgaccgcgacgtgtgccgcaaggtcgtcgacgagacgctggcgaagttcggcaagctcgacatcctggtcaacaacgccgcggagcagcatccgcagaaaggcttggaagacatcagcgaagagcagtgggagaagaccttccgcaccaacatcttcggtatgttccagatgaccaaagccgccttgccgcacctcaaagaaggcgcgtccatcatcaacaccacctccgtgacggcttacaagggcagtccgcagctgttggattattccgctaccaaaggcgctatcacggcgtttacccgttcgctgtcgatgaacctggccgagcgcggcatccgcgtgaacggtgtggcaccaggtccgatctggacgccgctgattccgtccactttcgatgccgacaaggtcgccgaattcggcgctaacgtgccgttcaaacgccccggccaaccggatgaagtggcgccggcctatgtctatctcgctagcagcgatgcgtcctacgtcagcggccaggtgatccacgtgaacggcggtaccgtggtcaacggctgatcgccagcaaacaggagaaagggtatgcctcgcacgatctggaagggcgctgtcagtttcggtctggtgcatatcccggttgcactggtgccagccaccacgcggcagggaatcgacttcgactggctggataaacgcagcatggaccgggttggctacaagcgcatcaacaagaccacgggcgaggacatcgacagcgaaaacatcgtcaagggtgtggaatacgagaagggtaactacgtcgtgatcagcgatgacgagatcaaggcggcgcacccgaaagccacccagacggtagacatcgtcgcatttgtcgatgccaaggacatttccttcctctacatcgataccccgtactacctgaccccggatcggcgcggtgaaaaggtctacgcgctcctgcgcgagacgctgatcgagaccggcaaggtcggcatcgccaatgtggtgctgcgtaacaagcagcatctggcggtagtcatgccgctgggcaaggccctggtgatgaataccctgcgctgggccgacgaggtacgcggtgtcgagtatctggaaatgaaggacgaggcgctcgatgccgatctcaatccgcgcgaactggacatggccaagcgcctggtcgaggacatgagcgaggaatggaaccccgcgcagtacaaggacaccttccaggacaagatcatggacctggtggaaaccaaggcccgcgaaggcaagatcgaggcggtcggcggaccggaagaggcggtcgaccgtcgcagtgccgacgtcatcgaccttaccgagctgctcaagcgcagcctggcgggcaaaccggcgaagaaggcggcgtcggccgaggaagacgacgaagccgagcaggccagcgaagaacaggcgccacctaaacgcgccagtggcaagagcactgcgagcaagaaggcgccgcccaagtcgacgaccagcaaaaccgcctccggcagcaaatcgacgacgacgagcaagagcaccgccagcaagtccggtagcaagaaagccagctgaatcggcgagggcctcgcatgaccgtgaaaaccggcaagagcaaccgtcccgacgtgggcggtatcggcatcagcaatcctcagcgggtgatcgacgcgcagagcggcgcaaccaagttacaactggcccagtactatctggctgtcggtgaccggttgatcccacatctggccaaccggccactgtcgatcgtacgagcccccgagggggtagagggagaacgcttctttcagcgtcattgcgggcggttgaaaatgccccatatgcgcgtcctggacaaggcgctcgacccggaacacgcgcgtctgatccaggccgacagcgtgaccgcggtagtggaagcggtgcagatgggcaccgtcgagttccacacctggaatgcccgcagcgatcgcatcgaccgtccggaccggctcgtcttcgacctcgatccagaccccgaactgccgtggtcgagcatggtcgaggccacatcgatgaccctcgacctgctcgaagagctgggtttacgagcctttctcaagaccagtggcggccgcggcatgcatgtggtggtgccgatcgaccgtcgccagggctgggattgcatcaacgagttcgcacgcggcgtgacgacacgcctggctgccgaggcgcccgaaaagatcgtggcgaagatgggtccgaaaaaccgagtcggcaagattttcgtcgactacctgcgcaaccagcgcggcgccagcaccgtggcggcctactcggcgcgcgcacgccccgggcttccggtttccgtccccattacccgcggcgagctggcaaaactcgaaggcgcggatcagtggaacatcctcaacgtgcaagagcgactgcaagagcagacggacgatccctggtccgtttacggggcgacacgccagacgattacggcgcgcctgctcaaaacgctcgatgtcacaacctcaaacgacaggtgaccttcccattggccaaaccccagctagccttgagctagcgcagcgaacatgcgccaggctcgtcgtcggtctgcaggaaccatcgtagagcggttgcagtcgacttattcgatgagcagaacataacaagcagacaggagataccgatgaccgtgcgagtatcccggcgacagttcctgaagttcggtgcggctggtataggcgcatcgagcatggccatgatggggtttgcgcctgatgaagccgtagcgtcagtacgtcatttcaaactgactggcgccaagatcgctcgcaacatctgcacctactgttcggtagggtgcggcatgttgctctattcccgcggcgatggcgccgccaacgtgatcgacgacatctaccacgtcgaaggcgacccggatcatccggtcagccgcggctcgctctgcccgcggggcgcgggtgtgctggacttcatcaagagcccgtcgcgggtcaagtaccccgaggtacgcgatccctacaccaacgagtggaagcgcatcagctgggacgaagccttgacgcgtattgcgcggcatatgaaagacgaccgcgaccgcaatttcgaaacccatgacgaacagggcaggctggtcaatcgctggatgaccacctcgatggtcgcggcttcggcctgcaccaacgagacggcgtacctgacgcagaagatcacccgtgccctgggcatcctcaagctagacaaccaggcgcgcgtctgacacggaccaacggtggcaggtcttgccccttcatttggtcgcggtgccatgacgaaccactggacggacatcggcaacgccaatgtcatcttgtccatgggcggcaattccgctgaggcacacccggtcggtttccgctgggtcatgaaagccaaggagcgtagcaatgcgatcctcatttccatcgacccccgattcaaccgcaccacggcggtggccgattatcacgcctggattcgtaccggcacggatatcgtgttcctgggtggtttcatcaactacctgatcgagaccgatcgctacgcccacgagtatgtgcgcgagtacaccgatgccagtctgatcgtgaaggaagggttcggcttcgaagatggcctgttcaccggctacgacgaggacaagcaccactacgatcgcaagacctggaactacgagctggacgaaaacggcttcgcccggcgcgatccgagtctcgagcatccaaggtgcgtattccgcctgctgcacgagcactacagtcgctacaccgtcgatcaggtcgaaaccgtctgcggcatgccgaaggacacggtactgcagctctgggatctcatggcgcagacgtcggcccccgacaagaccatgacgatcctctatgccctgggctggacccagcacaccatcggctcgcagatcatccgatgtggcgccatggtgcagctcctgctgggcaacatgggtatgccgggcggcggcgtcaacgcgctgcggggccactccaatatccagggcctgaccgacatcggtctgctgtcgaacctgctgccgggttacatgaacctgccgtcggtagacctgcagtcctatgacgcttacatgaagacccgcatcaaaccgccgatgctggaaggtgaggtgtcctattggaagttctacgagcggttcttcgtcagcctgatgaaggactggtacggcgacgtggcgacgaaagaaaacaactggtgctatgactggttgcccaagctttccgaacccatctacgacgtgctctacgcggtcaacgacatgaccttgggcaagatgaccggggccttctgccagggcttcaacatactggcgtccttcccgaacaaggcgaaggtgctcgaaggtctgtcgaagctcaagttcctggtcatcatggacccgctgaccgtggaaaccggcgagttctggaagaacttcggcgaataccacgacgtcgatccgtcgcagatcggtaccgaggtgttccgcctgcccaccacctgcttcgccgaggactccggctctatcaccaacagctcgcggtggttgcagtggcatgataaggcggcacccggtccgggcgagtcgatgaccgacaccgagatccttggcgaggtgatgctgcggctaaaggcgatgtatcaggaggagggcggtgccttccccgatccgatcctcaacctcagctggaactacaaggttccgagcgcaccggccgcgtccgagctggccatggaatacaacggtcgcgcgctggcggatctgaccgacgataccggcaaggtcattcgccgcaagggcgaacagctgaaggatttcagcgagctgcgagccgatgggaccaccgcctgtggctgctggatctactccggcgcctggccgcaggaaggcaacatgatggctcgccgcgacaactccgatccttataacaccggcaacaccctgggatgggcctgggcctggccgatgaatcgccggctgctctacaaccgcgcctcggctcgaccggatggcacgccctgggcaccgaacaaggcgttcatctggtgggacggcgaacgctggacgggcgccgacgtgcccgatttcccgctgacctcgccgccctccgccggcgtccggccgttcatcgtcacgcagaccgggaccggtcatctgttctccagcgaatggctgaacgaggggcctttcccggaacattacgaaccgatggaaagcccgatcgaccgcaacccgatgaacccggacaacccgctggcgatgcataacccggtcgcacgggtattcgagcaggacagggattcgttcgggtcgaacaaggagttcccctacgcggcaacgacgtaccggctgaccgagcacttccacttctggacgacccatgcacggctcaactcgatcgcgcagcccgagaagttcgtcgagatcggcgaagtgctcgctggcgagctgggcatcgtggccggcgagcgggtgcgggttcgctccaagcgcggcttcatcaccgccgtcgcggtggtgaccaagcgactggtgccgctcgagatcgacggtcgcaccgtgcatcaggttggcataccgattcactggggcttcaagggcgtcgcgaaaaaggcgtacctgaccaacaccctgacgcccttcgtcggtgacgggaatacccagacaccggaattcaagtcgtttctggtgaacgtcgaaaaaatcggaggtgccgtctgatgcgaggcgaccagatcaatctgcagaacatcatcgcccgctcggccaccaccacgccgtcgccgcaggtgcggcacggcggtgtcgaaaaggtaaccaagctgatcgacgtttcggtctgtatcggctgcaaggcatgccaggtcgcttgctcggagtggaacgatctgcgtgacgaggtcggtgagtgcgacggcacctacaacaatccgcaggacctgtcggccgagtccttcgaggtgatgcgtttcagcgagtacgagaacgagcagggcaatctcgagtggctgatccgcaaggataactgcatgcactgcgccgagccgggctgcctcaaggcctgcccatcgcccggcgcgatcgtgcagtacgccaacggcatcgtcgacttcaactccgagcactgcatcggctgtggctattgcgtggcaggctgccccttcgatatcccgcgtatctccaagaaggacaacaaggcctacaagtgcacactgtgttccgaccgggtttatcacggcctggagccggcatgcgtcaagagctgcccgacctcggcgatcatgttcggcaccaaggaagacatgctcgactacggcgcccatcgcgtcgagcacctcaagggccggggctacgataatgcgggcatctacgatccgcccggtgtcggcggcacgcacgtggtgtatgtactgcagcacgcggacaagccggaaatctacagcggcctgccgaaggatccgcagatcagccccaccgtcgagctgtggaagggcgtgaccaagccgatcatgtccgtggcgttgggcgtgtcggtgctggcaggcttcttccactatgtgatgaaagggcccaaggaagaacccgaggacgatccggatccggaacaggcggcagcagcgcgtgacatcgatcagcgcggggaggaccggctatgagccattccaacgtacggcacggcatccttcgctacggctggtggacgcgggtcaatcactggctgatcgcggtcagtttcgtgctgctcacgctcagcggtctggcgctgttctatccggcattcttcgctctgaccgggctgtttggcgggccggagcctacgcggatcgttcacccctatatcggtgtgttcatgtcggcgttcttcgtcatccaagccgtgcgcttcttcggtgacaacctgatccgtcggcacgacgtgcagtggatgaagcagatcggcgacgtcctgagcaaccgcgacgagcgcttgccgccggtgggcaagaacaacgctgggcagaagctggtgtactggatcttcctcgccaccgtaccgatcctgctggtcaccgggatcgtgctgtggcggccatggatcgccgacgacatgccggtctgggctttgcgcctggcggtaaccatccatgcctacacggcgttcatcgcgatcatcaccctggtgatccacatctactcggcgatctgggtcaagggctcggtacgcgcgatgacgcaagggcgagtcagccacgcctgggcgcgccatcatcacggcctctggtatgaggacgtgatgcgcaaccgcaagaccgacgagcagagcgcgtcgcccaccagcgaagtacaggatcgtcgccgatgaaaggagctgcagtggaccacaattacggaagtgccccctccggcatcatggaggcaccctatgtggtacttccggaagccaaactgttcagcaaacgggccactcggttgcgagaactggtggcgcaggtaccgccgctcgatgagttcctcgcgttcatggggcgtctggtacaagcccagcaccaggtactgaccgagcgtgaacccgcctggcgtccaccggccgatgcgttcgatcaggcgttgaagcacggcatgccgcctttgggtttccaggcgttgcgacgcgatgtgcactggcaacaggatctgctcgcgatactcgatgcggtggagctgcacgtgggcgagcgtcagcgaccgctgctcgccacgctgcgcgaaatgccggccgatcgccttgatgagctggccgacgatgtcttcgaaatgcggcctggggacgaggcgacccgcggcctgttgccgttggtcgcggctgccttgcaggtgacctgggtgcgtttggccatgggcttacccaaagccccggccaggcccatgggtgaggcgcgggcgctttgtccctgctgtggtgccgcgccagtggccagcgtcgtacacaacgagcggcatcgcagcggcgtacgctatctgcactgctcgctgtgcgcgaccgagtggcacctggaacgcgttaagtgcagcgtctgcgacagcgggggcaagttgctttacctgagcctcgacgatgatcagggcaagccgttcctgccggtccatgcggaggcctgcaacgagtgccatggctatctgaagatcatgcagcgcgagctgcacggccgcgccgacccggtggccgacgaccttgccagtctcgcgttggacctgcttctggccgagcaggacgagtatgcgcgtagtggctacaaccctttgctgatcgccggcagttaggtgggctctggcgcttcgtcggcgacggcctggccgccaaacggcgtacctggtttgtagtcgtcgaggtcgtcggggcagggcacctgtggcagatcacccggcttgtcgtgcacgacggggtccggttgtggcacatcggggcgagcatgcggagtcatggcagcctccatctggtggatatccatcatcaggaatagctcatcgcagcccgggcgcaagcgcaccgggaagcctggcaccaagccggcgacgacgagagtttcaaagcccaggcgggccttctaccgaccaacagcagcacgcacaggtccgctccgcgggaggtccgccccgggttgaacgcagcccgcagaggtgccttgcctacgggctagaagcttcgccccggggtcggggctcccacggaagcccggcagcatctcggtcgatcccataaatctgggatctacggtgcccttccagcctgacaagcggcacgcaaaaactgttctttgtgggagtcgcgacccacggcgaaacggggctcgggcccgctctaaacgatagcttcgtccgcaacatgccggagccagcaggacagaaccagcagactgcgcgggcggtctgtttcgctgaacttttacggcctcccttggttcggaagaacagagcccgtgaaagcctgcaggtcaggttttcacacggtcaatccagcccgaacggtgtcgactgcgcagtggttgggttgccgtaccgcaacgactcaggccccaggagcccgttcgatgaacgatgcacaaccccacgccattattcacccccgcctggaacaggcattgaagatgccgcgcatcgccatcgaggcgaccgagccggtgcttgacggtggtcggttcgctgccaaggcaatcatcggccatcccgtcaacgtgaccagcaagatcttcgccgacggtcacgatcagcttgccgctgcgatctgctggcgtaccaaggacgaaaccggctggcgccgtgcgcggctcaagttgctcggcaacgacagctgggaagggcacttcaccccgacccaggtcgcgagccacgagttcatgatcgaagcctggtgggacgtctacgagacctatcgttacgaactgtcgaagaagcacaccgcgggcgtaccggtccagctggagctggaggagggccgtcagctgctcgaacgtgccagcggccgggcgcagggtgaaaccaaggcgatcatcgaggatttgctgcatcgcttcagcgccgcgcatctcgatgacgagcgcgtgtcggtgatgctcgccgacgaaaccgccgcggcgatggccgacgccgacccacgcgaacattgcagccagagcccggtttttccgctcgaagtggagcggccgctggcccagttcgccagctggtacgagctgtttccacgctcggagaccgatgatccgaaccgccacggcaccttccgagacgtgcacaagcgcctcccgtcgattcgcgacatgggcttcgatgtcctctatttcacgcctattcaccccatcggtcggcagcaccgcaaaggccgcaataacacgctgcaggccggccccaatgacccgggtagtccatatgccatcggcagcgaagaaggcggccacgaagccgtacatccccagctgggcaccttggaagacttccgtgagctggtcgctgccgcgcgcgagcatggcctggagatcgcactcgatttcgccatccagtgctctcaagaccatccctggctgaaggagcatccgggctggttctcctggcggcccgacggaaccattcgctacgccgaaaacccgccgaagaagtatcaggacatcgtcaacgtcgacttttacgcggaagacgccatgccggacctgtggatcgccttgcgcgacgtggtgtggcactgggtgcagcagggcgtaaagatcttccgggtcgacaatccgcataccaagccgctgccgttctgggaatggatgatcgccgatatccgcgagcgagacccggacgtgatgttcctctccgaagccttcacccgcccggcgatgatggcgcggctgggtaaggtcggcttcaaccagagctacacctacttcacctggcgcaacaacaaggcggagctgagcgagtacttcaccgaactcaacgagccaccgctgcgcgattgctatcggccgaatttcttcgtcaatacgccggacatcaacccgttcttcctgcacgactccgggcgtcccgggttcctcatccgtgccgcgctggcgaccatgggctcggggctgtggggcatgtactcaggcttcgaactgtgcgagtccgcggcgatccccggaaaagaggaatacctcgattcggagaagtacgagattcgtccgcgcgattatcacgccccggggaacatcgtcgccgaaatcgcccagctcaaccgtattcgtcggcagaacccggctctgcaaacccacctcggcttccaggcgtacaccgcctacaacgacaacatcttctatttcggcaagcgcacgcccgatcgcaagaatttcattctggtcgccatcagcctcgatccgcataacgcccaggaggcgcatttcgagctgccgctctgggagctcgggttgccggaccatgccgaaacccggggcgaagacctcatgaacgggcatcgctggacctggtacggcaagacccagtggatgcgtatcgagccgtggcacctgccgtttggtatctggcgcctcaccgcggacgcacccgatccagacttaaagtgatttctagaaatggcgtgaatctgttgtcagttcaacacgttacgcaacgaacgtgatccggtctgtaggttattggacgcacattttcagtctccacccgctccccaaagggggcggtgtcggaggtcatgaaaggaacgagaacatggccaaagcgcgcaaaccagccgcctttatcaaagacccgctctggtacaaggatgcggtgatctaccaggtccacctcaaatcgttctttgactcgaacaacgatggcgtcggcgacttccagggcttgatcgaaaagatcgactacatcgccgatctgggagtgaacaccatctggctgctgccgttctacccctcgccgcggcgcgatgacggctacgacattgccgaatacaggggagtgcacgaggactacggcagcctggccgatgcccggcgcttcatcgctgcggcacacaagcggggcttgcgggtgatcaccgaattggtcatcaaccacacctcggaccagcacccctggttccagcgcgcgcgcaaggcgaagaagggttcggcagcacgcaacttctacgtctggtcggacaccgacgacaagtatcccgggactcggatcatttttctcgacaccgagaaatccaattggacctgggatccggtggccaagcagtacttctggcaccgtttctactcgcaccagccggacctgaacttcgacaacccgcaggtgatgaaggccgtgctcagcgtgatgcgctattggctggacatgggaatcgacggcctgcgcctggatgcgattccttacctggtcgagcgcgacggcaccaacaacgaaaacctgcccgagacccacgcggtcctgaagcagatccgtgccgaaatcgacgccaattaccccgatcgcatgctgctggccgaggccaatcaatggccagaggacacccagttgtatttcggcggggaagacggcgggcccggcgatgagtgccatatggcgttccacttcccactgatgccgcgcatgtacatggccttggcccaggaagaccgcttcccgatcaccgatattctgcgccagaccccggacatccctgagaactgccagtgggcgatcttccttcgcaatcacgacgagctgacgctcgaaatggtgaccgacaaggaacgcgattacctgtggaattactacgccagtgacaagcgagcccgaatcaatctgggcatccgccgacgtctggcgccgctgctagagcgtgatcggcggcggatcgagctgctcaacagcctgttgctgtcgatgccgggcacgccggtgatctattacggcgacgagatcggcatgggcgacaacatcttcctcggtgaccgggacggggtgcgcacgccgatgcaatggtcgctggatcgcaacggcggcttctcccgcgccgacccgcccagtctcgtactgccgcccatcatggatccgctgtatggctatcaggcgatcaacgtcgaggcacagcagcgcgatccgcattcgctgctcaactggacgcggcggctgctgtcgatccgcaagcagttcaaagccttcggacgcggcagcttgaaaatgctcgccccgagcaaccgccgcatcctggcctacctgcgcgaatacaccacgccgaacggcgagaccgaagtgatcttctgcgtcgccaacgtctcgcgttcggcccaagcggcggaactggagctgtcgcactacgccgggatggtaccggtggagatggtcggcggcagtgccttcccgcccattggtcaattgccctatctgctgacgctgcctccttacggcttctactggttccagctggcaaccagtcatcagatgcccagctggcaccaggaaccggtggaaacgatgcccgattttcaaacgctggtgctcaaacggttggatacgctcaccgctgccaacaaacgaattctcgaaaccgaatcgctgccggcttatctgccgaaacggcgttggttcgccagcaaggatgccgccgtcgaatcgatcaagatctgctacagcgtgccgttcggcgatccgcagcggccggtgctgctgagcgagattgccgtgcagaccgccggccgtaccgacctgtatcagctgccgctgggcttcctcgacgagggcgatttcgataccgccttgccgcaacagttggccatggcgcgcgtgcgccgcggaccacaagtgggcctgctgaccgacgccttcgcgctcaaacagttcgtactgggcgtgatccaggggctgcgcgaagaacaggtgctgccatgcggcgagggcgaaatacgcttcgaacccatggcgcgactggccgagatcgaactgcccgacgatgccgaggtgcgctacctgacggcggaacagtccaacagctcggcgatcatcgacagcagcatgatgatcaaggtgctgcgccgtatctcctccggcgtgcacccggagctggaaatgggacgcttcctgaccgagcagggcttcaaccatatttccgccatgctcggccaggtgacacgggtcaacaagcagggcgagcagcacgcgctgatggtggtgcagcgcttcctcgacaaccagggcgatgcctgggagtggacgctcaatacgctggaccgcgccgtgcgcgaccagatcgcgggcggcgtatcgctgcatgaaaaccagttcagcgcgctcgaagagctggaggcgttcaaccgcctgctcggccagcgcctgggcgagatgcacatgacattggcggcctcgaccgaggacgcggccttcgccagcgagccgacccgtccggctgacacccgggagtggaccgagctggtcggcgcccaggtagcgcgagcgctggatatcctgcaaaaccggcgtggtgaattggaacgcaagaccgcaacgctggtcgatcagctgctgggacagcgtgaacaactcatggcggaggtcaaacggttggctgaacgaacggtcggcgggctgcgcacgcgggtgcacggcgatctgcacctggggcaggtgctggtggtgcagggcgatgcgtatttcatcgatttcgaaggggagcccgcacgctcgctggaggaacgcagagccaagctcagcccgttcaaggatgtcgccggtctgctgcgctcgttcgagtacgcggcggccatggtcatgcgtaacgcgcagatcagcgacagttcagaggcagccgatctggcgcgacgcgcgatttccgatgcctaccagcagagcgcgcgtagcgtcttcctcgaggcctatcgggaggctaccgcgcaaatcccacatgcctggaaggatgccaacggggcggacgccgcgctggccctgttcagcctggaaaagaccgcgtatgaagtggcctatgaggcagagaaccgcccggcctggttgcccgtccccttgcagggattggcggctttggcacaacagatttccgatggaggttcccaatgaatgatcgaccggtcgtgaccatgcccggagaaaccctactgcccagcgatgctgatgtagacgcgctggtgcgtgccgaacacggtgatcccttttcgattctcggtccgcacccggacggggacggcctggtggtacgggcctacctgcccaacgcgctcggcgtcgaggtgctggaacgctccggtggtcgtgtgctggcggcgatggagcaggggcaggtgcccggcttctttttcacacggttgaccaaccctcaaccctatctgctaaggattcgctgggccggtggcgagcaagtgaccgaagacccattcagcttcgggccacagctcggcgaaatggatctgtatctgttcgccgagggcaaccatcgcgagctcggccgcgtgttcggcgcgcagccgatggaagtcgacggtgtacagggcgtgcgttttgccgtttgggcgcctaacgcccggcgcgtttcggtggtcggcagcttcaacgattgggacgggcgtcggcacccgatgcgcctgcgtttcccggcgggtgtctgggagatattcatccctcggctacaaccgggcgatcgctacaagttcgaaatcctcggtccgcacggcattctgccgctcaaggccgatcccgtggccctggcgaccgagctgccgccgggcaccgcgtcggtgatatcgcatccgctggaataccagtggaaggacgacgcctggttgcaacagcgcgtggcgcggcagtcactgcaggcgccgatgacaatctacgagctgcacgccggatcctggcgccgggacggaggcgatcatgggcgcctgtacgattggcacgaactggccgagcggctgatcccctacgtcgtcgatctcggtttcacccatatcgagctgatgccgatcatggagcatcccttcggcggctcctggggctaccagctgctttcgcagttcgcgcccagtgctcgctatggcagtgcccatgatttcgccgctttcgtcgacgcctgtcacaacgccggaatcggggtcatcctcgattgggtgcccgcgcatttcccgaccgatgcccatggtctgggcgagttcgacggtaccgcgctgtacgagtacgcgcaccccttcgaaggcttccatcaggattgggatacctacatctacaatctcggacgcaccgaggtccacggcttcatgctcgcctcggcgctgcactggctgcgcgaattccacgtcgatgcgttgcgcgtcgatgcggtcgcctcgatgctctatcgcgattattcgcgcaaggaaggcgagtggatcccgaatcgccacggcggccgcgagaacctcgaagcgatcgacttcctgcgtcatctgaacgacgtggtggccaccgaaacgccgggggccttggtcatcgccgaagaatccaccgcgtttcccggcgtcagcaagccaacagccgaaggcggcctgggcttcgcgtacaagtggaacatgggctggatgcacgacacgctcaagtacatccaggaagacccgatcaatcggcagtaccaccacgacaagctcactttcggcatggtctacgcctattccgagcacttcgtgctgccgatctcccatgatgaagtggtgcacggcaaaggctcgctgatcgacaagatgccgggagaccgctggcagaaatttgccaacttgcgcgcttatctatcgttcatgtggacgcaccccggcaagaagctgctcttcatgggctgcgagttcggccaatggcgtgagtggagccacgaccgggaactggactggtatctgctcgacgaggcggaccatcgtggcgcgcagaatctggttcgcgacctgaaccggctgtacagccaggagccggccctgcacgagctcgacagcgatccgcaaggtttccaatggctgatcggcgacgatcgcgccaacagcgtctttgcctggttacgccgtagttccaccggtcatccgctgctggtggtgggtaactttaccccggtcgtccgcgagggctaccgcgtcggcgttccggagaacggtcgctggctggagatcttcaacagcgacgcggagtgctatgcggggtccaacgtgggcaacggtggcgggatcctcgccgaagcgctgccatcccatggccaggacgtttcgctttccctgacattgccgcctttgggcgtcgttatcctgcggccgcaaggctaggtcgttccggcatccgggcgacgcggtgcccggacgccggacggcgtgggaaggccagcgagccagttgtgcaaaaccggcccgctggtctcaccagtcggaaacaggaggcgcagcatggcggggcacaaccatgaacacgggcatagccacggtaatggcccgggacacagccatggcagcggcaagaccttgctggtcgcactggtcttcaccaccgcgtttgccgcggtcgaggtgttcggcgggctgattgccgattcgctggctttgctctcggacgccgggcacatgttgaccgattcgctgtcgctgggcgtcggtgccttcgccgcctggctggcccgcaaaccggcatcgcgccggcactccttcgggctgaagcgggccgaaatgctcggtgcattgttcaatgtgctgttcatgttcggcgtgatcgccttcatcacctacgaggccatccggcgcatcggcgataccccagcggtggcgggcggcacggtgctggccatcggtgcgctggggctgctggtcaacctggtggttgcctgggtgctgatgcggggcgaacaatcggtcaacgtgcgcggcgcgctactgcacgtgatgggcgacctgctgggctcggtcgcagcgctggcagccggtgcgatcatctatttcggcggcccgccggtggtcgacccgattctctcgctgctggtcagcctgctgattctggtcagcgccgttcggctgttgcgcgaggtcacccacgtgctgatggaaggcgtgccgaagggaatcgacgcgcaggaagtgggcgatacgctggtacggatcgacggggtgctggccatccatgacatgcatatctggagcctgtcatcgaatagcctggcgctggcggcgcatgtcgacgtggatacgatggagcgttgggcgtcggtcttgccgcagcttcagcacgtccttcacgagcgcttcgacatcaaccacagcaccctgcagccggaggacgcatcgatccgccgcgcatgcagcgccgatcccgactgtggctcgggtgattcggtctggcagcctgatggcaagaaagcgggagcggcgtgatgtggggaggtctcgcgaagcatcgacaccgtagccaggtgaccggacgggccgtctcagtgcttatatgacgaggcgctaacggctggcatagtcaggccgtggtgcctgcaattagcggtcgccgttgcgaagggtcgcaggtagaacctgctcctacagagcatcgacactgtagccaggcggccattcggccctcatccgacgaggcgtcaatgactggcattgtcaggccgtggtgcctgcgattggcgggcgccgtttgcgaacggtcgcaggtagaacctgctcctacagaagcggggccccgtctttaggtcttcgtttagcggctgaccgctttccgcgtagcggacggttcttcttccgctggcttttctatacggggtttggcctcgtttccggcgcgcagcttcttcgctcgggcttcgagcacgacgtagaggatggcggccaggcacagcggtatcaggaagtacacgacgcggtagccgatcaggccggctacgatcgcgccgttgccgagctcgtcacccagggcggccacgaacaccgcctcgatcacgccgaggcctgccgggatgtgggcaatcacgccggcgatgctgctgatcatcaaggtccccagcacctcggggtaggacaccttctgcatgagcatgaaatggaccaccagcgccatcagggcccagttgctcgcgcccaacaccatttgcagcgcggccaggcgtaacgagggcagatggatctcgtgcttgcgtatggtccagtgacgacgcttggaaaagccgcatgcccacagatagaccaccgcgaccagcagcaacacggcgccgagcacacgcaacgccgtttcgccgacttcccagctggccggcggcgtgatccaacccatggaaaagatcaggcctgccagccagatataaccgagccagttggtcaggacgctcaaggtgaacacccgggtaatctgcgaggcgcgcagcccaaggcgcgaatacaggcgatagcgcagggcgatgccgcccacccaggcgctcaggttgaggttgaaggcatagcagacgaaggtcaccggaacgatctggcgaaccggcaggttgtgctgtgcgtagcgcttgccgagcacatcgaagcagcaatacaccgcgtagctggcaagggtggcgccaccggccagccacaggatcctggcgtcgtagtcgctcagcgtccggtagacctcgtgccagtcgacattacgcgccagccccaccagcaagccgacgaccagcacgaagaagacgtaggtcaggatccgcttgatcagcggccagcgacggcgccagccgccaggcgaggaggtttgcgtctcgctcatcgatgatctcgttgcaggggagccgactcggactcgagcggctccggatcgatcagttgcagcttcggacggtgcgctgggaacaggccgaccagctgagggaaatgccgcagaaagtgaaagatgacgaaggccagcggtgctcgccaccagtagccgcgcacgattcgctccagtggaatccggcgacaatcttcctgcagcaaccgatcgagcttctcatgcagttgccgattgaagttgtggtcgcgaatgatcagattcgcctccaggttcagcgacaggctgagcggatcgagattgctcgagcccaccgtagaccattcgtagtcggcgagggccaccttgccgtgcagcggccggcggcaatattcgtgcacctcgacgccgtcgctcatcaagtagttgtagagcatccgcgcgccgaacttggcgatcggcatgtccggctgcccctgcagaatcaggcgtacccgtacgccacggcgagctgcgttgcgaatctcacgcaacacgcggtagcccgggaagaaataagcgttggcaatcagcagcctggagcgagcatctcgaatcgcctgcaggtaatgctgttcgatgtcgttgcgatgatcctggttgtcacggatcacgaacaaagcacgcgcctcgccccggttgacgccaacgtagccgttgctcgggtgcgctgcccgccgatgccaccagcgccggttcacacgtcccgacgcgacgacgccgagggcgaaccgatggatgtcgtgcaccacaggcccctcgaccctcagcgcgtaatcctgcttggcctccggaccgaaatcgcccaggtggtcggcagagaagttgatgccaccgatgaacgcgacctgtccgtcgacgacgacaatcttgcggtgcatgcggcgaaacacgttgacgcgcttgcccagcagccgcttgccgggatcgaacatatgaatgcgcacaccggcccgcgccatggtggaggcgaactcgccgttcaggtcagcggagccatagccgtcgacggtaacgtcgacgctgacgccgcgtgcagcggcgtcgaccagcacctgttgcagctcctggcctaccttgtctttgaagaagatgaaggtttcgagcaggacttccttttcagcagccgcaatggcttcgaacacggcagggaagaactcctcgccgttttccagcaactgaagacgattcccgtctctccagtgaaaattcataggtgtatctccaccgccaagggcagatgatcggacaagtgcgtccagggtttgttacccaggatttgcgccttgtggctcgtcgcgttgcgcacgtagatgcggtccaggcgcagcatcggccagcgtgcgggaaaggtcttggcgaccttgccctgggacacggcgaagacttcatgcatgccggcgcagcgatccagcacctgagcgcctttcaatcgccagtcgttgaagtctccggcgaccactaccggcgcgtcctggggtagcgaatcgagcaactggcacagcagggcgagttgttgctgtcgatgcgactcgcgcaggccaaggtgcacgcagatcgcgtggaactccgagtggcctggtacctggagcacgctgtgcaacaggccgcggcgttcggggccggcgatggagatatcgagattctcgtagcgggtaatggggaacttggataacagcgcattgccgtgatcgccgtcggggtatacggcgttgcggccgtaggcaaagtcggtccagatgctgtcggcgagaaactcgtactgggacatttttggccagtcgtgaaagcgcagggcatgcttctcatgggtgcccagcacttcctgcaagaacaccacgtcggccgataccgctctgaccgcctcacgcagttccggcaggatgaagcggcggttcagcgcggtgaagcccttgtgggtattgacggtcaacaggcggatcgcatcgaccgccgaggacatatgggcgtccaggtcccggctgtccaggggatgattcttgtccagattcaagccagtgctccttccagttggcccggagtggtctccaggttttcctccagtccgagacggcgcagcaactgccgcgcgtcataaggggctcggactttcacgtcgttatcgaaatagcagtacacctcgcgtgacctgcgcgaggcaggtctggtgtcagagatgagctgggcgtcgtcgggttggccaccctcgctccacagccggatgcgctggcaccagttgtccagcgcctgctcggtatagccgctggtatagagctcctcggcgccatgcaggcggatgtaaacgaaatcgctggtcagatcctcgcgatagggccacttgcctgccgtatccgcgaccacaagcgcaacgtcgtacttgcgcaacaatgcgataaaggccgggtcgacgaagctctggttgcggatctcgacggcgtgccgcaggcggcgtttgcggtcgatctgcagatagctacggccctccattcgcgcctcgcagcccttggccatttccagcgccgtctcggtgtcgtgcggcagcagcccgaggaaagtctcgaactgctcggcatcgaacttgaacgacggcgggaactgccaaagtatcggccccagcttgtccttgagtgccaacacgccggaggcgagaaaattggcgatgggcttctccacctcgcgcaggcgcaggatatgggtgatatagcgaggcgccttgacgctgaagacgaagccggcgggcgtttcggcgtaccaggccgaatacagctcgggccgctgcagcgagtagaacgagccgttgatctcgatgctgcttaccgcgcgcgaggcgaacttcagctcgtttttctgggtgagccccttgggatagaagtcgcctcgccagggtgcgtagcgccagcccgatatgccgatatggatggccgccatcaacgtctcctagaacctgccggggttttgcatgctggtcgggtcgctggccggaaaggtgtcggcgatggccttgtcgacgatgctttcctccgagccatcgccggccgaaccgctgcgttgtggctgcagctccaccttgatccagccgcgctcgcgccggtcgaatgcctcgaacgcggcgatggcatcggtcatcggtttcacctgggtaaggatcttcgccggatcgatacgccgggcctggatcatctcgatcagccgggggatgtatttgcggtgatggcaattgcccatgttcatggtgatgttcttgttcatcgccatgccaatggggaaggtggtggcatctggcgggtaaacgccgatgatcgacagggtgccggcctttgccaggccctggaccgcccattccagcgcttgcgaaggcccatcgcccggctgccattgggcgccctggcctgattgcgcgccatcggcgggcttgccgccgcagcagccgtgttcggcatcgataccgaccgcgtcgatggcccggtcgacgcctatgcccgcggtaagccgcttgagcgtctccaccgggtcttcacggttgaaatcgatgatttccgcaccctgctgttgcgccatgcgcaggcggtcttcgtactggtcgatggcgaacactcgcccggctccgagcagcttggcgctggcgatggcgaactggccgaccgggccacagccgaacacggccacggtatcgcccgagcggatctcggccatttccgcgccgaaatagccggtcgggaagatgtccgaaagcagaatcgcctgatcgtcgctgacgtcggccggcagcttgaccaggccgatgttggcgaaggggatgcgtgccttctcggcctgcaggccatggaacggaccggtctgcgacggtccgccgtagaacgacgtgccggcttccttgccgttcgggttggcgacgtcgcactgggcgaaatagccggaacggcaataggcgcagttaccgcaggcgatggtcgaggggatcacgacacgatcgccgatctgcaggttgcgcacgtcgtcgcccagctcctcgacgataccaaccgcttcgtgaccgagaatggtgccgggcttcattccactgacggtgccgcggacgaaatgcagatcggtaccgcagatggccgaggcggtgatacgaacgatggcatcggtaggagcttcgatgcgtggctcggcgacgtcctcgaggcggatatcgccgacaccgtgataaacgacagctttcatggctactccgtaacgcccactccaacagcaagttcgagtggtatgtagggttgctgacatcctgcgaatgggccggatcatcgagagccggtcggcgttccttcggaatggggccctgactttcagcgggccattcagcagcacgctgcgtcgacaggtgcaccttcattgggactgatggcggctttcgcggttcatcttttttcagtgcgacggccacgcaagcgcgctgcgacggcgttctggagggcggaacgggaaaggatgtcagcggtgcggggtagcccagggcagttcggcggagaaggcttcgaccagatagtcgatcatggcgcgtaccttggcgggtgggcggcggtcggctggataaaccacatggatgccgccgagccccagcgccggctgatccagctcgaccgtcaccagctcgccacgctgcagggcggcagcgacgatgaactgcggttggtagatcagaccctgatcacctaccgcggcggccaccagcgcggcgccgttgttggcgatcaggttgccttgaatcggcacccgaaactcaccggccgggccgaacgcccattcacggccgccgagcagcgtcgacaggctgtagcccaggcagttgtgccgggccagatcactgacccgccttggcacgccatgttgcgccaggtaaccgggcgaggcgcataccaatagcgggcaatcggccagccgtctggcctgcagtgggctgtcggtgaggcggcctattcgcaccgccatgtcccagctcccgtcgatcagatccacctgactgtcggtcagccccagctccaccctgaccgcagggtggcggcggctgaattcgggcatcaacggagcgatgaagcgggtaccgaatgacagcggcacgttcatgcgcagcagaccggccgcgtcgacccgctgcgaggcgacgctggcttcggcctcgtcgatctccggcaggatacgcagacaggcttccagataactgttgccggcagcggtcaggctcaggcggcgagtgctgcgatggaacagtttgacgccgagacgggcttccaatgcatcgacgtgtttggtcgccattgcgggcgacaggccgagctggcgggccgcggccgagaggctgccggcactggccgctcgggtgaagacgcgcataccggtgattctatcgagcatctcggctcctactctcggttggaactgttgaggtgttttggcctgttaaagcccaaccgagtgtaattcatactgtcggctcaattgagaggacataacgccatgcatcgccacgccgacgttgccccgactgctgggccgcagccaaccctgtttctaccgcacggtgccggtccatgtttcttcatggagtggaacccggccgatgcctgggacaagctcgccgccttcctcaaaggtgtcgcggcaacactgccgcaacgcccgcgtgcaatcgtgctggtgtccggtcactggctggaacagcaggtacgggtcaccgctggtgccaatcccgagctgatctacgactatcacggtttccctgcgcatacctaccagctgcgctatccggctccgggtgaccccgccttggcggcgcgtctggtcgcactgctcggcgaggcgggatttcccgccgaggaagaccgccagcgcggtctggatcatggtgccttcattccgctgaagctggtgtttcccgaggccgacgtgccggtagtgcagctgtcgctgcgcagcgatctggatgccggtgcccatcttcagatcggtcgcgcgcttgcgccgctgagggacgagggcgtgttgatcatcggcagcggcatgagctttcacaacatgcgcggctatggcgacccgcgtttcgcaccgatttccgatgacttcgaccggtggctcaacgccgcggttgccgcgcctgcggatcagcgcgagcggctcttgcagcactgggaagaggcgccctcggcgcggctttgccatccgcctcgcgccgaggagcacctgttgccgctgatggtggctgccggtgccgcgctggacagtccggggcgcaacgtcttttccgacaggatcatgcagacgacgctgtcggcctatcgattcggttgagtcaccctttttcaaacggagaacccacatgctcagttccagcgtacgcatccagacatccaaccccagccgcctgattcgccggttgtgcaagcactggggccacaagttcgaggtgaatttcgatgaccagcacggccgcatcgcgctcggcgaaaccacgtgcctgctcgaagccggcgaggggtcgctgaaggccgagttgcaggcggccgacgaggctcagctgagccggatggaaggcgtcgtggccgaccacctgcagcggatggcgacggacgaaaccttcaccttcgtctggcagcgctgagcgcctcgatggttactgatcgttgctggcgaaattaggtagcgcgtcgaccggacgggaaaaacggaaagggatcgaaaccatcgagtcgccgtaggccttttgcaccacgaaatgcaggtgcggaccggtactacgtccggtgtttccggagtggccgagcagcgtaccgaccttgacctgctgtcccggtttgacctgaacagagccgcgcttgaggtgcaggtaggcactgtgcgtgccgtcctggtgcgcgatcctcacgtagttgcccgccggatccggcagacggccgccctgaccgttgcgcacttccagcaccgtgcccgcccgcgccgcaacgatgggcgtgcccaccggcatcgccacgtccaccgcgtagcgacccttgggcgaattgtggctgaaatcaccgccggcgccctgggagatgcggaacgggccgccttgccacggcagttcgtaggcgtgtcctcctacgctgcctttgcggcccggctctggcgaatagatcagcgagtaactgaacgactgctggtacatcagtggatagctcgcctgacgcttgtgcaaggtggcgatgcgcatgcgggtgcgcgccggtacggtcttgcggatgacgcccttgccgacgccggtgacattgaccatgcgggtcaggcgcagcaccgcctcgatcggcacgtccgtatcgttttgcacgaccatcgccttgccggacccgacgcgggtggcctgcaggcgaacggtgccgggcttgccggagggaagcgtcgcgttggtgatgctgccgcccgccagcagcggtagcgaagcggtggagcaggtgagcagtagcgccagggaaacaatcagccgagtcgaagccataggggtgtgatccgtcacggatgggacaacctgccggcggctgcaggaacaaatccgtaggtttcatgaacgccgcgctggggttgggactcaaggtgttgcgcagggttcagtgccgcacgtcgatatcgcgcgaaagattgagccgtctgcagaacagcgcagttattggggcgcaggtacgccaaggccccgaaaacggggccttgggactcagtcgaaggacttgctcggagttattcctcttctttaatcaactcgaacaacagcaacgaccggccggtcagtgcgtactcgtcgctgaagtcgaaacgctcggcccgcgcgttgggattgttggtgtcgatcaaccggttccagtagatgccttgcggaacctcgggaagggtgaagttcaccacgtcgtggtgcgagttgacgatgatcagcagcgtcgcatccgaacccgcacggcgaatgccggtgggctgggcgcggccatcgaggagcatgcccatgcaccggttgttgccgtcctgccaatgctcgacggccatttcttcagcgtgcggtgccagccaggtgacgtccttgacgcccagctcctcgttgtaggcgcctaccaggaagcgcccacggcgcagcatcggatagcgctggcgcaaacggatcagtttgcgtacgaatgcctgcaaggcacggctttcttcgggaatgtcccagttgacccagccgatttcgctgtcctggcagtaggcgttgttgttgccgtgttgcgtccgtgcgaactcgtcgccggccacgatcatgggcgtgccctgggagaacagcagggtggcgaagaagttgcgcatctgccgaaagcgcagctcggcaatctccgggtcatcggttggtccttcgacgccgtggttccaggagatgttgttgtcgctgccgtcgcggttgtcttcgtcgttgtcttcgttgtgcttctcgttataggaaaccaggtccttgagcgtgaagccgtcgtgcgcagtgatgaaattgaccgaactgaacgggcgccgtccacgctggttgaacaggtcgccggatccggtcaggcggctggcaaagtcggccagttggccttcgtcgcctcgccagaaggcgcgtacggtgtcacggaactggtcgttccactctgcccagccgggcgggaagcccccgacctgatagccgcccgggccgcaatcccagggttcggcaatcagtttggtcttggccagcaccgggtcctggcggcaggccacgaggaagccgtggcgctcgtcatagccgtcgtgctcacgtccgaggatggtggccaggtcgaagcggaaaccatcgacgtgcatttcctcggcccagtagcgcagcgagtcggtcaccatctgcaccacgcacgggtggctcatgtccagcgtgttgccggtgcccgaatcgttgatgtagtagcgcttgtcgtcgggcatcagccggtaataggacgcgttgtcgataccgcgcatcgaaagcgtcgggcccagctcgttgccttcggccgtgtggttgtagaccacatcgaggatgacctcgagatcggcgttgtgcagatgcgcgaccatttccttgaattcgctgatcttgccgctggccaggtatttgggatgcggtgcgaagaaggcgatgctgttgtagccccaatagttgctcatgcccttctcgagcaggtgctggtcctgcacgaaggcgtgaatcggcaggaactcgaccgaggaaacgccgagcttgcggacgtagtcgatcacctcgggagtcttgaaaccgccaaaggtgccgcgcatgtcttcggcaaccgaggggtgctgcatggtgaacccacgcacgtgggtctcgtagatgatggtgcggtcccaaggcacctgcacgggccgatcatggccccaggtgaaggccggatcgatgatcttgcacttgggcacgaacggcgcgctatcgcgttcatcgaagctcagatcgccatcggggtggccgatggtgtagccgaacaatgcctcggaccatttcaattcgccgaccagttgcttggcataggggtcgatcagcagcttgttgggattgaaccggtggccggcctcgggctcgtacggcccgtgcacccgatagccatagatctgccccgggtgagcatcgggcagataaccatgccagatctcgtcggtgtattcgggaagttcgatccgctcgagctcggtctcgccatcggtatcgaacaggcacagctcgaccttggtggcattggcggagaagatcgcaaaattgacgcctagcccgtcccaggtagcgccaagagggaaggggaggccttcgcggatacgcgacgccgtcgctatctgaggcgccgcaggcttttgtttactcatgaaatctccgatggcagctcgtgatcgttgctgtgcaggactcggcaacgccgtatccacccagctcaccatgcgagccgggtggggtggcgctgtcgttcaggtttctttcttagtgcgtggcgtgcgggttttcttcacccctgccggcgtaccttcagccgcttcggtgtcggccttcggcttgggctgcgccgagcctttggccgccgccgcggcgggctttacgtcggagcgtgccttggcctctttcaccggtttcgcagccttggccggcttcgcggcgggggttgcgtcggtcggtttggtggcggtcttgcgcgcgcggctggctggtttttcggctgcgggattaccgctctccgcttcggcaagcttgcgcgccatttcccagtggcgttcgtcctgaccgtgagggcggccttccgatacccagatgtcatacgcgagttcacggatccgctgctcgtctttcttcatcgttctgattctcctgttgaactgatcgatacctgtaaaaccgccacgggcagttgttgtaaaacctcggtcacacgcaagcccgcttgtttgggtgtgactgtcgttccgtcaaaaagtcgctccattgcatgaccgttcagcgcctcgggtacgcgcaccagagtgtcgccccaacgttgcgctggaatctgcggtatctggctatcggccagcagcgggctggacagtcgggccgctacgacgaccaaccagtcgccgtccagctcacgggcgaaggcgatgatccgctcggcgtgctcgccctcgactttcaaaggcaggtagcgcccctccgtgaacagacgtggccgcgcgcggcgcagcagcagggtccgtgcgatcagccattgcttgatgcggccgtctttccagttggccaccagctcgccaagttgcgcctgcgggtcgaatgtcgcgcgacgtcgatcgaagtccacggggcgtcggttgtccgggtcgaccagactgaagtcccagtaatcggcaccttgatacagatccggcacgccaggcgtggtcatgcgcagcaaggtttgcgtcaggctgttaaccgcgccggccggcgccagttcggctgccgcctcggcgatatcgctgcgcagcgtgcggcattcttcaccgagtagcagggcgcgcaggtactgctggcaggcgccttcatattcgctgttggggtcggtccaggtgctacgcagcttggcttcgcgtacggccttttcctgccatttgatgattcgctcgcagtacgtctcgcaggcggcgcggtcgtccaagtcgaggtccagcggccagctgccaagcagaatctggtaaagcagcatttcgtcgccggcggacggagcaggcccatcggccagttgctggcgttggccgtaggcgagctggcgccaatggcgcaccttggcggcaaaccactcggcgcgctcgctgattgccgtcatacgggcacgggtgtcttcgccgcgcttgtggtcgtgagtcgcggtggtcagcagattgcggggaaagtgttcggcacgcatcgagcattcggcatgaaacgcctccaccggcgcgctgaacgtctgcggatcgaacccgacgtcgttgcgcgagagcaagaccccggagcggtagcaggcggtgtcttccacggccttggcggccgcgggcgaggtgagctgctgaaagcgggtgcaggcatagcggcggatacgccgtgccggacccggcggcagctcgcgcaagctctggccgcctagccagcgatcgagcaggtccagtagaggccagtccgcctcgccgagcgtggtgcgcgcgccggccagcgcttgctgaaagaacggctcgtcgacctcacggcgcccccgcgcgcctatataggtgcggtagacggggaagtgcacgatcagctccaacagtgcacggcgaatggcgccaagggtgatgtcgcgggtcatcacgtcatggcgggccacctgcagcagcgcctgcgcgacggtttcgaaatcgcccgccaagggaccggtcagcaccagttgtcgggcttggcggacttcctccatgaaatctgccgggcgctctgccgtttcgctccatagtgaacacagcaccgccttgccggccggatcgtgcagcagcagggacacctgattcatgaattcgtagccggtggtgccgtcgacaccccaatcgtcgtgcaggcgttcaccctcggccaggatcttctccacgtagatgggcacgtgatcctgggcggcttcggctggccgcgcggcattcaaccgatcgacccggcgcctcagctggcggcagtatccgcggggattggccaagccatcgacatggtcgatgcgtaatccgtcgaccaggccttccccgagcagctcgaagatttttgcgtgggtttcctcgaagaccaccggacgctcgacgcgcaagccgcccagctcgttgatgtcgaagaagcgtcgccagttgatgtcgtcgccagcggtgcgccagctggcgagacggtagttctggcgttcgagcaggccgtgcaggcgtttgaagccttcctcggtggtcgagtcgtagtggttgagtgcttcctccagcgtctgccgaatgctgccgtcctccagcagacgggccaggtctgcacgcaacgcacgtgcggtctgatagggcgccggctcggttttcagtgcatcgaaatgctgcgccagggttcgcaattcaggctggtcggtcagtcgcaggatttcgccgtaggtgggcggcgagatagggaagcggtgctcgtagtgctcggcgtagaaagcaccgttttcgatgtccaggcgcaggggaatcttgccctcctgtagcgcctcgccgtagtcgctgccgaggaagggcaccagcagttggccttcgagcaatgggtcgggcgaattccactggatgtcgaaaaactgcgcgtacggactgcggcggccccattcgagcacgtccagccaccaggggttgcccgagccgccaacggccatgtggttggagacgatgtcgaggatcaggcccatgcccttggctcgcagcgcctcgaccaggcgacgcagcgccgcttcgccacccagttcgggattgatgcgtgtcgggtcgatgacatcgtagccgtgcatcgatccggggcgcgccgtcagcagcggggaggcatagaggtggctgatgcccagttcggcgaagtaatcgaccagcgcagtggcgtcgtcgagggtgaaatcacgatgaaactgcaatcgcagcgtggcgctaaggtctctcatcgagcattgcttccagtggtctgccgacgggctcgggcaagggtctcaaggcggcgcgtgcaggccggggagtcgagcagcgtggcgctgtcgccgggatagcggcgccgccagttggggtgggtgtcggtggtgccgggcatgttcggctgttcgagcaggcagagcgcgtcctcgaccggaaacagtgcgagcggcgccggggtgtgcccgatgaacgcgccacaggcttcggccagcacgtcgggatcggtcaggtcgccctgaacctccgccgcgtattcgcgcagcaggcgaagcaggccggcgcgctcgcgttcgcgctcctccagttgcgccgggcgttcgtgttcctgatgctggccgacgcggatgcgccaatcgatgtcgtgaccctgccaccacccgttgatggtcggcagatcatgggtggtggaggtcgccagggcgctgcgcggccattgcatgggtgtcttgaagttgccgtggtggtcacgttcgaagaacagcacgcgcatgcccagcaggccgcgatcggccagtttttcgcgaaggccatcgggcacggtgccgaggtcttcgccgagaatcacagcgttgcggcgccaggcttcgagcgacagcaaccgcagcaagtcgtcgaaggggtaattcaggtaggcgccttccatgggtccggcgcctgccggcatcacccacaggcgcatcagccccatgacgtggtcgatccgcatgccgccggcatgggccagattggcgcgcaccatttcaatgaaggcacggtaaccgttggccctcaggccccagggcgagaaggccgagatgccccagctttgcccctggcgattgatgatgtccggcggggcgccgacactcagggcggccagcacctcgtcctgccggctccaggcctggctgccgccaccgtcggcgccgacggccagatcgctgatcaggccgatcttcatgccagcgctgcgcgcggcggtttgcgcacgttccagcccccgcgcaatcagccactggcagaacgcgtagtagctcacttcgtcggcatgcgtccgggcgaattcatcgactgccggattctgcggcgagcggtactgctccggccagtcgcgccagtgttgtggatggccttcggggctgcgtaacgcagcatgcagcgcctcgaagcggcaatggttttccagcgcctcgccgccggcctgacgaaagctgtcgaagtcggcctgcagcgcgttgccgcctttggtgaaatcgtcgtagagcgcgcgcagcaagcattgccgtgtgcgggagaccgcgtcccagtcgatcagctcgagctgctccaggcgctcgaactcctcggtcaggccgcaggattcgatggcgatgcgcagtggcgtgtcgccgagtatcgcctccggcgcgctgtgcaggatgttgaagaacagccggctggagggcgagtagggactgtagtggccgctgttgccagtgaacatcgcatggatggggctgatgccgagggcatcggcaccgtgtgcagcggcgttgcgcgccagcgcctcgagggccagggtatcgcccagcccgccatcgccagggcggcgcagcccatacagttgcaccgtcaggccccaggcattgggagcgacatcttcgacacgcgggcaggcgtgcggagcgaccgccagggtcacgcgccgcccggcgagttccagttggtgatagccaggcgtggcgatcgcgggcaggcgtgcctgctcatccagtcgtccgccttggcggctcccgtcttccagcaccaactcgtagccggtgccgggttcggcgtagcggctgaggtccagggttacaccctggtccagcgtcagcaagggcggtaggtgggaagccccgttgatggcatcgagtttttccaggctggtctcgatgtcggcttcgctatcggcggggaggcccagcccacagagcaccgcgcgcaatacctcagggctcacccgttggtcgcgtccatcggcatccacccagtcgatggacagacccgccgccttggccagacggttcagtcgttcatcgctcattggcaacctccagatacatcttcgcggtgcgtgccggcagcatgcccatgccgaattcggcgtcagtgtcgcggctggcatgcagcaggcgtgcgcctgcgcttggcggggcgacttcaaggtcgacgtcgccgaggttcagctccaggcgaagttcgctgccgtcgcccagttgccagcgcgcgagcacggccgcctcggccaacgcctgcgcacccagaaaacgagcgccctccaggcgaggcacgatctcccgatggcggatcccgagcagccgctgatacaaggcgagccactcggcatgtccgggctgctcgcgcttgccgaagtccggcatggacgcctcgaaggtctccacggcattcggatcggggatacgttcgcgagtctgctcgtcggcgaactcggaaaattcggcgaactcgccgcggcggccttcgcgcacggcatcggccagctcgccgtgatggctggtgaagaacaggaagggctcacgagcgccccattcttcgcccatgaacagcaacggaatcatcggcgagagcaacaggacggcggtcgccgccttgagcgcatcggcatcggtgaggttgatcagccggtcaccgaaggcacgattgccggtctggtcgtggttctgcagaaacagcacgaacgatgtcggcgacagatgtccgctgggctcgccgcgcgattcgccccgacgattctggtggccctgataaatgaagccttcacccaggaaacggaccagcttggtcgtcgcgtcctggtgatagtcggcgtaatagccctggctctcgtcggtcagcagcgcgtgcaggacattatgtccatcgtcgttccactgagcggtgaaaccctgtgtgagcagactcgcccggttgtcctcgttttccagcacaaggtgcacatggcgcccgggctcggcctcggcacgcacccgctcagccagttcggtcagaaaggtccggtccggaatggcatgaacagcgtccatgcgcaggccgtcgaagcgatagtccatcagccacatcagcgcgttgtcgatgaagaagtcgcggacttcccggcgacggaaatcgatggcatcgccccacggcgtctgttggtcgtgacggaagaagtgcttggcgtagcggtgcagataattgccgtccggcccgaagtggttgtagaccacgtcgatgaagaccatcaaacccaggccatgggcggtgtcgatcagatgcttgagctgctccggcgtgccgtatgaggcctcgggtgcatacagcagcacaccgtcgtacccccagttgcgctcaccgggaaactcggcgagcggcatcagctcgatggcggtgacgcccagatcggccaatgccttgaggcgctgctcgatctgcgcgtagccaccgtaggcgcctacatgaagttcatagagcaccgtctcggcccagggccgcccttgccagtcgcggttgcgccattgataggcatcgggatcgaccacgatactcggatcgtgcacgtcggcggactgggcgcgagacgccgggtcaggcaccgtcagttcgccatcgatgagaaagctgtagtgcgtaccggccccggcctcggcctcgaggctgtaccaaccgtcttcgtcctgctgcatgggcagcgtatcgccaccaactattaccagactgacgctgcgcgcgtcgggtgcccatagcctgaaccgggtgtgcgaatcgtcgagtagtaccggtccgtgtcgcccattgcgggctggcctgctttgcattgatcgacctcgttaagtaatggcatgtgcctcgcgccgcccgcccagcattcgctggtagagccggtcatagggttcgatcgcgtggcgccagaaaaatccgctgctcatggcccggcagcgcatggcattgagcaagtgcggccgctggtgaacctcgagcgcacgctctaccgcgccgcgatagctggcaaccgacgcttcgtcgaagaggaatccggtgaccccgtcatcgatgctgtcggccagcccgccggtgcggtgggcaatgggcagcgaggcgaaacgctgcgcgtacatctggctgagcccgcacggctcatagcgcgacggcatgagcaggaagtcgctgccggcgaacaaacgcctggcgtcggtttcgttgaacccgatgtgggcaccgacccgaccggggaaacgctcggccagacgccgtacctggtcttcgatatgcgggtcgccacgtccgaggatggccagctggccgccgcgctcgacgatggtttcggccaccgagatggtcaggtcgatacctttctgatgcaccagacgcgataccaccgagaacagcggaccagcgccatcgtccagcccgaacagctcgcgaacgtgcgcggcgttggcggcctttccagaccagtcttcggggccgaacgggcttaccagatgcgagcagcttctcggctcccagctttcatcgattccgttgagcagaccgctgagcagcccttggcgggccttcatgctgaggaagccctccatgccgcagccgaattccggcgtggtgatctcgtgcgcataggtggcgctgacggtggtcacgtgcttggcgtaggcgatgccggccttgagcagggaaagtgccccgtaaaattccatgcgctccggaccgcaggcttcctgcggtatggccagcgagcggcgcaggctcatgtcgatgttgccctggtaagccaggttgtgaatcgtgaatacgctgggtgtggtcaggccgcgccagtacatgtaggccggcgtcagtccggtgggccagtcgtgggcgtgaaccaggtcgggcgtccagcggatgcaggccgtgccggcggcgatatccgctgcggtcatgcacaggcgtgcgaagcgcaccgggttatccggccagtcacggccttgctcgtcgccatagggcaggccgtcgcgctcgtagagctccgggcagatcaccacgtagatgatcagcccgtcgggcatgtcgaggcggcctatctggcaagacggcaggtcgctgtgcgaaatgacgctgccgacgatacggatcggctcgccgcattgcatgacctgcgtatagccgggaatcagcacgcgcacgtcatgccgcgccgccaaggcgcgaggcagggcggcggacacgtcggcaagcccgccggtcttgaccagatcggtcagttccgaggtgacgaagagaattttcttcttgtcatcttgcgtgctgcgaagctccagcactggccgctccgagggggcgtccgcagggcgagcaggtttggttgtgatgatggcggcaggccggacgttcaccgcagcaatactcataagtacatccctccaagtgatcggccttcgagaggggccatcacgagcacattcgttccagacagcccttgggaagagctgctaaccatgagcacggcaaagtggtttttctagttggtggagccgcttatcccgcggctttgggctggattggccctaccttgaaaaagaccgggccgccgtgaattagttctcaatttatgacggacgctatcagggggaactttggtattggcggccggttccgaaaattgagctgaaccaggtgtttttcccgtcattcctcggagccaaaaccatgcaagacctcgctgaaattgtgcagtttttaagcgacaaaaagatgaagctgaccactgctgaatcctgcacctgtggcctgatggcctcgttgctgggcgacattcccggctgcggccaagtgctcgatagcggttttgtcgtctactcaccgaaagcgaagaaccggctgctgcacgtcagtttcgaaaccatcgagacctttggcctcaccagtgaagaggtggcgaccgaaatggccgtcggggcgctgaatgccagcgtcgccgacatcgcgatcgccaacacgggcgtcgccgacgacagcgaagaggatgccggcggaacccagtgctatgcctttgccctgatgcaaggtgagcgccaggtgagcatcagcgagacggtgcagttcgaaggtgaccgggtggagatccgcaagcaggctgcacgctacgggctagcgcagttgccgagcaaatacgagcagctgatgcgcaaactgcgtgagcatgactgaggcggccaagagaaaatcgcgcaccgagaggtgacaggccgcgcgtagacgccccgatttgcggcatcttaggggccatgcagcgtcagaccggaggctgacgctctggttgtacgctttccggcaccgagcggtcgacggtcggtttctgcccgacgctgagatcggcgcgcaactgcggcaggcactgagggtattgccgctgaatgaagccgatgaggctttcacgcaggtggcagcgcaagtcccagttgcgggaagagtcctgcgaactgaccaggacccgtagctggagggacttctcgctggcgtcggtgacctgcagcacgatgacccggccgtcccagagttccggtaattcctggcagagccggcgcagctcctcgcgcagcggctccaacggcagggaatagtcgacccagaagaacaccgaaccgatgatgctggagttgcgccgcgtccagttctggaacggcttctcgatgaaatactgcagcggcaccaccagccggcggtcatcccagatccgcacgacgacataggtgccggtgatttcctcgatccggccccattcgttttcgacgatcaccacgtcgtccagccgaatcggttgggtgacggcgatctggatgccggcgatcaggttggccaggaccggccgcgcggcaaagccgacggccaggcccgcgagcccggcggatgccagcaggctggcaccgaactggcgggcggcggggaaggtcatcagcatcccggcggcgccgaccagcagtatgaagaagctcagcgtacgcagcagcacgcgggactgcgtctggatctgccgtgcgcgcaggttgtcggtgacatcaaccggattcttcaaccgcacggcgtgctcgacgccacgcaacaggcgcagcgccacccaggtgatgcagccgatgatcagcagcgtggtaatgcgccgggccgcatcgatgaaggcaagttcttcacttgcagcggccagtaccgcctgcagccctaacaacggcagcaacacccggatgggtttttccaattgctcggaaacggccttggtgaagagaaaaccgcgccccaaacgcagcatcacggccgtcaatacgcggctgaacacactcaacagcaccacgaccaatgccgccgcgagtaaggtgcgcagcccgggttcggtgatgtagcgctcccactgcaggggatattcgagaatatcgataagccggctccgctctgatggtcggatcaaatgactgatggcacctgcgtaagttcaggatgcacgtgcagccagtcggatgcgtggaactcccatgcgcggtccgtttcacaccttatagaaggggaacaccttatcgatatccgaaccactgggagacacaccatgcaaagtgcacaaaccggcagtgacgtgcgcgtcgaacgtttgatcgagtggctacgtgatgcgcatgcaatggaggcgcaagccgaaagcatgctcagcaagcaggccagccgcattcagcactatccagagctgaaggcgcgtatcgagcagcacatcaccgagacgcagaaccaggccaagctgatcgagggttgcctgcaccggtatgacaagtcctattccgggttcaaggacctgggcggcaagatgatggcaatggggcaggccatgggcggcatgatggtcaatgacgaggtcgtaaagggtgcccagatgggctacgtcttcgagaacctcgaaatcgcgtcctacgagatcctgatcgccgcggccaaggctatcggcgataccgagacggcagacgtttgcacgcggatcctggccgaagaagtcgccatggctgagtggatgcgcagccacttggcggaactcacgcaagcctatctgacccgcgcgcaaacgccccacgccgaggccaagcgctgattgcgagcagatggaatgccgaacggtggcggagcaacgcttaccgttcggccattttctcgggcagcgaggcggtcatcagcgcgccgcgagttgcgtaaagctcgaatcgcagttcctgggcgagccgtaccagattggccgcgtcgcggcattggtcatcggtgatgccgaagaccgtgagttcttcaccgccgagatgctcctcgtagaggcgaacggtaacccggctgtcttcctgcgcgtggcagtcgcagcggaagggatgaaggtagttgcgaaggatgttttcgatcgtcaacagaggtagacgtgaagtcatgatcctccctcccatcgtaggtcaagggtcagcgatttcgctcgcggttggttgccaccctgcgcggggacacttctcaacgctagcaggccatgcccggttgtaaacaccagatgatgtccgtttggcggatgaaacggtgagaagcgtgccctgcgacactttcacacactcggcgagggcgccggtaacgatgaggcatctgtatgaaatcgatcacgacgatggtatttgcgagccttgtggcgtcatccgcgttcgcgcaatggcctgccggcacgccggaagacgaacgaggttcgcgaccgagcccgatgggtaatcccacaccgcagcaaaccctcgagacgcacaaggacagccagggccgcacggtaaccgaggacggcaagccggtcgccccggcgccacgcaccgaagccgagccggatcgcgacgaggaagatccttcgatacaaccgggtcgccattccagccacggcggaccaaccgactccgcatcggaccctggcgagctggagtaggcaacgactgaccacgcctcgcacagggacttccaacaggatctttcccgggtaacggagcccgcaccatggccctcgacgagtacaaccgcaaacgtgatttcgccgccacacccgagcccggtggcgaggcgaaacccaccggcaaacgtggccagcgacatgcgttgcaatactgcatccagaagcacgatgcgacgcggctgcactatgacttccgtctcgaactggacggtacgctgaagagctgggccgtgcccaaggggccttcgctggaccccaagtcgcggcgcctggccgtgcatgtcgaagaccatccgctggactatgccaccttcgaagggaccatcccggcggggcattacggcgcgggtgatgtgatcgtctgggaccgcggtatctggattccgcagggcgacccggaggagggctatcgcaagggcaaactcaagttcgcgctggaaggggaaaagctcagcggcagctggaacctggtccgtacacgcatggagggcggcaaggagcagtggtttctgatcaagtcgaacgatgagagcgcacggccggagagcgagtacgacatcgtccgcgagcagcccgacagcgtactcagcgatcgaacgctgatcccgcgcaaacgtggcaaggcgaagcttgaggtcgacgccaaaccggtcaagacgccgccggcgcgccgagcccggaaaaaagccgaccaggtgacgttgtcgggagccaaatccgccgcgctgccggagagcatcaagccgcagttggccaccctggtcgagtcggtaccggacggcgattggcgctacgaggtgaaattcgacggttatcgaatcatggcgcgaatcgattcggggaaggtgcagctgttcacccgcaacggccacgactggacggccaagatgccgcaacaggccgaggctctagcggcactggggctcgagtcggcctggctcgacggcgaggtggtcgttcccaacgaggacggaacccccgatttccaggcgctgcagaacgccttcgaggtcggccgcagcggcaccatcgtctactacctgttcgatcttccctacctgaacggcatggacttgcgcgaggttcccctggaggagcgccgagcggccctgagccaggtgctggagcataacgacaacgacctgctgcgcttctccgccgatttcaccgaacagccggagagcgtgttggagagcgcctgccagatgaaactcgaaggtctgatcggcaagcgtgccggcagcacctatgtgtccaagcgcagcagcagctgggtgaagatcaagtgcaagaatcgccaggagttcatcatcgtcggttacaccgaccccaagggcgcacgcagcggtttcggtgctttgctgctgggattgcacgacgaggcgggcgcattgcattacgccggtaaggtgggcaccggcttcaaccaggtcacgctcaagagcctgcatgccaagctcaaggccctggaggtcgacaagagtccattggccaaggcaccgcctgccgcggatgtgcggggcgcgcactggctcaagccggaactgatgtgcgaggtggcgttcgccgagatgacgcgccagggcgtgattcgccactcggtcttccacggcctgcgctcggacaagcccgcccaggcgatcacccacgagcgcccggcgaaagcggccaccacaggctccggcaaggcggctgccagcaccgcgaacagcgctggcaagatcaagatctccaacccggagcggattatcgacaagaccatcggcgccaccaagatggaactggcgcgcttctatgccgaggtggcgccgtgggcattgccgcatctgcggcatcgaccgctggccctggtgcgggcgccggaaggcatcgatggcgagctgttcttccagaagcacacggaaaagctcagcatcccccatatcacccagctggacaccgcattgtttccagaccatgcggcactgatgaccatcgatacccccgaggcgctggtcagcgctgcgcagatgggtaccatcgagctgcacacctggaacgcggtggcgccagtgctcgatcacccggatcgtttcgtgctggacctggaccccgatccggcgttgccatggaagcgcatggtcgaagcgacccaactgacccagacgctgctcgatgagatcgggctgcaatcattcctcaagaccagcggcggcaagggactgcacattctggtgccgctcgagccggtccacgactgggcggaagtcaaagcgttcagtcaggccatcgcgcagtacatggccaagctcatgccgcagcacttctcggcggtcagcggaccgaagaacagggtagggcggatcttcatcgattacctgcgcaacagtcagggcgccagtaccgttgccgcctattcggtgcgggcccgtgaagggctgggtgtgtcggtgccgatccatcgcgatgagctcgccgacctcaagggcgcgaacctgtggaccatccgcaacctgatgccgcggctggaagagcagggcgacgatgacccttgggagggcatcgatgcgacggggcaacgaatcacggcggacatgcgcgagcggttgcggatgaagtgaccggctggcagccgtatcagttatcgctgcaatcggcgccctggcgcaggtagctcatcacgtgagtttcgcctttcgaatcgaggtaggtcattttggcttcgactacggagcagccaccgttgggcacctctatcgagaccaccttggcgatatcaaggtcgtcgccatagtgatagggcgtcggctgcggggcggcggtcgctagttgagcgaacagggacaagccggcaacccagagtagatgtttcatatgtcacctctttgcgctgagcctcgccagatgtggcgcaggcccggaattaaaacggctgcccaacgagggcaggcagccagaaagcgacaggcatcgaacgacccaaaggagcaactatcgatcgatgcgcgcgggaccggggtcaaccgctgctctgtcactgcgcaaaggataaggagcgctgaagccgggaaaaatggcgctttgggagagacagcgttaccgcagaggtaacaatcgtcagacccagtattcggggttctgcaagacttggtgataaccgaaaaacgcctgcggcaactcacgcttgagaaactcgacccaggtcctgaccttggcgtccaggaagcggcgggaagggtagagggcgtagatcgtcttttcctggagccgaaactgcggcagcagacgcaccagcgagccgcgctgcaaggccggcaccgccacgtagtcgggcaacaggcagacgcccattccggcttcggccgcggcgctcatggcctcggcgacgttcaccttgaaggtttcgcctggcaggatcgtctgttcgacaccatcgctgtggaacgtccagctatcggcgaagactggatcggccagacgcaggcagcggtgccgctccagatcggctggtacctggggcgctccgtgctgcttgaggtagatcggtgatgcgcagaccacatggaacacggtgcccaacggctgcgcgatcaggtccgagtccggcagctcgcgcgacagggtgatgacgacgtcgaggttgtcttccagcagatccggtttgcgctgagagagcatcaagtcgagattcacctccggatggctctcgttgtagcggccggcgagcgatgccagcagctggatgcccaggccgatggtcgagtggactcgcaagcgtcccctcggcaccttgtgtgcgccacctgcttccacgcgggcctgttcgacctgttcgagaatcacccggcagtgctcgaggtagcgttcgcccgcttcggtgagcgccaggcgccgtgtggtgcggtgcagcagacgcgcctggagatggttttcaagctctgaaaccagccgcgacacttgtgccgtcgaggtgtcggcctgctgcgcggcagcggtaaagctgccggcatcgacgacccggacaaaggtctgcatcgcatttagcatatccatcttcaccacctgaacgcctgcgcgtcgttgtcgccgtcaagacggctgttggagtctcgtgcgtcaccccggttcggcgatgcaccgctgcagaaggccctggcaatcggtcgatcacgcctgtacacaccggtttgacggattcttcacacatcgctgacggtttgctcacggctcgctctctaccctgccgcaatctcacatagcagggcgaccaccgtggatcacaaccaaccggatacccgcaggcctcgtggctgggcacttcttgcaagccgtaaccgcctgattctggccaccgccttttggttgctggccgccagcaactggccgttctggcgcgccgtctggcagggtgtcggcggtctacgggagggcaacggcctgttcctgctgaccctgccgctgttcgtactgtcctggttgttcctgttgctcagtctgctggcctggggccgcctgaccaagccggtgctcgcgttggcgctgctggtgtctgccgcagccagctacttcatgaacagttacggcattgtcatcgaccagagcatgctggccaatctggtgcagaccgacactgccgaggccaccgagctgctgagctggaaactcgccgcgtggctgctgggcttcggtgtgctgccggtgctcctggtcagccgcgtccctctggtcccgggcagctggaaaggcgaactgggtcgaaaggccctgggcatggtcgtggccacggcatgtctgggcggcgtcgcgttcagccagtaccagccctacgcctcgttgttacgcaaccatcatgaactgcgcctgatgttggtgccctccaacgtggtggccgcggtccagagctatgccaagcgccagctggcgacgccgacgaagctgacgccggtcggtacggatgcgcatcgcctggtaccggtgtcggcatcccgtcggcccaggctgacgatcctggtggtcggcgaaaccgcacgtgcggcgaacttctcgctcgacggctatgcgcgcgacaccaaccccgagctgtccaggcgcggtgtgctgagcttctcccaggccagttcgtgcggcactgcgaccgcggtttcggtgccatgcatgttcctcgacgtcggccagcacggctacaaggatggcctggcgaagagccgcgagggcctgctcgacgtgctccagcgggcaggcgtcgccgtcctctggcgcgacaacaattcgggctgcaaaggcgtctgcgaccgggttccacatgaagacgtggaccacctgcacgtggctgagctttgccgcagcgacgagtgctacgacgagatcctgctgcacgatctgcaggcctatctggacaagcaacaggatgacaccgtcgtggtgctgcacatgaagggcagccatggccctgcctatttcaaacgctacccgcccgcgttcgagcgcttcaccccggtgtgcgacagcaaccagttggatcgctgcgatcggcagagcatcgtcaatgcctacgacaacagcctgacctataccgaccatgtgctggcgcagaccatcgacctgctcgcacacaaccagcagcgcttcgacagcgccatgctgtacatgtccgatcacggcgaatcgctcggcgagaacggcatctacctgcatggcttgccctatgcgatggccccggccgagcagacccacattcccatgctgctctggctgtcggatggccttgcacgcagcgccgccatcgacacggactgcctgcagcaggagcgcgaacacgccctttcccatgacaacctgttccactcggtgctcggcctgatgaatgtgcagaccaatgcgtaccaagccggcaaggacctgttcaggctctgccagcctgctggtggtggcggtaagctgctggccgcgcagccggtcgatagcgctccggtcaattgagcatcgctgtggcgaactggcggtaacggcctcatgcccgatcaccgatcgggcgtgaagccgcctttgcagccttgcctcgggccttgccctgtcaatgccgaacacgctagcggccggcagctgggacaggtcgttggctctgccagccgccacccagcgcaagaaacaggtcgacctgatcctgcgacaactgcgcttctgaggcggccagcgcggcctcggcggtagccagggtgcgctcggtgtcgaggctgtcgagataagccaaccggccttcctgatacagccggcgggtatggtccgcagcgtggctggcggcgtcgcgggcgtcacgcagggcgtggttgcggcgcaggtcgtcggcgtagcgcgacaacagcgtctgggtttcgcgtagcgcagagagcaccacaccgtcgaagcgggcgagggcggcatcggcaccggcttccgtggcgcgcaccctggcgcggtcgacctgcgtcgggatgtgccaggagatggacggcccgaacgcccagcggcgggtgatcggatcggcgatgtgttcgagcatgccggtgtagccggccgacgcgccgagatcgatttgcggatacatcatcgcggtggcgacgccgatgtcggcggtagccgcggcgagcgtgcgctccgctgcgcggatatccggacggcgtctgagcagcgccgcgccgtcgccaaccggaatcggctgattcagctgcggtgcctgagcgcaggcggcgaccgcttctggcagatcaccgggcgcgcgaccgagcagggcggcgatctggtacagcgcggcggattttttcgattcgaacggcggcaattcggcgcgcagcgcttcgacctgggcccgtgcgcgggcgacgtccacctcattgccgcgcccgccgtcgagcagacgcttggccacgtccaactgccgtcgttgaatatccagcgactgctcggcgatggtcagctccgcgctcgcgtggcaggccgcgacatagttgcgcacgacctgggccacgacggtgatacgagcggagtccagcgccgctgcgctcgcatcggcactggcgccggccgactcggcgaagcgcttgagcttgccgaacagatcgagctgatagccgaccgaaagccctgcgtcggcgaggttcatcaccgggatcttttcctgcagcgccagtgattcgctggacagctggccgcgggcgagcgagccagccgcacccagctcgacttcctgggcgtgatgagccatctggaagccttcataggcgcgccggaggttgtgatacgcgaggcgaacgtcggtgttgccagccagcgcctcgctcaccagacggttcagcatggggtcttcgtacagcgtccaccaatcatccggcagctcggcttgctcgacctgcgcattgccagccagatcgaacggcgcctgggcctcggggcgctgactcagcgcatcgtcaggcacctgatagtcgggaccgacggcggtacaggcgttgagggtgccggccagggtcagcacggcgatcaggtttctacagtgcacagcgccgctcatagggccgccgggcccgtcgagtcggctgatggccatggctgcaccgacagtgtcgcggtgcggccgatgaccagccggatgtcggttttctgatcgtcgtccagcaccacgcgcactggaatccgctgtgccaggcgcacccagttgaagctcgggttgatgttcggcaacagcgagttgccgcgcgcacggtcgcggtcttcgatgccggcggcgatgctctggacgtggccgtgcaggcgctgcgattcccccatgatctggatgtccaccggttggccgatctcgatggcgtgcagtttggtttcttcgaagtagccttcgacgcgcagcgagcgggtgtcgacgattgacagcaccggcgtcccggttctgacgtaatcacccacccgcatggtctggtcgctgaggtagccgtctaccgggctgagcaccgtggtgcgcttgaggtcgaggcgggccacgccgagcgcggcttcggcggtcttcagtgcggcttcggcacgcttgacctgggtatcgccgatttccacggtttccgcggcaatcagatccttcaatactcggttgcgcttggcttcccgacgcgcctgctcgagcagcgctcggcgctccagaacagtggcctcggcttcctcgacggccagctcgaaacgtgcctgatcgatcacgaacagcacctggccgcggctgaccttctggttgtcccgcacgcgcagttcggtgaccagcccggacacatcgggcgcaacctggattatgtcggcatgtacatggccgtcgcgggtccacggcgactccatgtagtactcccagaggcgcaggccaacgatgcaggcgatggcggcggccagcaaagtcagcaacaccgagccggcggcgggtatccagttcttcatggttcgactcatttgttcggctcctggctaaagtcccgctgtcagcgtgagcagggcacccagcaccatgacgtaaagggcgaggttgaacagcggggggtgccaaacccagcgatacaggcccaaacgggccaggacactgccgagcaggcttttgagcaggtaggcgatgagcatcatcaccagcagcatcgggacatagacgccatagatattcagttggccggtcatgcggaggctcccaagggcgcgtacccagcagcggcggggcggggtgggacagcgacgatatcgaacagcgccaggcgcaggccatgcagcgcctggcaggcctcgtccgtggcctgccctggttgcagtgacaggcgttgcaggctgtggtccagcagtcgatgcagactctcgggcgcgggctccggatgaccctgcgttgcgcagcgcttgaagtagtcgtgcgcagccagaaggaccggttgcagctgctgctcgatggtcgttggcagccgcgcttgcttgagttccagcaggcgaaagcagatccgcaattcccgggtggcgtcctgcaaagccagcccctcgtcatccagctgaccaaggcgcggcaacagctgcgcggtgcgatcgatgacctcggaggcgacctcgtcgtaatgttgtccaggcctggccagggccaatcgcgacaggctgagccaaccgctgcgggccagccggcgggccgcccactgcgtgccgaatggccgcgtcaggcgggcccagaccagggccagcaccacgccgagagcggacgacagggcagcatcggcaaacagtgggaaatcagcgctgtaccggtcctgaatggtgagcgtggaaatggtctgcaccgccagcagaatcgtcgtgccggcatattgcggacgccccgagaaggtgcccagcagcagcaaaggcacggccagaaggatggccaggctgccgaaatcctgcacattgggcatcagcgcgaacaggtaaatggccgccgctacgatggaggccagcgtggtcagcagaaatgacttgatgaacggtgccgggttgtcctggctggcgaaaaaacagctggcgaccgtggcgatgaacacaccggtatagccgtgctgccagccagacaggtgccacagcaggctgatcagcaacaccagcgtgccggttgagaaggccgtaaacgccagtaacggatagtcgtaatgacgcggtgcgccgatcagctgtcgcacccggtagcgcagcacgggcggctgctcgggatgcccttcggcgaagcaccggtgcaggctcaaggcatcctgccagagatcgatcagcccgcgcagttgcctgaatgcactggcgaaggccagccgctgcaccgggtagctgtcgcccagccaggtttgcaattgccaactgcgctctgccagttgctcggcatcgccgtacgcataatcaccctgcatccaacggtcgacgcgctgcagatgcgcatcgagttccggcagcggttcggatagatcctggcgcagctggcccaaggcatcgcccagggacatcaactgcggggcgagcatcgcaatgcgggcgcgaaagtcccgcgcatgcctggctgggagacggctgctgctgtcgtacccgaggtgcaggatcatgccgtcgagggccatcacatcgatcatcagccggtgcagcccgcgctgatcgaaggcggcgggagccgttgcggtgagcatctgccgcgccccctgccgggcgtcctcgagcagcatccccatacgagcactcagcaccggggcaatacgggtaggaaacagcacggcattgaccaggccggcgcagacgatgcccagcagaatctcctcggaacgggccagggcgacatcgaagatgtcttgcggatggctgaccgtggccaggcttatcagcggcacggtataggccgccagcatgaagacgtagctgcgtggcgagcggtcgagcagcgagagatagagcagggcggtgatccatagcgcgatcaccaggctcaacatcaccggctgctgggagaacagcggcaacatcgccaccgatgccgcggcgccgagcagtgtgcctagcgccctgtagatcgccttcgagcgtgtcgccccggaaagcggatgcgagacgatatagaccgacgccatcgcccagtaggggttgtccagcggtatggcgagggcgatgtaaagcgcaagcagggcagcaatcagcgccttggctgagaacagccattcgcgccaggtcggcatagtcatatggattcgtttttttttcgaggccgaggcggcgaaggacgggcagagcgccaaggcagatcacacacaagtggttacatttaacgccaaccgggtgtgacaaatcgaacaaccaataggacaattcgcactttcgtttgccgccgcgatcgcctggccaagagcgatccggcagtccaaaccgtgcgaggcgcgatgaaacgaatccccaactatgggctctatggcgaaacggcccagccggcctggcgagacatgctgcactgcgaatggatcaacgagcgcagtgctcagtaccaatgggaaatcaaaccccatcagcacgatgcattgctgcagttgatgtatatccgcagtggcggtggcgaggtttcgctggaaaatcaacgcctgccgttcgccggcccgagcattctggtgctgccgaatcgcaccgtgcatgccttcagttttcagcgcgacactgacggtcccgtctttaccgcggcacagcgtcccctggaatcgatggcgcggatcgtcgcgcccgggctgctgggctttctgcagcgccccagcgtcgtgccgctgccttggcaggccgacggcagcgaaccgatctggccgctgatccagctgatcgaggaggaggcgcggagcaaggcccgcggcaatatcgctgcgggccatgcgttgttgctgacgttactgatccacgccgcgcgattggacgcttcgatcaacacggccccgcgacccggcaaaagccgccgtgccgccgtgctgaggcagttccgcgaactggtgaatcagcattttcgcaatcactggacgcttgggcgttatagcgaggccctgggtatgaccacagccacgctcggtcgtgtttgccgggaggaggcgggcgtcgcgcccagcgctatcatcagcgagcgcatagtgcgcgaggcgcagcgccagctggcctacacgagtctgcatattcagcagatcgcccatgaattgggcttcgccgataccgcctacttcagccgattcttccgcaaacaggccgggctcaagcccagcgagttccgggcttcgttcaaacggtgaacaaaaatggttaacgtcgtttcccgatgactgttgcgtgaccggtaacagtgcttcatgcggagctgtctgtttccgcccatgcctcaactctaagctttgcctcaggtttcacgtcgttacatttctgaggtaaatcatatgaaccgcatcatcctcgccgcagcgcttgctgcctctaccatcgtgctttcgcccatgtccttcgccgaggagtcatccgccttcgcggctcacttcgctgcgctgcaagactccgccgcgggcgacgcgtccgagcaaatcgcgaccagccagcatgcaaccgaatcgcaggctgacaaggacagctgactcaacgcttgctgatggttgtacgctgggtattggcggccacgaagaacaccggtacggcatgtgtcgtgccgcggcccggtagtctccgagcgctgtatatttccggttggcgttgaggcagctgcaagctcagcgtagccccggctatctattgctcggtaccgttgtggtcccgcagcatgctcggcaatagcatgtgtctcaagccgcattctctggccaggctttgcttacgtttaaactggcagaaagcgagagccggcggttcttgacgctaggcgtgtgcgggggcgtgcgatctcaatgtcaggcacgttcatggcgttggttttcattaggcgcttcgcacgatgggaaactggcgatcgctttgagcgaggatctgacgggctttactgttcaagaccgctccaggatgaataaggcgcttcgcataatctatattatgttaaataaggtatatggcggttagctccaggtacctgtcgtagcctctctcatattcgtcagcatccgatatccagcgccgcgccgtctttgttgacaagcgcggcctgttcttcccggttatgggttttgcagtacgacgctgcgaatgtcgtccgccagttggcgtacgcgttcctcgctggtgtcccaggaacacatgaaccgtgcgccaccgaccccgataaacgtatagaacatccaaccgcgactcctgagtgcctccagcgccaacggtggcatgttgatgaacacaccgttggcctcgactggaaacatcagctccacgcccggcacgttgctgatcaggctggcaagcaattgtgcgcaaccgttcgcatgttcggcatatttcatccaggcgtggttttccagcagtccgacccagggcgcagacaagaaacgcatcttcgatgcaagctgaccggcctgcttgcagcggtattcgaaatcttcggccagtgcccggttgaaaaacaggatggcctcaccgaccgccatgccgttcttcgtgcccccgaaacagagcacatccacgcccgacttccagctcagttcggccggcgacagcccgagaaatgcacaggcgttggcgaaacgcgcgccatccatgtgcagatgcagccccagttccttgcaggtatcgctgatggctcggagttcgtccggccggtatacggtgccgatctcggtggcctgggtaatgctgacgacgcgtggcttggggtaatggatgtccttgcgcttgagggcaacctctcgaatagctgcaggcgtcagcttgccttgctcggtgcgggcaacgagcaacttggaaccgttggaaaagaactccggtgcgccgcattcgtcggtttcgatatgggcgatatcgccgcatatcacgctgtgatagctctgacatagcgaagacagcgccagggagttggccgcggtgccattgaacgcgaaaaagacttcgcaatcggtctcgaacagctggcggaaatggtcggctgcccgtgcagtccattgatcgtctccgtaggcgcgatcatgtccctggttcgcgcgagccatggcttcccaggcttcaggacagatgcccgaatagttatcgctggcgaattgctgattggcgttggtcatttgtacctctttcaagtggctatctcagctactgatcggcaagaaaattacggtgtagaggcccagtgcgccaaggacgaaaaccgaagcgcccagccagaaaatcgagattgcatcggcctggatgcgcccgcttttcacgccgctcgcgctacgggcgtaacggcgctgctgcgtggtccatatacccaacgccgtcgccagcgatagcgcgaccagcatgccgacgaaagtcccgtgataaggcatccagcgcagaaacagcgcgctcacggtaatcatcgtcagcagcgttcggccccaggccagcgaggtgcgttcgggctgcaggcccggatcctcatgcagcggcggtcgcggcgtgccgggttccaggcggcgacgaaaggaaatatgcatcgttaaccgcgaagcgcgatgaagctgatcagcaccaaggtcaccagtgtgccgccgatggacagaatcgggatcagcaagggaaacggcaacggcccgctgtgccgcatggcgcgctcgatggtgagccagcgcacgcacgccgtcgagctgatgaacatggccaacagcaacaacgagaccgatagcaccttgcgcacctccggcgtgaagatgccgccggcaaaggcttcgaccgccactccgccggccagcagcgccaacgaggtgcggatccaggcgaggaaggttctttcattggccagcgtaaaccgcgggtcgggctcctttcctccggacaacaaccggtgactccagcgacttcgctccatgggtgattcgtctccgaacaattgagggccaggggccttgcccattcaaacagaaacgcgtgcccactgcaggttccgttgcaatcatccgctcgtgggaatgaccgttctggctacgaggcgcccttgcgccatgctaatgttcgccatcgaaaccgtcttggagagatttcatgctgcttcgtctggtcaccgcttttgcgctcgccacggccactctgactgcctcggcagatgaacattcccacgctcatcacatgatggccggagcacctgtcgcgcatcaggtctggtcgcgtgccatgccgccgacggccccgacgggtgcggtgtatttcacgctgagcaaccccggtgacacggcagatcggctgataggagtgaaaaccgcccgggccgaaaaggccgagctgcacgcacatgtgcatgagggtgacgtgatgcgcatggagcgtatcgactcgatcgaggtgccggccggcggtgaggtgcagttccagccaggtggcaatcacgtcatgctgttcaaattgagcaagccgctggtagcgggcgagcaatttccgctcacgctgattttcgagcatgccggcgaagtgaacgtggacgtttccatacaggaccaggcgcccgcggcgaacgataacgctcaccagcaccactgagtggtcaagaccgctcctacaacgcaccagggcaaccgtgggagcggtctcgaccgcgaaggcttccccaggcagatagaccattcagtgcgggtcattacagggaaggcttgagaggcacgtagacaccgaagagctcgcggtcaagaccgctcctacgacgccacacatccgtgggagcggtctcggccgcgaaggcatccccaggtagatagagcgttcagtgcgggttattacagggaaggcttgagaggcacgcagacgccgaagagctcgcggtcaagaccgctcctacgacgccacacatccgtgggagcggtctcgaccgcgaaggcttccccaggtagatagagcgttcagtgcgggtcattacagagaaggcttgcgaggtacacagataccgaaaagctcgcggtcaagaccgctcccacaacgcaccggcaatcgtgggagcggtctcgaccgcgaaggcatccccaggcagatagaacattcagtgtgggttatcactggaagactttagagccaggcagacatgcccgaagagctcgcggtcaagaccgctcctacaagtctgtgcactcctgtgggagcggtctcgaccgcgagtcggtggcggctaaccgacctgctcgctcccctcttctaccgtcgccaaaccggcaggctcgcgccacgccaccgtcagatgccggtaggggtacgcatggtcacgaactcctcggccgcggtggggtggatgccgacggtatcgtcgaagattcgtttcgtggcgcccgccttcaatgccacggccatgccctgcatgatctcgcccgcatccggcccggccatgtggcaaccgagcaccttgtccgtttcggcatcgaccaccagcttcatcaggctgcgttcaagtccaccggtcatggtcagcttcatcggccggaaccggctctcgaacaacaccactttgtggccctgcttgcgcgcttcttcctcagtcaaaccgacggttgccatgttgggcaggctgaagaccgcagtggcgatggtgttgtaatcgaccggccgatattcctcgggtttgaacagccggcgggcaacggccatgccttcggccagcgcgacgggcgtcagctggatacgaccgatcacatcgccgatcgccaggatcgatggcgtcgaggtccggtactgatcatccacggcgatgaagccccgatcatccaacgtcacatcgagactctccagccccaacccgtcgagcatcggccggcggccagtggcgtaaaggatgcagtcggcctccagcgtgcggccgtccttcagaacggcgagcaggctgccgtccggctgcttgtcgatacgggcgatgtcggtgttgaactgcaggtcgatgtctttcttgatcagctcgtctttcaaatgatcgcgcagcgagccatcgaacccccgcaggaagagctcgcctcggtacagcaacttggtatcggcgccacagccccggaagatcgaggcgaactcgacggcgatatagccaccaccgaccaccaggacgcggcggggcagctcgtccagatagaaggcttcgttcgaggtaatcgcatgttcgcgccccgggatttctggaacgaaaggccagccaccggtggcgatcaggatgtgctcggcggtgtactgccgcccttcgacttcaacggtatgagggtcgaccagccgcgcatgcgcctgcatcaaggtaacgccgctatcgatcaggagattcctgtagatgccgttgaggcgctcaatctcgcgatccttgttggcgatcagtgtcttccagtcgaaggtcgcgccatcgatggtccagccatagccttgggcctggtcgaggtcttcggcatagtgggcgccgtagaccagcagttttttcggcacacagccaacgttcacacaggtgccgcccagataacggctttcggcaaccgcgacgcgggcaccatagcccgctgcaaaccgggcggcacggacgccgccggaaccagcgccgatgacgaatagatcgaagtcgtaagccatgaacggttgtctcccttgtcgaacgcacagcataacccaggctttgcacacgattcattcggaggactgacgcatgcgccctacccttacccacctcgctttgcacgtcccggatctggatgcctgcatcgatttctacgcgcagttctgtggcatgcacgttttccacgagcgtgcgggaaaaggctcgcgcatcgtctggatggccgagcccggcaaggaacgcgagttcatcttcgtgatcatgcccggcgggcaggaccgtgccttggccgagaatgactacagccatttcggcttcgcgctcgccagccgcggcgaagtcgatgcgatcgccgatcgtgcgcgccaggccggttgcctgatatgggagccacgcgacgagccctacccggtcggctattactgcggcgtacgcgaccccgcgggcaactatgtcgagttcagctatggccagccgctcggtccgggcgcggaagaaatgccggccccctgaatgcacaaaaccacccgaaggtggctttgtgcagaaccggtggccgattagaaggctttaccggtcaggtagaaattctcgtagcagaagttggtggcggcgatgtaaccctcggcgctaccgcagtcgaaacgctgccccttgaatttgtaagccagtacgcaaccgtcctgggcctgacgcatcagggcgtcggtgatctggatctcgccgcctttgcctggttcggtctgctcgatcaggtcgaagatgtccggcgtcaggatgtagcggccgatgatcgccaggttcgacggtgcatcttccggcttgggcttctcgaccatgtggctgacacggaaaatatcgtcccggatcatctcgccggcgatcacaccgtatttgctggtctcttccggcggtacttcctgaatcgcgacgatcgagcagcggaactggttgtacagcttgaccatctgcgccaggaccgggtcgccattaaggttgatgcacaggtcgtccgccagcaccacggcgaagggctcgtcgccgatcagcggacggccgctgagaatcgcatggcccaagcctttcatttcaacctggcgggtataggagaagctgcattcgtcgatcagcttgcgaataccgaccaggtacttctccttgtcggtgttacggatctggtgctcgagttcgtaactgatgtcgaagtggtcttccagggagcgcttgccgcggccggttacgatagaaatctgattcaaccctgccgatagcgcctcctcgaccccgtattggatcaggggcttgttcaccaccggcagcatttccttcggcatggccttggtggcagggaggaaacgcgtgccatatccggccgcaggaaaaaggcatttcttgatcatgtgagtccttgaagaggaaggttccagttgatgcactgcgcctggatcggtcagcagtcgtacctgcatgttccgccgacagcggctgactagaggctacgaccatcgaaacgatgcggggttcgacggctatcgatgcgaatttcgctcgcttcgccgcccgaccgaaggccattgacatggcctgggcatagcgtgcggcggcgcaccgaaattgccaagtggctacacgcaaaaatgaagtcgattccggccgaataagcgccgccctcgaaggttttgcatgcggcctggtgtcgcaatgcgccgcgctgatgatcgatcacatgacgaacgtgcggtcgagacgagtgcgcttactgatccagatcaggaaaacggcgaaaaattttcgtttcgtcgcgtgccataacgctctgtcgagcgagaccgactaggatgtcggcggccgtattgatggcattgcgcctgcacgtcgccagacagcaaaaacccttgtaaagacaagggacatacggccgataagcgaagcaaaagaagccgctggcaaccagcgccccgcgaccgttcacaggacttggggtcggcttcgtttcgttggcagcagtagctaaggatcctcatgaacaacacctttccagctcggcaaatgtccgtccagtcgaagatcaacctggctctgctggtggtgttcgccttggtcctcgccgcctccctcctccattcggcgggttccgagaaagacctcgttctccaggtcgtcgagcagcagaccaaggacgctgccgactcctatttcgacagtatcaacaccatgatgctcaccgggacaatggcccagcgtgaggtgctgcgcgacaagctgctggcgcgccctggcgtgatcgacgctcgcatcgtgcgcggcgagccggtcagcaaggtcttcggccccggcttcgcccatgaggcacccgccgatgagcacgacagggccgcactggcgggcaagtcgacgatggaggtgagtgaaggcaagaacggccgcgtccttaccgtcatcaacccgatccttgcgcatcaggattaccgcggcaccaactgcctgtcgtgccaccaggttcccgaaaacacggtgatgggcgcggtgcggatcagttatgacctgtctgtgctcgatggtgaagtcaaccgtaacgtgatgacctcggccggcattcagctggcactgttgctgatcgggctggtggtcatgggctacatcattcgccgggtgatcatcaaccgcatcaacgacatgcggcacaccatggaagcgatgaccagggacgaggatctgagccgcatcgtctccgtccatgccgaggacgaggtcggcgccatgggccattcgttcaaccacatgatcggtaaattccgtcacagtctcgaagcggtggcgaaggttacgcatcagctaggcgaagtgtcggatcgggtttccagcgtagcggaaaagacccattcggcggtgttggcccagcgtagcgaaacggacatggtcgcctctgccatgaacgagatgagcgccaccgtgcaggaagtggcgcagcacgccagccagaccgctgcggcctccagcggcgctgatgaacagtcgaaggcaggcgtcaccctggcaaccgaggccctggacggcatcgacgggctgatccgtgagatcgagcaggctgcacaggtgatcaagcaggtcgaaaccgatgcgacctcaatcggcatggtcctcggtgtgatcaatggcatcgccgaacagacgaacctgttggcgctcaacgcggccatcgaagcggcccgtgccggcgagcagggccgcggctttgcggtcgtcgccgacgaagttcggacgctcgcctcgcgcacgcagaagtccacgggcgatatccaggccactatcgaacagctgcagaccggcgtgcgcaaagcagtgaaggtgatgcaggatgcccaggagcgcgccaatgccggctccacctgcgtcgccaaagcggcccagagcctcaatggaattgctggcgaagtcggcacgatcaacgacatgaacatgcagatcgccacggccgccgaggagcaaagcgcggtcgccgaggagatcaaccgcaacatcaccactatcagcaacatcgccgacaccaccgcagccgatgcacagcaaacctcgcagatcagcgacgagctcgtgcatctggccgccgaactgaatcgcctggtcggacagttccgcctctgagtcatccgaggccgggcattgcgctgcccggctctctaccgaccccgaacttgatctgggacagccgactccgtcgccggaatcagggataatcgcgccacgatgtcgcaggccgccgacggcaatccgtccagccaacccgccaaacaacccaggtgaaccccacatggaccatacgccgagctttaaccgcgccctggtcgagaagtacgaccgtcccggtcctcgatacacctcttatccgactgcgccgcagttccaccaggcctttgccatggacgactaccgtagcgccgcgcgaaccaccaacgaggccgccgcgcccaagccgctgtcggtgtacatccatatcccgttctgcaagagcctctgctactactgcgcgtgcaacaagatcatcacccacaagaccgaccgcgccgccgagtacctcgactacctcaagcgtgaaatcaagatgcaggccgcactgttcgatcgctcgcgcaagctgacgcagctccacttgggcggcggcacgcccacctacctaaccagcgaacagctcgccgacctgatggccgcgctgcacgaagccttcaacatggacgacagcgacaaccacgaattctcgctggaagtcgacccgcgcaccgtcacccccgagcagatccatcagctgcgtgccctgggcttcaaccgcctcagtttcggcgtgcaggacttcgacgagcaggtacagatcgcggtcaaccgcatccagaccgaagaacagacacgggacctggtccaggccgcgcgtgaagctcacttcaagtcgatcagcgtcgacctgatctacggcctccccttgcagacggtggagagtttcaacgtcacgctggacaagatcatcgacatccgccccgaccgcatcgctgcctacagctacgcgcacctgccggatctggttcgggcgcagaagctgatccgcccagaagacatgccgccgccggagcgcaagcttgagctgctggaactgaccatccggcgcctgaccgacgccggctacgtctatatcggcatggaccacttctccctgccggacgacgagctggccctggcacgcgccaacggcacgctgcagcgcaacttccagggctactccacgcacgccgactgtgacctgatcggccttggcatttcgtccatcggcaaggtcggcgacagctacagccagaacgtgaaggagctgtcgcagtactacgcgcgcctgaacgagggcctgctgccggtgcatcgcggctacaagctcagcgaggacgaccgcctgcgtcgtgacgtgatcatttcgctgatgtgtcatggacgggtcgatttcagcgagatcgagcagcgatacggcatcgacttccgcgactatttcgccgattcgctggccaagctggacgaacatgtcgccgatggactggtcgagataaccgacgacgccgtcgtactgttgcctcaagggcacttgatgatgcgtaacgtcgccatggctttcgatgcctacctcggcggcgaacagcgcggccgcttctcccgcaccgtgtgacgagctgtctgggctacgccgcctcatacaaaggcggcgtacaccaggcagacgccccgcgcgtcagatgccaaagcttcgtgccgaggtcggccctcccacagaatgcagcggttgcgccccagatttttattggcgcgccccgcagcgaacgcaggcgaaggcgcgccagacgcaaaagcttcccagcgctaacaagtgcacttcgccgcgtttatgcgccccgccgctatctaaccatctaagcgcagcggaccgcctgaacaccgccagccttgggccggtcatcgcatttttcatggctgcgacagttcaaagccgttgatcgtaccggcgttgccaaacctggctataactgtataaatacccagccttggggcggtgtgcccctgtacaaccgaaccggacgttcgatgcgccaggccctggaaaaccccttctactacctcgagaactttcggcaagtgctggcctgggtcgctgagcgtcacggcgacctcctggatgatcgggagcgcgccttcctggaccgcttcaaccaggtcccacaagcctcgcaggcgctgctggttcgcatggtgatgcgcaagggcacgctgttccgggccagcaagttgcgctatgtggaaatcgggtgcccggtgcaggcctcggcttccctggtcgagcacggctggatcgaggccaacccgacgctggagctcgcccagttgttcgatctgctgaagaaggacgaactgcttcgtgccctcggccacaccgcgcacaacggccagcgcaagcgtgatctgttgcaggccttgcaggccgagcatccccaagccaagcccttttcggactggtgtgaaaccctggatgatctggcgttcgggctcaccatcagcgatctctgcgaccggctacggctgatgttcttcggcaacattcatcaggattggtccgagttcgttctcgccgacctcggcatcttccgctacgagcaggtcgccttctcgccggcgtcacgggccttccatgcgcgcgccgacgtggatgcctatctgcacctgcatcgctgccgggagcgtttcgaagcgggcgagccgatcgacgccgtgctgcgcgacgtgcccacgacgccgtacgccaacgactggctggaacatcgccgcggcaagctgctgttgagcctgggccggcaatgcgagcgtgagggcgacctgtccctggccctgcggctgcacgccggcaatcgctatcctggcgcacgcgagcgggccatccgtgttctggagcgttgcgatcagccagaggcggcgctggggctggcgctcaaagccgatgcggagcctgaaagcgagcatgaagcccagcaactgcagcgtatcctgccgcgcctgagacgagcacttggcggacccgcagcgcggcgcgccagccctatccagcccgagcgaatggacctcacgctgccccggcccaatggcatgagcgtcgagcacgcggtgcgcgagcacctgagtggcgacgatgcgccggtctattacgtggaaaatacgctgatcaattcgctgctcggcctgctgtgctgggatgtgatcttcgcaccgctgccgggcgcgttcttccatccgtttcacgcggcgccggcggacctggctcgtcctgacttccatgcccgtcgcgccgggcttttcgatgaatgcctggccaagctgggcaccgatgagtaccacgactgcatccgccgtgtgtttcgcaacaagttcggcattcaatcgcagttcgtcagctgggggctgctgaacgagcaactgctcgaagacgcgttgtcttgcgttcccgccgagcatctgcgcctgtgtttccagcgcatcctgagggacgtaccgaaccaccgcagcggattgcccgacctgattcaattctggcctggcgagcggcgctaccggctgatcgaagtgaagggccccggcgatcgtctgcaggataaccagaagcgctggatagacttcgccctgcaacacgacattcccatcgccgtctgctacgtgcaatggaccgagggcgcgccttgagctatcgggtcgcagttcgcgccctgtgcgagttcaccgccaaagagggcgatctggatcttcgcttcacgccctcccccacggcactggaaggcatggccggacatgccaccgtgacaggccgccgagcggaaagctatgagcgtgaagtgacgctggaaggtgcctatctggatctgctggtccgcggccgtgcggatggatacgaccccgagcggaatcggctggaagagatcaagacacaccgcggcgaccttgcacggcagcccgccaatcaccgccagttgcactgggcccaggcgaaaatctacggcgctctgctgtgtgcatcacgcgggctggagtcgctgaatctcgccttggtgtacttcgatgtgggcagtcagaaggaaacggtgctggccgaagcgttcagcgctgtcgaattgcaggcgttcttcgaagcccaatgtcagcgtttcatcgcctgggccgagcaggaactggcgcatcggcaggcacgcgatcaggcgctcacgacgctgaagttcccctacggtgaatttcgacggggccagcggcaactggccgaagccgtgtacaaggccgcttgcaccggtacgcacctcatggcgcaggctccgacaggcatcggcaagacgctcgccacgctgtttccgcaattgaaagcctttcccggccaccagatggacaagctgttctttctcgcggcgaaaacctccgggcggcaactggcgttggatgcgctggccagtctgacaatgcccgcaatgccgctgcgggtgctggagctgaccgcgcgggacaaggcctgcgagcatccggacaaggcctgtcacggcgagtcctgcccgcttgcccgtggcttctacgaccgcctgccggctgcacgtgcagaagcgatcacccgcccggtactcgatcgggcagcgctacgcgacgtagcgctggcgcacgaggtctgcccttattacctcggccaggaacttgccagttgggtcgatgtggtcgtcggtgactacaactattacttcgacctgagcgccctgctctacagtctgacgctggccaatcagtggcgggtcagcgtgctggtagacgaagcgcacaacctgctggaacgtgggcggagcatgtacaccgccgagcttgatctcaggagtttcaaaggcttacggaaggtcgctccaaacaacataaagaagcacatcgagcgcattttgcgttgctggagtgaactgcacagcgcacagatcgccacctatcaggttcaaccggagctgccccacaagctgatcggtgcgttgcagcaagccatcagcgccatcaccgatcacctggcggagcagccagcaggcgtcgacccggcactgctgaatgcgtatttcgacgcgatgcacttctgccgtctggcggaactgttcggatcacattcgctgttcgattgcacgctgctaccgcagcgcgcatcccttgggcgaagctcagtggtctgcatccgcaacgtactgccggccccctttctcggtccccgtatgctcgaagcacgatcctgcgtgctgttctctgccacgctcagcccgaggcagttctacgccgacaccctgggcctgccacgcaatcaggtctggatcgacgtcgaatcacccttccgggccgagcaactggaggttcgtctggcgcgacatatctccactcgctatcaggaccgcatggcctcgctgcagacgatcgtcgatctgctcgcgcagcagtatcagcagcgccccggtaattacctcgcgttcttcagtagtttcgagtatttgcagcaggtgaccaccctgctagcgagcaagtacccggcactgcccttctgggaacagacgcgcgggatgcacgaagcggcccgtagcgacttcctcgcgcgcttcactgacgagagccgaggcatcgggtttgccgtgttgggcggcgccttttcagaggggatcgatctacccggcgatcggttgattggcgccttcatcgcgacgctgggtctgccgcaggtcaactcggtcaacgagcagatgaaagcccggatggatcagctgtttggcaccggctacgactacacctacctctatcccggtttgcagaaggtggtgcaggccgcaggccgggtgatccgtaccaccgacgaccggggcatcgtccatctgctggacgatcgcttcgcgcggccacaggtccgatctctgctgcccagctggtggggcgatgcgctctgaccgatagtcgtcacacctcttcgcacggtgtctcgttgtccggttgccaagcccgctcagccctggttccccaagacgtcaactgtgcggacgacttagacattagtctgacggctaacagttctttacaaattgcgttgacaagcgttgcccgctagccataatcccgaatgtcgtatgacgactgataacagatttcgagtcacgacacgcgaccgcctgccagcggccgcgctaaccccactgtcgttttcggccaccggccgcgcggagtgggattacctaaaaaagggagcacaacaacaatgaccccacgcaaccccctatctgccgctgtattcgcgggcacgctgtcgttggcgcttggcattcctgccgtcgctcacgccgcagatggcttcgttgaaggcaccaaaatcagcctcaacgcccgtaacttctacatcaaccgtaacttcgtcgatcccgactacaacaatggccagggcaagggcgaggaatggacacagagcttcattctcaatatccagtccggttacacccccggtccgattggctttggtgttgacgtgctggccggtctggcagtcaagctcgacggcggtggcggcacctacggcaccggcctgctgccagtccgcggcagtggtgacgaccgttatccggccgatgactatggccgtgtagcgcttgccgccaaagcgaagttctccgaaaccgagttgcgcgtcggtgagtggatggtggtgttgccgattctccgttcggacgacggccgctcgctaccgcagaccttccagggcggcatgatcacgtccaaggagatcagcaacctggccttgtacggtggccagatgcgccagaacagcacccgtgatgacgcgagcctggaagacatggtgtatggcggcgcccgttcggatcgcttcaatttcgtgggtggtgagtattccttcaccgacaagaccaaggtcggcctgtggcatgcccgtctggaagacatttatcagcagaactacttccaactgctgcacacccagccgctgagcgacaacctcgccctgaccgccaacctcggttacttcaccggtaaagaagaaggcagcgccctggcaggcgatttggacaacaagaccttttccggcctgttcgggctgcagatgggatccaacaccttctatgttggcctgcagaaggtcagcggcgacaacggctggatgcgtgtaaacggcaccagtggcggcactttggggaacgacagtttcaactcgagctatgacaacccgaacgagcgctcctggcagcttcgccatgacttcaacttcgccggcgtcggcgtaccgggacttacgttgatgaaccgctacatcagcggcgacaacatcgaagcaggtggcgtcgacgacggcaaggagtggggtcgcgaatccgaactggcgtataccgttcaaagcggcgtactgaaaagcctgaacatcaaatggcgtaactcgagcatccgtcgtgactacagcgccacggagttcgacgagaaccgcctgatcttcaactacccgatctccattttgtaagcgtcatccaccacgctggacgcaacactcctcgctcctgttgcggaaactttcgcccgtccttgtgacgggctttttttgcctgcagtttctaagcagagccagacgggcaccaagtacccggatactctccaagcgggctctgcccgcgaaccgccgcaaccagaggttgctcctacaaggagccggctattcactggctaaacaaaagcgcctcacccctgtaggagcgggctctgcccgcgaaccgccccacgcgaaagccgaggtcgcaaccagaggttgctcctacaaggagccgcctattcactggctaaacaaaagcgcctcgcccctgtaggagcgggctctgcccgcgaaccgccccacgcgaaagccgaggtcgcaaccagaggttgctcctacaaggagccgcctattctctggctaaacaaaagcgcctcgcccctgtaggagcgggctctgcccgcgaaccgccccacgtgaaacggggggctcgcgtttcgatgcatcaacgggcgctacgagccgctacgcgctgtccttcgaatttgcatctggcaactgacctgcatcgcctcacccggcaacaacacctgcattccgttagcgaccggatcgtccatgccaagggcgttgttggcgtgggataccggttccaccgcgaagaagcccagttcggcaggcggcgtgaacaccaccagatgatccagtgcctcgctggcgtgcatgctcagctcgacgccctgccctggccagcggatcagcactggcgcggtccggccgacgaaacagttgtccaaccctggctcctgcagctgcctggttgtcgcgaaatcccattgcgctggaatctgcgacagatgcgacggcaggccttgcgaaccgttttgccaaacggagcgcgccgcgaactgcacctggcaatcgtcatggcgcaggaagtacggatgccaaccgagcccagccggcatcgagcgggtgtcggtgttgcgcagagtcagatgcagcgcaacgccttcgccattgagctggatgcgatgcgccagctcgaaggcgaacggccagtcgagcaccgcatcgccctccggttgatgcgtgacgacgaggctcaggctggccgagccccgttcggccacggtccaggcccttttccaggcgacgccatgaatcggtagcggatggtcgggtgacaatcggcgcagcgggtagcgctcgccttcgtgctcgaaggcgccgtcgccgactcgattggaaaacggcgccaacacgaagcaaccggcacggcggacgctgtcggaaccgtcccatgggcgcagcacgtcgataccctcgatgctcaggcgcgtgatcgccccgcccagcgccggacaaactgatagccgcagtgaaccatgctgcagttcgatctcgctcagattcggttggcgatcaagcatggcagctgcttcctctggcgagccatcgttgctcgcttatgtgaatgtaagcggcgccccacacgcacgcgcttgtggctcgcggtgtggtagcgccatgggggatgtcgctcgaaaatgccgagctcgggcttctggccagcgctcgttgtggcgacgattgtcgccttcagcccatagcgtgccggtggacacgctcagaccgctgtcagtacctctccacgttcgaggaacgtacgcagattggctaacagcaattcttccatcgccagccgggtttcttccgtgccgctggcgatatgcggtagcagaacggcgttcggcagatcgagcaaggcgcgcggcacgtttggctcttgggcgtagacatcgaggccggcaccgccgagacggccgtcgagcagcgcgtcgaccagtgccggctcgtccaccaccgatccgcgggagacgttgatcagtacgcctttcgagccaagcgcgtcgagcacttcccggttgaccaggttgcgggtgctctccccgccaggacaggtcagcaccaggaaatcgctccactgcgccagttcgaccaggctggattcgtagccgtatgcgctgccctggaccggtcggcgattgtggtaacgcaccgccatgtcgaagccgctggagcgcttggccaccgcttcaccgatgcggccaaggccgacgataccgagtcgtttgccgtagaccttgctcgacagtggcaggccgccagagagccactcgccattgcgaacgaagcggtcggcacgcgaaatctgtcgagcgcagtcgatgaccaacccgaaggcaaggtccgcgacgcagtcgttgagcacatctggcgtattgctcaccgggatgcctcgggcccgcgccgccgcaacggcaatggagtcataaccgacaccggaactgatgatcgctctgaggttgggaagccgctcgatcagttccgctgtgcagccgaagcgcgccgaggtcaccacgatctcgatgcgctgcgcatgttggtcgagcaggatctcggcgtcctgctcccagatgcgcagtacctcatgctccgcagccagaccacggttgaagcgttcggtaagggggccgagctggagaatacaggtcacgggattacctcgattggatgagcgaatcggttagagcaccttgccgggattcatcaatcccttgggatcgaatgtttctttcagggcgcgcatcagctcgagctccaacggatccttgtagtgcttggccgccgcacgcttggcctggccaagcccatgctcggcgctgatgctgccgtgcaggtccatggtgacgtcataaatcacgcgcgtgatcgcctcctgttgcgccttgaaggcggcatcgtcggacccgatcggtttgctgacgttgtagtgcaggttgccgtcgccgacatggccgtaggcgacgatgcgcacaccgggaaattgctcgagcagccgccgatcgacggcttcgatgaatgccggaatcgagctcaccggcatgctgatgtcgtgcttgaggcttgggccttcatggttttgcgcctcggaaataccttcgcgcatggcccacaatgccgccacctgggcctcgccctgggccagcacggcatcgatcgccagttcccgctccagcgcctcgccgatgcccacttccaatacctggttgagcggcgcatccggctgggtatcgctgagttcgatcaatacataccaggggtgtggctcggcgaacggatcgctgcatcccgcgacatggctcagcacgaactcgacactttgccgcgacatcagctcgaagccggtcaggcggtcgccacagagcccgcgaatgatgccgatcagctcaaccgcggcctgggcgctgggcaaggccacccaggcggtcgtcgtgctgcgcaccgcagggtaaagcttgagcaccgccgcggtgatgatcccgagcgtcccttccgagccaatgaacagctgcttgaggtcgtagccggtattgtccttgcgtaacccgcgcaggccgttccagatccgcccgtccggcagcaccacctccagtccaagggtgaggtcgcgcatgttgccgtagcgcaacactgcggtgccgccggcattggtggcgaggttgccaccgaccgtgcagctgccttgcgcgccgagggaaagcggaaacaagcgtcctgcctgggccgccgcttgctggagagcctgcaggatcaccccggcctcgaccgtgatggtttcgttagccgtgtcgatatcgcggatgcgggtcatgcgggtcagcgaaagcaccacctgagtaccgctgtcgtcggggatcgaaccgccgcaaaggcccgtattgccgccctgcggcaccacggcgatgcgctgctcgtgacacaggcgcaccacggcagccacttctccggttgtcgccggccgcacgaccagcgccgccttgccacggtaagcgttgcgccagtcgctgaggtagctggccatccgctcggggtcgcagacgattccggcaggtccgactatggcttcgagagcatgccgcaaggtgtgggcgttcatggcaactccgtctggaaaaaactggcgggtgttcttggcaagccgttcaatgagttcaccttccttcacgccgcaaaccgaacccagggtcgcgggcagagcccactcctacaggcatccaccggtgctttgtggggactggctcggccccaaaatcgcaggcaaacaccggtgcctttgtaggagctggctctgcctgcgaccgaagccggagtcgcgggcagagcccactcctacaggcatccatcggtgctcttgtaggagctggctctgcctgcgaccggcgacgaacaccgcagccaacacgccccgtatcaggtgatcggcgccgggttgaacagcacgatgtcgttgtgtagtcggtgctgctcggcccaggtctttttacgaccgctggcgacatctaggtaatagtggaacagctcccagcccagctcctcgagggtcgcgcggccggtggcgatgcgcccggcgtcgatgtcgatcagatccggccagcgctccgccaactcggtacgggtcgccaccttgaccactggcgccatggccaggccgtatggcgtgccgcgcccggtggtgaacacgtgcaggttcatcccggctgccagctgcagcgtgccgcaaacgaagtcgctggccggcgtcgcacagaaaatcagcccctttcgatcgacccgctcgcccggcccgaccacgccattgatggcgccgctgccggatttgacgatcgaacccagcgacttctcgacgatattggacaacccgcccttcttgttgcccggcgtggtgttggcgctgcggtcggcggcgccgcgctccaggtattggtcgtaccagtccatctcggcaatcagcgcgtcggcgacttcggtcgactcggcgcgggcggtgagcatgtacaccgcgtcacgcacttcggtgttctcggagaacatcacagtggcgccggcgcgaacgagcaagtccgaggcgtagcccaatgccgggttggcggtgatgcccgagaaggcatcgctgccaccgcattgcatgcccagcaccaattcggacgccggtaccgtctcgcggcggcgcttgtcgagcttcttcagccgcgtttcggccagggccatgatctgctcgatcatttcgccaaagcccgtgttcgattcctgcaggcgatagagccaggggtcgcgcagatccaccgaaggatcgccctcgtgcatcacctgctcggcctggagcttctcgcagccgaggctgatgaccagcgcctcgccaccgaggttgggattgcgcgccaggttgcgcacggtacggatcgggatgtaggcgtcgcgcgcgttgatcgctacgccgcagccgtagctatgggtcagtgcgaccacgtcatcgacattggggtacttgggcagcagctcgtcgcgaatgcgttttaccgcatgctccagcacgccggtgacgcactgcacggtggtgctgatgcctaggatattgcgcgtgcccaccgtgccgtcggcgttgcgatagccctcgaaggtgaagccttccagcggcgcgagcttgtccggtacggcgttggcacgcggcaggctatcgagcggcggcgcgctgggcatcttcagctgggtttccttgacccatgaaccgcgacgcagcggctcgagtgcgtagccgatgatctggccatagcggcgcacgggctcgccttccgggatgtccaccagcgccaccttatggctctgaggcacgctttcgaccgtgaccaggccatcctcgaaccgggcaccggtcggcacaccaccatcgttgaccaccacagccacgttgtccgcctcgttcaggcgaatgtaacgcggcgaatcttgatgctgaatcaattccacggtgtcgttcatatcggtctccggtctggccggtttgtcgttgtttggtttggattaacggtcgcttctcgaactatcacaggcacgaccgggtccgcagcctgtgttcggttcgaaagcttcgcggtcaagaccgctcccacggttgcgcggcgaattgtaggagcggtcttgaccgcgagctcttcagtgtccgacaagttcccatgccgcctcggtgaatcccgttcgaatggcgtacttgcctcaaagccttcgcggtcgagaccgctcccacggttgtgtggcgcattgtaggagcggtcttgaccacgagctgtttcagaacatcaacgcaccatgcacggcttcttgttgttgaaggtccactcggggatcaggtactgcatggcgatggcgtcgtcgcgcgcgcccaggcctttttccaggtacagctcgtgggccttctgcaaggcatcttcgtccagctcgacgcccagacccgccttcgccggaacagcgaccttgccgccgacgatctgcagcggctcgcgggtcaggtactggccgtcctgccagatccagtgggtgtcgatcgcggtgattttgcccggtgcggcagccgccacatgggtgaacatcgccagtgaaatgtcgaagtggttgttggagtgcgagccccaggtcaggccccagtcgttgcacatctgcgcgacacgtaccgagccgctcatggtccagaaatgtgggtcggccagcggaatatcgaccgaattcagctggatggtatggcccatctgccgccagtctgtggcgatcatgttggtggcggtgggcaggccggtggctcggcggaactcggccatcacttcacgacccgagtagccgttctcggcaccgcaagggtcttcggcataggccagcacgccgtgcaggtccttgcacaggtcgatggcttcagccagcgaccatgcgccgttggggtccagggtgatgcgcgcatcggggaaacgctcggccagtgctcgaatcgccttgacctcttcgcggcccggcagcacgccccccttgagtttgaaatccttgaagccgtagcgctcgtaggccgcctcggcctggcgcacgaccgtctcgggcgtcagcgcttcttcgttgcgcacgcggaaccagttatcgctggcgttcgattcgtcgcgatagccgaggtcggtctttttgcgatcggcgataaagaacagatagccgagcatctcgacttcgtcgcgttgctgtccgtcaccgagcaatgcggcaaccggcacaccgagatgctggccgagcagatcgagcaatgccgactcgatggcagtgatggcgtgaatggcgatacgcagatcgaaggtctgcaagccgcggccaccgacgtcgcgatcggcgaatgccttgcgcgcctggttcagcaagccgttgaaattgccgaccgattggccgatcagaatggcgcgagcgtcgtccagcgtcttgcggatcgcctcgccaccggggacttcgccgacaccggtgttgccggcgctgtccttgagaatgaggatgttgcgggtgaagtacggaccatgggcgccgctcaggttgagcagcatgctgtcttgacctgcgaccgggaccacccgaagttcggtgatgaccggagcaccttgattcacagaattgttcatatgcttctctcttttgttcttatggtccgcgctgcgggtacaacgatctatctgccatgggcgcgaccctgtccgagacacgcggcgactcggacaggctgcgccgcgtggagcggcacggctgatcagccgatataggtggtcttcaccgtggtgtagaactcctgcgcataacggccttgctcacgcgggccataggacgaacctttgcggccaccgaacggcacgtggtagtccacacccgcggtcggcaggttgaccatcaccatccccgcctgggaatgacgtttgaagtggttggcgtacttcagcgaggtggtgcagatacccgccgacaggccgaactcggtgtcgttggccatggccagcgctgcgtcgtagtccttgaccttcaccacgttggctacagggccaaagatctcttcacggctgatgcgcatgtccgcggtgctgtcgacgaacaacgtcggcgccaggtagtaaccctcggtaccgcaggtcacgcgctcgccaccgcaagccaggcgtgcgccctcttgcttgccgatctcgatgtatttcagatcctggtccagctgggcttgggacaccaccgggccgacatctacgccctgctccagggccgaaccgaccttgatcttcttgatgcgctcgatcatggcttcgacgaaacggtcgtagatgccttcggtgacgatgatgcggctggaggcggtgcaacgctggccggtcgaatagaaggcgctttgcgtggccagctcgacggcagtattgaggtcggcatcgtccaggatgatctgcggattcttgccgcccatctccagctggaccttggcctgacgaccgacgcaggtcgccgcgatgccgcgaccgacacccactgaaccggtgaagctgacgccatcgacgcgcttgtcgttgacgatggcttcgccgacttcgcggcccttgcccatcaccaggttgaacacgccggccgggaatccggcacgcgagatgatttcagcgatggcccaggcgcaaccgggcaccagatcggccggtttgatcaccacgcagttgccgtatgccaacgccggcgcgatcttccaggcgggaatggcgatcgggaagttccacggagtgatcaggccgatcacgcccagcggctcacgagtgacttcgacgctgacgcccggacgcaccgactgcagcgtttcgcccgcctggcgcaggcattcgccggcgaagtacttgaagatgttgccggcacgggagacttcaccgatggcttccggcagggtcttgccctcttcacgggccagcaggttacccagctcttcgcgacgcgcgaggatttccagaccgactttttccagggcatcggcacgggcctggatgccggaggtggaccacgccgggaatgccttgcgtgctgcagcgatggcggcttcgacctgcgaagcgtccgcctgggcgtattcgccgatgacgtccgacaggtcggacggattgatgttggcctggtagtgcttgccagctacccattggccatcgatgtagttgtcataacgctttgcgtctgccacgtaacgctctccttcgtgaggtccgccgcagtgcccaacatctgagggcactcgtagcgacggttggggcgagtgataggtctagcgtgccgttactgcgcgccctgcttctggatcagcgcggcgagtgcttcgtactcgtccgggcgcaggtcggtcagcggtgcgcgaacggggccggcatcgtaaccggcaatcttcgcgccggccttgacgatgctgaccgcatagcccttgcaacggttgcggatgtcgaggtacggcaggaagaaatcatcgatcagcttgccgacggtttcgtcatcgttacgcgaaatggcggcgtagaagtccatggccagcttgggtacgaagttgaagacggccgaggagtagaccggcacgccgagcgccttgtaggcggccgcatagacttctgcagtgggcaggccgccgagataggtcaggcgctcgcccaggcggcggcggatggagaccatcagctcgatgtcgcctaggccatccttgtagccgatcaggttcgggcagcgctcggccagttgctcgagcagcggcgcggtcaggcggcatacgttgcggttgtagaccacgacgccgatgttgaccgacttgcacacttcctcgacgtgccgtgcgacaccttcctggctcgcttcggtcagataatgcggcagcaggagcaggcctttggcgccgaggcgctcggcttcctgggcgtaggcgatggcctgacgagtcgggccgccgacaccggcgagaatcggcacctggccggcgcaagtgtcaacggcggtcttgatgatgtccgggtattcctgcggggtcagcgagaagaactcgccggtaccgccagccgcgaacaaggcagtcgcgccataaggtgccagccactccagacgcttgatatagccagcacggctgaagtcgccctgctggtcgaaatcggtgacgggaaaggaaagcagaccagaagagaggatggccttcagttcttgtgggttcattgtttgagcatcctgtgaagctatcggtattgaggaaggggccgcagccttgagatacgttatcgtacaacttcggaagttgctactgctttgtatggatatttgccagcccctttcacggtcaagaccgctcccacgcatgcctgaacctgtggaagcggtcttgaccgcgaatagacaccgccgaccggctggcgcacttttcgctgcactcgccggaaataaggcttatccatacagctctcggcgaaccattgggtccccccgcgcaagtcgtcgtgatgatgcggaactcggccctcccccagagataaaaaaagcccagtagctctccgcagaaggcgaaacctagccttgaccgagcagtcacacacaacgatttttatgtttccgttgtttgacaaccaccaccggcgctgataaaaatcaagccaagtcatacgacaacgtatgacaaaacaaacagagcttaaaaagccatgcctcattccgcgcgatccgtccctgcagcgcccaggcctgttacccacacctccaccgctgtcttgtccccgctgacaggcgttccgacagccaacacagcctggccagtgccgaccgccaacctttcactgctagatagcggtacgcgagggcttggctgatagcgccaccctccctacccaatcattgagctcacaagaacaatcaggagcccgcgactcgatgtcagatctcaaggccaacacccctatcgtgacccggatgcaggtcattcccgtggcgggctatgacagcatgctgctgaacctctgcggtgcgcacgcgccctatttcacccgcaacctggtgctgctcgaagacagcgccgggcgcaaggggatcggcgaagtgcccggcggcgaaggcatccgtcaagcgctggagcgcaccaaggggctcgtcgtcgggcagcagatcggccgctacaatcgcgtgctcaacgccctgcgccaggctattgcaggcggctcggcgaaagggccgcaggccacccagcacgaggtgacctccgaggcggaagccgcggtactcaaacagccgcacgagatcaacctgcggctggataacgtcattactgcggtcgaagccgccctcctcgacctgctcggccagcatctggacgtgcctgtcgcagaattgctcggcagtggccagcaacgcgacagcgtgccgatgctggcgtatctcttctatataggcgatcgcacccgcactgacctgccctatctcgccggcaccggctcggccgacgactggtaccaccttcgccatcaggaagcggtcaccccggccgccatcgtccggcttgccgaggctgccacggcgcgctacggcttcaaggacttcaagctcaagggcggcgtgatgcgtggcagcgaagagatgcaagccatcgccggcatcaaggcgcgcttcccggattcacgcgtcacgctggaccccaacggcgcctggtcattggcgcaagccatcgagctgtgcaaaggccagggccatatcctgtcctacgccgaagatccgtgcggtccggaaaacggctactcgggacgcgagatcatggccgagttcaagcgcgccaccggcatccctaccgccaccaacatggtcgccaccgactggcggcagatgggccattcgcttcgtctggaagccgtcgacattcccctggccgatccgcatttctggaccatgcagggctcggtgcggctggcgcagatgtgcgagcagttcggcctgacctggggctcgcattccaacaaccacttcgacgtctcgctggccatgttcacccatgccgcggccgcagcgccgggcaacatcactgccatcgacactcactggatctggcaagaaggccaggagcgcctgacccgcgaaccgctgcagatcgttgacggcgcggtccaggtgcctgacaagccgggactcggtatcgaaccggacatggatcgaatcgctgccgcgcacgagctctacaacaaggtcgccaccggtgcccgagacgacgccatggccatgcagtacctggtgcctggctggaaatacgatcccaagcagccaagcctgggacgtcaataaccagaaaagatacaaacgaagcgccgcaacccaaccacggagagacccaacaatgaaaaaagctatcagcgcctccctcgtttccgccctgctggcaaccgcggtcagcggtgcctatgccgccgaaaccgaatggccgactcgtcccgtgcaggtcgtggtcatcgccaatgccggcggcgataccgacttcaatgcccgcaccatggccaagtacttcaccaagatcaccggcgaagcgatggtcatcaccaacgtcgccggcggcggcggcaccctggctgccgagcaggtcaagcaagccgacccggacggcaacaccatcctcttcacccacaccggccagttgatcgtcaacgaagtcgccggtctgaccgaagacagcctcgatgcgttcgacatctgctgcatcgccggcgtcgacaagggcactgtattcgtcgcgtcgaagagctcgggcctgaaatcgctggaagacctgatctccaaatccaaggccgagccgagcagcgtcacctacggcaccgagatgggcagctactcgcacctgcagggcctgatgttcgaaggtctgaccgataccaagctgaaaatggtcgacgccggcacggtgtcggagaaagtcgtcgctctgctgggcaaccgtatcgacctggccgcgatcagctacggctcggtacaggactacgtgcagagcggagagatggtcgccctgggccagcccaacgacgagcgcaacccgctgctgggcgacgtgccgaccttcaaggaacaaggtgtcgacttcgtcatggagaagccctacgtcgttgcgttcccggacggcaccgatccggccatcatcgagaagatggccggcatcgtgaagcagatcaccgagatgcccgagtatgaagaggagctgcgcaagaccttcaaacagccggtcagctacttcggtaccgatgcgtccatcgaccgcctgaagaacacccgtgaagacttcatgcagtacaaggatcagctgcgtcagggtaaataagtcaccgcaacacgatgccggacgtggtcactgcgtccggcagcctttcctctgaatcgagagctgtcccatggatacctacaagagaaaggagttactggtcggggccctgatgctgggcgccggcctgttctacctgttcctgaccatcaatcttccgcgcaaaggtttcatcgacgcttccactgttccttatgtcctgtccgtcgggctctgcctgttgggcgtgttgcagctggtgaccgcaacccgggcgacgcacccgccggtcgatcccgatgcggatgccgatccctctgccggaacgccacctgactaccctacggtgttcaagacactggggttgatcgccgtctatgtcgccctgctgcaaaaggtcggcttcccgatcatgacagtgctttatctctatgcgcagttcatcgtgatcacaccgcgcgaacagaagatcaaccacatcgcctatatcgtcatcgcagtcgtgacgtccgcgttgatctttttcaccttccggcagggcttcgatctgatgctcccgaccggctttctgaaattctaggaggcggccatgttcgagcttctgcaggccggcttcggcgcggttttctccccgtatattttcatcctgatcacccttggcgttgccgtcggcatcgtcttcggtgccgtccccgggctgtcggcgaccatggccattgccttgtgtttgccgctgacctacaccatggggcccgccgcaggcttgtcgctgttggtcgcactgttcatcggcgcgacgtccggcggcctgatttcggccattttgctgaagattcccggcacgcccgcctccatcgccacgacgttcgacggcgggccgatgatggagaaaggcgaaggcctgaaggcactgggcgtcggtgttgtgttttccttcattggcactgtattcagcattgtcgcgctgatgtccatcgcgccttcgctggccaaggtggccttgcgcttcgggccgcatgaatacttctccatcgcgatcttctcgctgacgctgatcgccacgctgtccactggttcgctgctcaagggcatctatgccggcaccctgggcttcgcgttttccaccgtgggtatcgcacccgtcgatgccatccgccgcttcaccttcgactcgcctaacctcaacggcggttttgcgatgctgacggtgatgatcggcatgtttgccgtggccgaagtgatcaagatcgccgaaaccggtcgctcgatgcacaagagcaagatcgccacggtcagcatgaagggcgtgaagggcttcggcttttccatgaaggagttctttgggcagattcccaatgcgtttcgctcctcgctgatcggcatcggaatcggcatcttgccgggcatcggcgccggcacctcgaacatcgtctcctacatcatcgccaagaaacgctccaagcatcccgagcaattcggcaaaggcgcggtcgagggcgtggtcgccagcgagacggcgaacaacgccggcatcggtagcgccatgatcccgctgatgacgctcggcattccgggcgacaccgtgactgcgatcctgctcggtggcttcatgatccacggcatccagcccggcccactgctgttcatcagccagggcccgctggtgtacaccatcttcgcggcgctgatcctcgcgtcggtgatgatgctggtgctggaattctacggcctgcgcatcttcatcaagctgctggcagtgcccaagcacatcttgttgccgatcatcctggtgctgtgcgtcgtgggtgcgttcggtctgagcagtcgggtgttcgacgtctggaccattctcttgttcggcctgattggctatggcttcgtcaaaggcggcatgcctgcagcgccgttcatcatcggtttcattctcgggccgatggccgaaaccaacctgcgtcgcggcctgatgctgtccgatggccacttcacgggctttctcacgaacccgatctcggcgtgcttcctggcgctggccctgctgtcggtgctctggcatctgttcagcgcactgcgcgggcgcaaaagctcggtggaaaggctgcagcgcgcctgacccgacggcacccgcgcgagcgatgccgatgtaaaaaaccgcgccatgcacggcctgcaaggcgcggttttgcgttcagccacgcttgccaatctcgatcgttgccagcgtccagccggctacccgctcatgcagactcaggcccaggcctggcctgtctggcacgagcatgtggccgtcgcgtatttccagccgctcgttgaacgccggttccagccattcgaaatgctcgacccaggtcgagtgctcgtaggcagccgccagatgcagatggatttccatgacgaagtgcggcgccatgatcatgccgcgttgctcggcggcccgggcgaccttgagaaatggcgtgatgccacccatacgcggcgcgtcgtgcatgatcacatcgaccgcgccggtatcgacgtagcccaaggcttcggcggcactggtcagcatttcgccggtgccgatgggcgtatccaattgcgcggccagcgcggcgtgtccggcaacgtcgtgcgcatcgagcggctcctcgatccattccagctggtactgctccagcacgcgccccatgcgtaatgccgtgatgcgatcccattgctggttgacatcgaccatcagcggcacttcatcgcccagatgcttgcgcatggcctcgacccgctgcaggtccaagcgtctgtcgggctgcccgactttcatcttcacgccaccaatgccgcgctcgcgagactgcgtcgccttgtcgatgacttcttcgatcgaggcctgcagatagccacccgaggtgttgtagcagcgcaccgaatggcgctgcgcacccagcagcttggacagcggcaatgctgcgcgccgggccttgaggtcccacaaggcggtgtcgaacgcggcaatggcctgggccgcgacgccgccccgccctaccgaagcactggcccaggccagcttgttccagagccgtgcgatgtcgttggggtcttcaccgattagcaggggtgcgagttcctgggcgtgggcatactgcgccggcccaccggtgcgcaggctgtagctgaagcccaggccagcgtgcccctgtgcggtttcgatttcggcaaacaacagactgaccgcggccaatgcggcctgccggccggtcgccactttggcatcgctgaccgcctgcgccagcggcagctccaccgagcgcaggcggatccaggtgatgcgatcgggactgtagggtttcatgtccgccttcatggtcggctagttatggaaggcatgatggacgttgcgattgatgcagggctaatctaatcagccacttgattgataccggaactggatcaatgttcgacctggcgcaactgcgatgcttcaccgctctagcaacggagttgaattttcgtcgcgccgccgagcgcctgcacatgacccagccgccgctgagccggcagatccagttgctggaacaccaactgggcgtcgtcttgttcactcgcagcacccgcacggtggccttgaccgccgcgggtcgtgccttcttcgtcgaagctcaggcgctgctcgatcaggcccatcgggcagcacggactgctcgcctgatcgcgctgggggaaagcgggaccgtgagcatcggtttcgttgccagcgcggtgtacgacttcctgccgcgagtggtggcccaggccaggcgcgaccgtcccgatgtgcagatcgcgctccaggaaatgagcacgttcgagcagcttcaggccctgcttacacggcgcatcgacctggccatcgtccgtgctccccttaatcagccgggcctggtcagcgagcgcctcgtgtgcgagcccttcgtgttggccgtacacgacgaacatccattggcgcgacttgaaccgctcgagctgacggcattgcacggcgagccgttcatcctgtattcgcacgccgcctggcaaccgttcaacgagctgctcaccggcatgtttcgctccagcggcgtgcaaccggactatgtacagtcgctcggcaccaccttgaccatcctgtcgctggtcaacgtcggcatgggcctggcactggtgccgcgcagcgccactgcggtgagcttcgaacgggtgcgttggcggacgctcgagctgccatcaggcgtatacagcgaactgcatctggtctggcgcgacgacaacgacaaccccgccgtcgctgcgcttcgtgaagccgtacgccaggcggtcagcgaaaccactcagggacgctgacccacctcggcctgctgcaccgtccaaccggccacctgctcactcaaactcaagcccagaccgggccggttcggcactagcattcgcccgtcgcgtatctccagccgctcctcgaacaagggttccaaccattcgaaatgctcgacccatggctcacgggtatgagtcgccgccaggtgcacgtgcagctccatggcgaagtgtggcgccagtgtcatgccggcctgctcggccagggcctgtatccgcagatagggcgtgatgccgccaacgcgtggagcgtccggcatcaggaagtcggcagcacgctggcgaatgaactcccagtgttcggccgggctggtgagcatctcgcccgtcgcgatgggcgtatcgaacagacgcgccaattcggcgtgcccctcggcgtcgtagcagtccagtggctcctcgatccatatcaggtcgaagggctccaggcgccggcacatgcggcgggcggtcggccgatcccattgctgattggcgtcgaccatcagtggaaacgcctcgcccaggtgctggcgcaccgtgccgacccgatgcaggtccagcgcccagtccggctggccgaccttgagcttgatgccgccgatgcccttctctcgcgacacatcggtgttcttcatcaactgatccagcggcgtgtgcagaaagccgccagaggtgttgtaacagcgcaccgagtcgcgttgggcaccgagcagacgcgccagcgacaaccctgcacgacgtgccttgaggtcccacagcgcaacgtcgaaggcgccgatcgcctgggtcgccaggccgctgcggcccaccgaagcgcctgcccagcacaacttgtcccacagcttggcgatatcgctggggttctcgtctatcagattgggcgccacttccagggcatgggcgaactgccccgcacctccggcgcgcttggagtagctgaaacccagcccgtggtgaccatcacgggtttcgatttcggcgatcaggattgcgatctcggtcatcggcttctgccggccggtgagcaccttcgcatcgctgatcgggttggccagcggcaggatcaccgagcgcaggcgcagccaggcgatacggtcatcgtctgcacatatgattgcgggcttgtcgttcatggagtctcctggtggtggaccgacgacctgctctgcgccatggtgacggcatcgtcacatgagccgcgaggccgtcgaaaatggacaatccgattcgcatcggtgaccagctctgggcgacccagcgcacgcgatacggtgatcggcgatacgccggcgactttagccacgtcgatcagggttggagcgccggtcgactggcggtcggattgccttttgctcatggcggtattgccgccctccttgtcgcgcaggcccagcgctgaaccacgcgtgtgcaggttttggaatgcatccttctcgggatgtcatcatacaaccactcgcattccgttcgtcacgcccatccatttccgacgccggggccgtactcgactttagtggtatgtgcttaggcggttgcgacggctagcgtgacgtactgaaaacgctcatcacacccgtgaaactcagtaaatacaccagcttcagcgggaacgtccaagactttacccagcacggaacgccctttaggcattgccaagcagatcgtagtttgcggttgacaaagttcaaggacggcggaaataatcaacccaagtcatccgacaaccgatgacatcaaaacaataagcgatgggcagactacaatgacaagcacgacgaccgttcccacacccctcaatcgcctcctgctgacaggcgccgcaggaggattgggcaaggtgttacgcgaaacgcttcgcccctacgccaacatcattcgcctttccgatatagcccccatcgagccgccagccggccctcacgaagaagtggttcagtgcaacctggccgacaaggctgccgtgcatgccttgtgcgaaggcgtcgatgccatcgcgcatttcggtggcgtctcggtcgagcgccccttcgaagaaattctcgaagccaatatcaagggtgtcttcaacatctacgaagcagctcgccgccatggcatcaagcgcgtgattttcgccagctccaaccacgtgatcggcttctacaagcagaccgagaaaatcgacgccagcgtagcccgccgtcctgacagctattacggcctgtccaagtcctatggcgaagacatggcgagcttctacttcgatcgttacggcatcgagaccgtcagcatccgcatcggctcctccttccccgagccgctcaaccgccggatgatggccacctacctcagctaccgcgacctgacccacctgatcgaacgctctctgttcgcgtccgacgtcggtcacacggtggtttacggcgtctcggccaaccgcgacgtctggtgggacaaccacatggcagccaaccttggcttcgtcccccaggacagctctgaagtgtttcgcgaaaaaatcgaacagcagccgccctacgagcccaatgatcccgcgttgatctaccagggcggcgccttctgcgaggctgggccgttcgaagactgagccgcacgccacgccgcgaaaaacaacaagagagtcgtcatggcaaaccaagcagaactgatcgtcgatgcccagaacgctaccggagaaagcccggtctggatcgcctccgagcaggcgctctactgggtcgacatccctaatcgccaattgctgcgctggaaggccgctgacgcgtcggtcacccgctggacgggcgagcagatgatcgcctgcatcgcacgccgccagggcgatgcgaatcgctggatcgctggcatggaagatggtctcttcgacatcgtcccgcaggatgacggcacgcttggcgcgacccgcctcacccaggtgcagcatgcacatgccggcatgcgcttcaatgacggccgctgcgaccgccagggccgcttttgggcgggcaccatggtgatggatatggctgccggtattccggcaggcgcgttgtaccggttcgacggttcggccagagacgaatcgctcggtgcgcagttgaatgactttgtcgtgcctaacggcctgggcttcagcccggacggccggacgatgtatctctccgactctcaccccagcgtgcaatgcatctgggccttcgattacgacatcgacactggaacacctagcaaccgccggctgttcgtcgacatgaagcagcaccccggtcgccccgacggggcggcggtggacgtcgacggctgctattggatctgcggcaacgacgccgggctgatccatcgcttcacacccgacggccgtcttgaccgttcattgcaggtccccgtgaaaaaacccgcgatgtgcgcctttggcggcaccggcctcgacacactgttcgtcacctccattcgtccaggcggcgatctctccgatcagccgttggcgggcggcgtcttcgccctgcaacccggcgtctccggactggaggaaaccccatttcgtcactgatccacccacacaaggaccggctcgcatttgcccggccttgaagttccaacgctgctcacaaacaacaacaagatggagattcacatgaacttcaaacgcaagttgctcatcgctgcacttcccctagccttctgcttgtccagcactgctcacgcggccatgacgctgaagatcgccgaaatccatcccgccgggtaccccaccgtggtcgctcaggagcacatgggcgagaacatcgaaaaggccaccgacggcgaactcaagttccgcatgttctccggcggtgtgctggggtcggaaaaggaagtcgtcgagcaggtgcagatcggtgccgtgcagatgactcgcgtcagcctcggcacgctcggcccggtggttccggacgtaaacgtgttcaacatgcccttcgtcttccgcgaccacgaacacatgcgcaaggtcatcgatggcgagatcggccaggagatcctcgacaagatcaccaactccgaattcaacatggtgggtctggcgtggatggacggcggcgtgcgcaacctctacaccaagaagccggtacgcagcctcgaagaccttaagggcatgaagatccgcgtgatcggtaacccgatgttcatcgagaccttcaatgcactgggtgccagcggcatcgccatggacaccggcgagattttcagcgcgctacagaccggcgtggtcgatggcgcggagaacaaccctccgaccatgctcgagcacaaccacttccgtagcgccaagtactacaccctgaccggccacctgattcttccggagccgatcgtgatctccaaggctacctggaacaagctcacgcccgagcaacaggaaatcgtcaagaagtacgccaaggaggcgcagctcgaagagcgcaagctgtgggatgaaaagaccgccagcagcgaagccaagctcaaggaagcaggcgtcgagttcatcgaggtggacaagaagcccttcttcgacgccaccgctccgattcgcgagaagtacggcgcgccctacgccgacctgatcaagcgtatcgaagcggtccagtgattcgttctctttgaaaacctcgcggcggccggtctgcaccgccgccgcgcttgtggtgagcctgatgaaaaacacgctgctgcgcgtcaacgacgcgatctacaagacctgcgtatgggtcgcgggcatggccatcgtggtcatgtccatgatcatcccctgggggatcttcgcgcgctacgtgctgggttccggggccggctggcccgaacctgtagccattctgctgatggtgatcttcacctttctcggcgctgccgccagttaccgggccggcgcgcacatggcggtgagcatgttcactgatcgcctcccgcagtttctgcaccgccacgtcgaactactggtacagatcctgatgggcatcatctgtctgttcatgaccatctggggcatcaagttgtgcattgccacctggaaccagttcatgagcaccctgccgaccttgcgcgtcggtattacctactcgccgatcccgatcggcggcgcgatcaccctgctgttcgtgctcgaacgcctgtttttcggcgaccagagcaagcgccgggcagtcgactatgaatacgtcgaaagcagcaaggaggccgtgtaatggacgcacttattctgctcggcagctttgccatcctctttctgctgcgtatgccggtggcctacgcgctgggcttgtctgcactgatcggtgcctggtggatcgacattccgttcgatgcggtgatgattcaggtcgcaggcggcgtcaacaagttctctctgctggccatccccttcttcgtcctggcgggcgcgatcatggccgaaggcggcatgtcccgccggctggtggccttcgcgggggttctggtcggattcgttcgcggtgggctgtcgctggtcaacatcatggcctcgaccttcttcggcgccatttcgggctcgtcgctcgccgacaccgcctcggtgggctcggtactgattccggagatggaaaagaagggctacccgcgcgagttctccacggccgtaacggtcagcggctcggtgcaggccctgctcaccccgccgagccacaactcggtgctttactcgctggccgcaggcggaacggtatcgatctcctcgctgttcatcgccggcatcggcccgggcctgctgctgagcgcggtgatgatgaccatgtgcctgctgttcgcacgggcgcgcaattacccaaagggtgaggtcattcccctgcgccaggcgctgaagatctgcgctgaagcgctctggggcctgatgaccatggtcatcatcctcggcggcatcctttccggcgtcttcaccgcgaccgaatccgcgtcgatcgccgtggtctgggcgttcttcgtgaccatgttcatctaccgtgactacaagtggcacgagctgccgaaactgctgcaccgcacggtgcgcaccctgtcggtggtgatgatcctgatcgccttcgccgcgagcttcggctacatcatgacgctgatgcagattccatcgaaaatcaccacgctgttcctgaccctgtcggacaaccgctacgtgatcctgatgtgtatcaacctgatgctgctggtactgggcacgttgatggacatggcaccgctgattctgatcctgaccccgatcctgatgcccgtcatcacgggtatcggcgtcgatccggtgcacttcggcatgatcatgctggtcaacctcggtatcgggctgatcacccccccggtcggtgcggtactcttcgtcggtgcggcgattggcaaggtgaccatcgaaaatacagtgaaggcgctgttgcccttctacgtcgcgctgttcatggtacttctcgcagtcacctacatccctgcgatctccctctggttgccgagcgtggtgctctgacagtcctcagcgcccgaacgaggacgccgcccaaccgggcggcgttttgctttgtaaggttatgaacaattcgccatccatcgacatgaaaccgcttgcgccaacgcaagcgcacagcggaacggaatggattctgccaggacaggactgaccccatgcaagctgctacaccctttccacgtcatatcgccgtactgattctggccacactggcctgttcgttcgccggcaaccacattgctgcccggatcgctttcgaccatgacaccggcctgctgctggcaatgctctgccgcgctggcgtcaccctgttggtattggccggattggttctatggcggcgcgaatcgctgcgcctgagcggcgctacctggcgctggcagcttctgctcggcctgctgatctccattcagagcttctgcatctactcggccgtggcgcgcatccccgtcgcgctggcgctgttggtggtgaatctttcgcccatcatgctggcgctgttgacatggctgctaggcggtccgcgtccgagccgccaggcgcttgcgatcatgggcatgatcctgttcggcctggtgttggtactcgatgtcccggcgcgcctgatcagcagcgaggcgccggacggacaatggatcgccggcatcttgttcagcctgactgccgccgcggtattcgcggtcgcgctgtgggtcaccgagcacaagctatcgaagatggccggttcggtgcgcagcatgctgacgctgatcgtcgtgttcggtgcgtccgcactgctcggcgccagcgacctgataccgggcggtctgagcctgcccagcgcgagcgccggctggatcgctttggggtgtctggtgttgctctatggagcggcgttctcgacgctgttcatctgcatgccgcgcctgaacatcgcgcgaaatgcgcctgtgatgaacatggaaccggtcgctggcatgcttctgggctggctgatactcgggcagttgctcgggcccgggcaagtgctgggcggcctgatcgtggttggcgggatcgttctgttggcctaccgcaagcaataaaaacgggaaagcgagcaacctgccgtcaagcccgctgagatagcgggctcaacgcgttaccagccttgtttcggccaacggggctgctacgaacagcagccgttgtctggatcggcacagcggcacttccgatgttcaggggcgctggatacaggtcagcccccgcctccgcccctcgctacgatgtggcgtctggggtagcgcaaatgtttagtcgaccttgtcggtctcggcctcttcgtgcgcctggcgcaaccgctcgcggctgttggtcaggtgcaggcgcatcgcggcgcgggcggattctgcgtcctggcgagcgatcgcgtcatagatctgttcgtgctcacggccgagacgctgctggtaatgcggctgatcatcgtgcgcgaggcgtgcggaattgagccgactgcgcggaatgatggccgtgcccaggtggttcatgatgtcggtgaaatagcgattgccggtcgcctcggctatctgcaggtgaaactggaagtccgacacggccgcttcgctcgagagcgcggcgctctgatgcaacgagtccagaaaggcacgcatcgccgccaactgctcgggcgtccgacgtatcgctgccaacccggctgattcgacctcgaggctgatgcgcaactcgaggatcgccaacacgtcacgcaaggtgccgatcgtcgccgggtcgatacggagccctgtggtgcttggcgtatcgagcacgaatgtaccgatgccatggcgtgtttccaccaggcccgacgcctgcaagcgggagatggcttcacgcacgaccgtcctgctcacaccttgcgcctgcatgatggccgactcggttggcagcttgtcgccacgcttgatgacgccatcgcgtatttgctgggacagctccgccaccagctcctgggcaaggctgcggtgctttcggcgtgcgcgtggctgagcgatctggttttccatggacacatcgatctctttgtgaagcgaagtagtccgtatcatagcccagtagttgtacgataactatcggacctccgcacataaggaccagatcttgcgtccgaaacccgcacgtagcaaggatggctcctatactcagggagccactctccaggagaccgacatcatgcgccgcctcgtgcttaccctcgccgccgccttcatcagtacgcccctctgggcaatgcactgccccatggacatggcgaagatcgacgaacagttgaaaacgaatccgccgagcgacccggccatcctcacgcgggtgcaagcgttacgcgccgagggcgaaaagctccataacgccggcgatcatgagcagtcgctcaaggtgctgggagaagccgaggagttgctcggaatgaaaggggaataaatctttccctaccgagcggttgccgagtcgacaaccgctcggcccgcccctcggtcactccgccacgcagcgaatacgcaactccttgcggtcgaaatcctcttcgctgctcaacgtctcgtaccctatcgggcaagcccgttgtgcctgcgtctcgcaaccgggttggtcggccatcttcgtacaggcgaagacatattcatcagtgccgtcggcaggtggaactcgctcgataaggctacagccggccagaagagccaggccagcgatcacaccgtaatgcttggtcagtttaatcatcgtcggtccgaacatgatgcagatgaacgaggcgccctggctgagcgtcacgccggcctggggcatggctggacgcagaaggcgtatcgctcgctgtttgcgaggttcttgagtgctgatgcgactctccgtgcgggcccgaatgccacgaaaacgcacgcttatgggtacaatcggcgcggcagggagatatcgcaagcgtatggcgcgcgagggctagcgcgggtcaggcgcatcatccatttcggcgttgtcgacatcgatgtcaggcgtttcgccctcgatgggaacgccgttcttacgatcccgcggacgctgcatctcgtttccggacaactcatcgacgcccggctgatcgtccggattcacatcgatgcgtcctgggcttaggggcggtgcggagccaggaatcaccaccccgtcatcatcgctttcggtacgagtgcctgtaggggggccgctctgcggttgccgatcgtctcgctcgatgctcatcactcacctctgcgttatctgtacagataagaggatcgagcagcgcgtgcgttcaggcggacagcttgccattggtcatgtgtgaggctaccggctgcagaagccgcctcgccctttgggggcctgcggggcggcacggggtgacttacacaacggacagcgccacaacaggcgagaccggcgaagtcaagcgccgagcaagacgagatcggaaacgtatcgttgtcctgactaccaaaagcgctgtaaagcgacggggccggcgacacaacctcgctctgacgccagagttgctaggggcgatgaagacggtcacgctatggacttgctactcgatcagataaggttcgtgcgtaccgttatcttccctgataagacgagcatagagcagcgacgggaaagaaggcgtccagaatcacgaacaggtatggcggcctagttgacctcttccaggccgcgccgatattgcgtctgttgctgcctggatgcggtagctagataagttctcgcagcctttgtcttttcggaatgaacgttgatgacgagcgtcagggtgcgcgcagtgccagcgaaaccatcgttatagctgttaaaggcagtatgactacttcatatcctcttattgggcttgtgcggccccttcttcgctacctcctgagaccatccgtctaagcggagacagtagcaacaagctgttttcggcgcagccggttctttgagtaactagcaaagagttgctttactcaaggacggggcgctggcgatgaccggaccgggatctcatcgcagcgactacgttccgccccccataaaaatgaacaatcacatgttattgtgacaagcacttaccgacggtatcgtttggccaaacaatcaccgttactaaatacttgggtccgatcaaacatatcccatagtatccgcaagtgtaggcatacatttcgtttaacctgccggtagcatgtaacggtttagataagaaaggtctgtagggtcgagagtgcctacgacttgcttaagcgctagcgtaccgatgacgtagtcgtagcgggccttgttgtagtctcggatggcgtcatacagctgacgctgagcgttcagcacgtctgaggtattacgaatgcccacccttagccctactcgattcgcctcaactgctttttcgctggaagcgacactctgctgttgcgcgctgatctgctcaatgctcgctagcacggagcggaacgtgttacgcgtcgtttcgacaacctcacgtcggcgatcgtcgcgctcatcctcgcttttcaacagccgctccgttgattcccggatccgcgaggatgtttgaccgccagcgaataacggaatagaaaactcaatacccaccgacgactgccgcacactcccctgatacgcactggtacggaaatcggtcgggttgctgtaaccgaagctgtcgttatccccctctctgtacgagacgaccgcctgtacagtgggcgcatggccggatcggctttgccgtcgcgtctcttgcgcggcctcaacggcaaaatcgctggcaataagcatcagattttgctcggttgcctgggtggtccaggcggcaatatccgtcggttgtggcgggtgtactggaagtgaactgtgcatagccgcaatggttgtatatcgacgctttgtcagtctaaaaagcgcctcgaaggctttcttaacctcctgctccgcctctattctgctcgcacttgccttgtcgaacgcggccttggcatcgagcacatcaatgatgctcgctgctccgtccctcatccgagcctctgcttgctgtttcacttcaagcagcccagcctcctccgcgcgtgatgccgcaagatcgtccaaagagcgcagggtttcaaagtatgccttggctgaccggaggatcagagtctgctcttgcgcccgcagttcgatctcggcctgcgctgtagttgattgagcagcacgcagctggaaccatctttccaggttgaaaagcggttggcttaggtttgccctgaagaccgtaccactgcgcgtacgttcgagtgctgggtcttcgcgctcaagaaacgtggtatcggctgtaacgcccgcactgaggtttgggagcaacccagctagggcctggggtacggcttccttgcgcgccagatagtcgtgccttgcagcggacagctgggcatcgttttgcaccgccaactgatagacctctattagattcgcgcgctcgccatttgccatgacggctaatggtgtcgctgcgacatacagcgccaggcaaagccctatgttccgtatcgaaggcattttgtactacttccgtgttttcgaaggccgctgggtagcggctgtcccgttttctcgtgttgtctcaaactttgtagcgccacaaacagacagcccgccttacggcgggctgtcttgccttgcgctacgcgttactgccagttggctgcaatcaccacgttcagctcgtcccgctgggtttgcgacagcgcgagttcaccgcctgacggggcgccgaatgcggccatcgcgttcactagattatcaacggcatttgcgtgcagggctgagctccctgccacaaatgtgtcgactcgctgagcaggatctagataccaatcctggatggttatgctgtcatcggatccggtcacgtctatgacaaggttgttgccctgcttcgaaagccaaaggttttccttgctgatcccttcgacggcaaccacatcattatcggacgcagcattgttggagaggttgttgatgacgtccttaccgtcgcccaaggcaaatcgataggtatcattgccatcacctcccatcaggtaatcgtccccaagcgcgcccctgatcgcatcattgccggcaccgccatcaatcagatcagcgtcagatgaaccgatgatgttctggttgcctgcctcaccaccaagcactgtgccgaacccgcgctcatctggaacgtgctgatacgctggggagcccgcggggtcaggattggccaaaccgaatgcaccgaagatctgcgacgacgttagctgcccgccagaagcaaacgtaagcgtgtcgaccacgtaatctccacccaggaaccagttctttatcgtgaccttgtcggtgccaccacttacgttcaagaccagatcgttgccgcttttcatcaacccgctgccaatctggttgaacgtgatgccctcgaaatgaagttcatcgacgccgccaccggagttatcgatcgtgtcctgtccgccgcccgctgagaatacgtaggtgtcatcgccccgcccgccgataagcatgtcgttgccgaccccaccattgagcgcatcgctgccgttgccaccttcaaggcgatcggcgccggccaacccgttgagcgaatcgttgccattgaaaccctgaagcagatccgccccatccgttccgtttagcgctgcgtcattacctgccgtcccctgaatggtttggtcgaaagacgaggtcggagtaggcattgtcataccgaaggcgccgtagatctgcgctgcggtcaactggccacccgtctcgaacagcatcgtttcgatgaggttgtcgccaccgaggaagaagtcgcgcaaggtcacctgattggccgtgctgccgttgacgcgcaataccagatcgttacccgacttcatcagcccggacgccacttggttaaaggtgattccgttcgagaagaccaaggtgtcgttgccccctgcttcgatgagcgcgtcctgtcctccgctgtacacataccgatcatcgccgatgccgccgattagctggtcgttgccgcccagacctttgagctcgtcgttgccggcaccgcctagcaggacatcgttaccagccgtgccgctcactgtgtcgtcgccccctactcctgcaacgggaggctgctgaggatcggtcggctctccagggtcggtaggctcctcgggatcggtaggtacctcgggctcttcagagcctggaatagcagtcaggagcgaggcgatctgcgcggtcgtgaggtagctaccgccatcgggctgcacgaaatcgatggcaaagtcaccaccgaggaagtggtcggtcacccggacctgttgattcatgtccttgtccacgaggatcagcaaatcgtcaccatcgcggtgaaagctaagacgcgtccgatccaatccatcgaggaagaacacaccgtcaaacccgccacctcggttgtcaacgacatcgacgccggtcccagcacgatagtaataatggtcgtcgcccacccctccggcaagcgagtcgtctccgtcctcacctacaagaacgtcgttgccggcaccacccatcagtacgtcatcaccggaagccgcctggctcccgtttccgcccgaaagatagtcgtttccgtcgcccccctcgacctggtcgttaccactcattccgaaaagggtatcgtcacctgctccgcccagtagaagatcgcggccgctataggccgacagtcggtcgttaccggtcgtaccctcgacaagggtctcaaaaccgccggcgacgccatgagccgctacgatgtgtgcaattctagtagcgttgagcatgtatccgccgtctggctggacatagctaatcgccttgtcacctcctaggaaatgcccaactactcgcacggattgctgagtatcgccatcaaccaagatgagcagatcattcgcgtcacgctcgaacgtcagccggtcttccgagataccaccagagaagaacacgccatcattgccaccgccagtgttatcgatgacgtcgacgccatcgccgagcttgtaaacgtacttgtcgtcgccaacaccaccgaaaagatggtcatttccaacgccacccatgagttggtcattaccagcgccgccagacaatacgtcgtcgcctgcctcaccttctaggtaatcgttaccgccttcaccatggatcgcgtcattgccggcccggccccaagcctggtcatttccttctccaagccggatctcatcgttcagctgacgatagccagttaatacgtcatcccggtccgtgccgtaatgaacaaccaactcttccacatcaaggtatgataggaccgttccgtctgcgaacatgatctcttcaatcttgaacgagtcgccctgacccataaaccagttctgtatcgtaatgccgtcagtgccatttgaatggcttatgacgaggtcttgcccgtatcgctcaaaacccagatccgataaggagatgccactcccaaactgcagttggtcaacgacgccttctcgatagtcataacctttgtcagggcgccgctctattagaaggtcgtttccatcgcctaagttgaaaatatatcgttccgatgtaaaggaaccataaagcgtgtcggcaccttttccgccttcaagcacaaaagtgccgtattgccattcgtaattttcaacctccagcacgtcctcgcctgccccgccttcaagcgaactaactgagccaacatcaatgttttcaccgaaaagatggtcatttccctcgccacctcgaagcgtgcctcggccttttacattatcattcccttctccaccgtcgagcacgcctgaaccccaaagcctgtcgtctcctgcatcgccataaagggtcgagttatccgcgatgagtgcatcgtttccttcaccgccataaataatgtctaacccacctccagccgaataaggatgtggctctcctccccaaatctcatcatttccgctaccgccatagataacatcttctccttcgccgccctgaatgtgatcgtcatcatcgccaccatccaacaggtcgttacctgttccccctaacaaacggtccgtgccacgaccgccgcttagagtgtcactaccaccaagcccatgaagctcatcatttccgtcgcccccgtcaataacatcactatccggatgcgcgactatgaaatcatcttcggctgaagaagatattgccatctcggcaatttcctgcggcccgacaaccgatccatctgacaggcgtatccccgataggccactctcagcagagaaccggctagtcggtgcgaaatggttgcggatcgtaataatatgacccgtccgggcgatgctgataagcaaatcgttttcggagcgggtcagtttgacatcactcttattcaaatcgacaagatgaagttcgtcacgaccgtttgtattgataatagtgtcgtttccgtcgcccgacttatagatatacgtatcgtagccagctcccccttggagtaggtcatttcccaagcccccgatcagccggtcatccgaagcgtaaccttcgagttcgtcatccgctgcccctccgacaagcgctagattgagcaaatcacgcctgctccacacggtgccatcggcaaactcgacgcggtcaatcgaaccggagctttcggcatcgccaatgccaaagaaatcagaaatgattaccttgtcgctcccactataagaaataattaggtcgttgcttacacgcttgcccgagacatcggagctgacgatgccttgaccaaagcgcaaccggtcgaccgacgaaacgtctgggtcttggttttcaatcagatcgcttccgtctcccaattcgaagacgtaggtgtcgttaccgtcacgaccggaaagtacatcgtcacccaagccacccacgatcaagtcgtctgtttggtaaccgatcaacgtctccgcttccgcatttccgattagtgccagagctcgaagtgcgtcctcttcaaacgttgacccatcggaaaactcgatcttgcgcaatggagtggcggaagcattgaagaacccttctatcgtaactgtatccgttccatccgctagcctaacaatcaggtcgttcgctattcgtttggccgacacctcgtcctttataatgccggccccaaagcgcagaatattggctccagctgcggtatcaacgatgcgatcatggccatctccacgcgagaacatataaacgtcatctccggagccgccggaaatcttgtcgtctccccggcctccctcgaaaatatcgttaccaccgccgccacttaccacatcgtctccgtcaccggcggatatagtgtcagctgaagagtcatagccaaccaacgtctccgatgcattagttcctttaaggaccagttgcttgacgtcctcaataagccaaacatcagtcgttgaggtaaaactaatcttatcgatagctttcgatgaactaccgtcgctctcgaagtaacctttgacgatgattcggtcagatgtgttgcttatggtgagggtcaagtcgtcgttgtcacgcctagctgagatatctgcaggaaagatatcgtcttggaaaatcagtctatcgaagccgtttgataagtcttcattaatgatggtgtcttcgccatcaccaagcgaaaatagataaacgtcatcaccagcgccgccattgagaacgtcgtttcctgtgcccccaaccagttggtcagcgcctgctccaccgttgagcacgtcattgccgctccccccgctcagcaggtcgttgccatccccaccgagcagagagtcgtctccgctaccgccatccaaggtgtcatcacccacgccgccgtctagtgcatcacttccatcaccaccaaataggaggtcgtgcccgtgcccaccaagcagttcatcatcgcccgccttgccctgcactaggtcattgccggtcccaccatccaagatgtccctgtctgcggttccttgtatgacttcgtcatcctcattgacgccggacgcatcgcccgccgccccttcgggcgcaggctggtctgccttcggatcaggtgacaaagtgctgttttcgtcagtttttaacgctggctgactgctctgggagccatccggccacaaaatatgttccgtgaccgctgccgctggaacctggggattcccgtttgcatctggaacaggagcgaggaaattgccatccttgtccttatagaacagcaacggtcccgacaaggtaattgcaccactctctagccaactggaggggttgttgagatcaaccatgccgctgctagagttaattccgagcagttggccaccgaaccaagcaaaactatccgccgtcacgcccaagctgattccagagacaacgagctctgaggtccgtgtagctgccttgcgacgggacgcctggatgagatacgaaaaatcatcgagcgttagcttgtctccattggcaaactgaaccgtgtccagtttcagtaacgacgtgttggcaatggcaacgcggtcattcaagccatactggatataggtcgtgctagcgctttgctcgacgatcaacgactccttaattatgccgttgccaaataccaagctaagttggccggagttgtctttgacgtaatcaagtccatggcccgcgctgaagctataggtgtcgtcacccgcaccgccatacaggcgatccgcccccgctcctccttccatccagtcgtttccggcctgtcccaagagcgtgtctgcccccgagccgccaaacaacctatcgttgcccgccccactttgaacgtggtcatttccatttccaccatagagggtgtcccggccgatgccactgatgaccacgtcgtcaccgtcgtcgccaaacaggaggttcgcatcggaggaacttgcttcgatggcatcttgcacccagtccgatccggctcccccatgaagcacatcactacctgccatgccaaatatccggtcgtcaccagcatcgccgtagagggaatcgtcgccctggtttccttgcagttcatcgtcgccttcgccaccacgaattgaatcattaccattctgtccgaagatgagatccgcaccttcatcaccggataaggcgtcgtgaccattgccgccttgtatctcgtcggcatcagcgccaccgctaatcgagtcctcgccgtcccctccgaccagaaaatcttcgccttgacctccactcagcctatcgtcaccagcattgccccaaatccggtctacaccagcgtctccgaatagctggtcgtgtccgccgccgccaataatctgatcatcaccgtctcccccacggatcagatcgttacccactaattcagcattagcaccatcttcttcgtcaccccacaggagatcgtcgccgcttcctcctagcacggtatcgttgccaccgccagcgataacttgatcgttaccagcgccggcagagatatgatcgtcaccgtgtagctctaccgggagagctacgtaaccctcctgaagcgaagagtggtattggctgatatggccgagatctcccgttattcgatccgcccctgaaccagcgacaattctgtccgacccagcccccccctgaatctggttgtcgccatccccggcaagaatgatgtcgtcatatgattcccgcggctgggatatatcagactgaaggacaatcccccctccgaagccaccaactatctgctcataagaaatataaccgtcgccaaaaatacgatcgtcgccggcccccgcgataagcttgtctttgccgctgccaccagcaaggctattgttaccttctccgccgtcaatgtagtcgttgccgccgccgccgctaactagatctacaccgctaccgcctagagcataatcgttgctgttcccatcactatccgctgcgccccgctcttctaagtagatgaagtttttcccttctccgccaagaatgtagtcggaaccgcgcccaccaactaaaagatcattgccgcctctgccatcaatgtaatcgtcaccgtcccgaccggtcagctcgttgaaattattgtttcctaaaagacgatcgtttagatcagcaccttcaaacgcaccgccggagccgggaaacaacgcagcgtcataaacaatttctttcgcatttataaagctttgatcgagggttctgccttcgtcgtccttagtccccctagtattctcacgatcgtcatagctcgacttcacgacgagttcgtgatcttttaggacttcaatcgcgccggtacccaccgtgaaaatttctgttgactgctggggttcaagtggaagttcagatggctcaccatcggtcagcacgatcccaaaccgaccgggcgactcgctccaccgtacaaccgtgactactgcaccgttcgcaagagtaataatcaggtcagacgataaatcatggcgctgcgagggaactattgaataacggttacccgcctcatccagatactctgccccaatggggctaccatcctgcatagctcttgtaagagtcccaaccagcgcgccggcgattctgattttgttgtttccaagcgtatcgtaaattattttgttttcagcaataccgtctaaatcgaaaacatcgtccccagcaccgccatctagcacatcatgaggcgtagtcgctagaatcacgtcagccccatcactggaatagttctttaacaaaaaaccatcgcgggaaagtatgacctctagacgttccgcatagcgatctacaatagccttaaatgcctcagaataatccattacaataagactgtaagaggcttcaagcgagttgaaatttactggctcatcagcaaatatgcgcaaaatatccagttgctgcggcaactgcgaaagcagctgtgtctcggcctcgactgcaaatccagatttatttatctcagcgatgagttctcgtctaaatgtttcaagaagactcaacgttgttcctgcagagtggtgatagtctgcgaggacgtctagcttttctacagccttatcatggacggatccgaaactagcatatgattcttcggtagcctgggccaacgcgacggtggctgctagttccaaggtcaccagacgagatagtttctcatcaaacaatcgcttttgctcgtccaagtaagcctttttttcgagagtgtacttggtggccatatagtcaagcacggttgatacggcagtaagcgcaatagcgactgccttcaactgaggagcaggtgctgcaccgacaccttcggccagcagagctgttgcctgtgctacgaaagataacgcctctgaagcaaatgcggcggcctcttggtgatttggcgggttgacacctcctgacgcacgctcaaacataagtttagctgaaaggctaaaactaacagcaccagccatgcctccgacgcctttaagccacggcgaatcactaaaaacagtagcaagcccaaaggaaatgtcagccaagtcagctatcggctttacatccggtgcgtcagcgtaggctccgacggtcaatttatattcgtaaacattcagccgactactttgaactatcaactccgccattgtcgtcataacaagctccttctaaaaataaacgaacccaacaacaccatcatcgacgcaaaaagccaccttctagctagcgatttgcttcgatcccatgcgcgcacatattgttcaaccgagaaaatgacagtttcgccttgtctcatttcgacaataccattaccaggccgcagcaacacatctaccgtgcctccatgcttgtgatagttcaggaaactacgaactttttcatccgcgaataatatgggatacctttccctaccaactcggagtcttatcgacgcgtatgtggcaaacccgaagccgtcaaatctaagcgttgctggcgtaaacttacgctctggctcaagctgcattacgaaagccgccaggctgatagccagcgcgcatattctaatcaaatatataaccaattgccctaaagtcacttctccatccttacgtcggcgttccagagatcaagtaaacgattgaagcttagcgctcggacaaactttcatcagcgtactgcttaagcgggctcaagaagtagtcaataatatttcgcttacccgtcttgacctcagctctaattgacattcctggtgacaaagggacatgctgatttccaacgagaacgctactatccgatagctgaatacgagcgctgtacaccaaccccaagcgctcgtcttcgatggcatcgttagagatgctttgtacagtgccgtgaactacgccgtacttggtgaaattaaaggtgtcgacctttacctcgacttgttgcccaggccgcacgaagccgatgtccttgttctcgagcatcgcctcgacttctaccggctgatcgctgggtacaatcaccatgagcggctgcgcttccgtaacgactcctccagcggtatggatagcgagttgctggactgttccatcgacgggtgcagttaggcgggttagtcgacctcgctgctcggccttgttgagttcctgtttaaaagcagccgcgcgagtttcagcgtcatgttgtagatctagcagctcgcgtcgtgcctgggcgatcaggctcgctttacgctcctgcgccgcgcgcttggcctcagcgagctcaagcacccgggctcgctggacagttagctcacgctcctgattgagacgtgcctgttccttttccaagtaggcgtgttgcggaacatagaagtccgcggcgagctttttatagtcggcgctcagttggcgcgtgatgggcagagtctgtacgaggcggtcaaccgtggatttcgctgtatagatttcggcggtacgctgggcgatctcggcgtcagcctggctgagcgaactgcgaatctccaggtattggccctctacccagcgttgtgcgctcttcttttgatcatgcgtcgcggtcggcagcaactgcataaccgaacctggcgtctgtttggtctcgatagcggtcagtagcgtggctgcgcgtgcactgtccatctgtgcagcaagcagctcgattttggagcggcgtatgtccgcgttcgtgaggctggggtccagctcgaccagtacttgtcccgccttgacgctcatcccgtcatggacgtggatctgcttaacaaccgctacttcactcggttggatgatcttcgatttcccgctcggaacgactttgcccgaagccgtcgcaacgacatcaatctcgccgatgcatgcccaggccagtgcaagcgccgcaaatgccatgatggtccagagtatgtaacgcggtgccggatgcactggatgctcctgtaaggccagtgcagcgggaaggaactgaatctcatgactgtggcgcttcggcggctccatggctgcccggtttttccaggcatgccgccatgtagagcggtaccgatggatgagctctcgcttggcactcatgcggcgtctccctgttgcaggcggtgcaacctggaatagtggccggcttggtgctgcaggagctcgtcatgactcccctgctcgacgatctgccctctatcgagtacgacgatgcggttggcgtccctaacggccgaaagacggtgcgcaatgatgatgaccgtgcgcccttggcaaatagtcttcatgttctgctggacgatgcgctcggactcgtaatcgagggcactggtggcttcgtcgaagatgagaatgcgcgggttgccgatcaacgctcgagctatggcgatgcgttgacgctggcctcccgacaaggacgcaccatgctcaccgacgatggtgtcgtagccctcgggcagttccaggatgaagtcatgcgcacctgccatcttggcagatgacataaccgtctcgatcggggcaccgggatcggtcagcgcgatgttttctcgaatggtccggttgaacagcatgttgtcttggagcacgaccccgatctgtcggcgaagcgatgaaacgtcggccagagcaaggtccatcccatcgaccagaacgcgaccgcgttcgggcgagtagaggcgctggacgaggcgtgtgagcgtacttttgcctgagcctgaccggcccaccacaccaatgatttcaccctcgttgatcgtgaggctgatgccgcgcagaatctccgagccgtcaggtctgtagcgaaagtgaacctgatcgaactcgactcgcccgcgaataggcggaagtgccgagcgtgaggcctggctgatttcggtgcgctggttaagcacttcccccaagcgctcgatggaaacgcccgtctgctggaagttggtccacagctgtgccaatcggatgatgggttgcgacacccttccggccagcatgttgaaggcaatcagctggccgaccgaaagctcgccgtcgatgacaagtcgcgcgccaatccacagggttgcgactgtaaccagcttgccgatgagtcccacgctctcgttggcaatggtcgaaagggtctgggttttaaagcttgcagcgacgtaacccgccagctggttatcccacttgcgggtgatctgcggctcgaccgccatggacttcaacgtgtcgatgccgttgagcgtctcgaccagaaacgcctggttctcggctcctcgagagaaggtgtcgttcagccttgctctgagaaccggggtgatcagcatcgagaccagaaaataggccggcagcgagaggacgactactagcgtcagccaggcgctgtaccagaacatgaccgcgatgaagacaaccgagaacaggacatcgagcaccacggtgatggaattgccggtcaggaagcttcggatgttttccagctcgcgcaccctcgctacggaatcgccaacgcgcctcgcttggaagtatgagatgggcagcgaaaccaggtgcctgaacaagcgggctccaagctcgacgtcgattcggctggttgtgtgcgcaaatacatacgcgcgcaatccgttcagcaccgattcgaacaccatgacggcaagcaacccgaacgcaataacgtccagtgtggtcaggccccgatgcaccagcaccttgtccataacgacctggaagaacaagggtgtgagcagcgcgaagatctgcagtacgaacgaaacgacgaacacttcgccgagcagcttgcggtatttaacaaccgcagggataaaccaggtgaagtcgaacttggccagatcgccagaaacggtcgcttccgatcgaatgagcagcaactgcccagtccagcgatcttcgagctgttcgacggtcacaacggtcgggcgttgattggctgggtcgtgaatcaggactttgccgtcatctacccgagcaacaacaaagaatgccccgcctcgatctacagcaatggcaggcagcggtgtatgggccaagcggcttggattgctcttgaccgtcttggccttgaggcccagttttttggcggctaacagcagctccgtcgtaccgaacgcctccccattggtaccaaactcgtgcgcgagctgctcgggcgatgcggccagattgtggtaacgcgccagcataacgaagcaaacgagccccgtgtccagcatcgcctctggcgatacgccttcctcatgtacgtccgacatgttcgttccttggccggtaaaagagccaacatccgatatggctcatatgcttcaatctggtgcgaagtcgcggttgacgcaaatgaataccatccgcagcgtgaaacgctttgcgaatctggcagcgacggcccgctggttagtgatccacgtcacatgaatcaacgatgaggagcagagccggccctctgccagcattccggtacgcctcatatttactaacgcaggcaaagtgaaccgctgaagccccgcgcagcacgcggaacaatcaaaactaagccccctctcaccggggcgccctacttcgctctgctgacaggcatgggccgctcttcggcatgtgagtttggtgtcgttattgtttggaatctcgtcgtgtttttagacagacaatggcagccggctcggtctgttgtggctggggcacactcagctcatcaaatcacaccactggaccacccagaccgagcaaccttacagctcggcagtaaaggcgcccatgaaggttacgaccagcgggtcgctcgaaaatgaacttaacgcacatgacaaaagagctgggtacctagatccccttagattgaagacgcacccataaactcgaaaatggcacaaagcgagaaatgaggggcagtcgccgcaagcgaatgtagcaatgccttagccttacgcccccgcagagcgtggatgacgttatgaatcaaacagtgctaagagaacgcgtgagataccaccacaggattcacacacggaccagagttcgcctgtacgcagcagtttatttggtagcagccattgtggtggccattcgggcgatggacggcgtacccggactattcggcacgccggcgtttgcgtgctttctattcgcgggctccttggtgatgtaccgttggggccaccaggccacttggaccagcgacaagcgataccacagaaaggtaagccggtcttttttgctggctcttagaatcgatccacgaattcccgccgccttcacagcgcgcctcttagctgaagcaccatggaactggcgtcaactagacaacgcgataagggagtttgacgagcgcagcgtgaccgaaggggaagctgacgctaaggcttaaccgaaagctagccccccttgacgctcgtaacgagctagccggccataagcgtcccctcgagtcgcctgagcattccgcttaaatgcggccagtagctgggcagcttcgacgtctcggtgccgtgcgttacgggtttttaatcagcggtcttttccgcagtgctatcggctgcggggatacgctgtttcggctttgactgagtgcgtcgtgcttgtccgcgctgccgcttagcctgctgcctggcatgtagcgcttgggcggccgtcaccgagccaaccggctgaccgctcaagtccagacgcggagcattctccaccatgcttgcccagtagcggctccctttgcaccaggtcgcgacgcccagcttgagctgttcgctggatattccgagcagctccaggtgttgctcggcatctttgaggatgccctccttgagcgggaccttgggggccgggttgacggggaaggccaacggaaagtgcttctgcaatcgccatattgcctccaccgctggatcctgctcacgaggcttcgtttgcaaggctggttcccgcttgcgctgcttcgtactttccgtccttacctgctgtttttcggcccgcaggcggtcacgtagctcagctagttgctcaaaacccatcgttcagctcaccgcttcatggttattcgtgacgcaagactatcccatgcagcctttcggagcagcctcgccagaggaaaacgcgatcaagcaaccgttcacggcacaccgctcgccaataaccaccggctcgattacagccaagatggcgacaccgtcttggcttcaccagtcaccggtgcaactatctgcggttctgatgaacacaccgcctggatcgggatcctgccttcgagcctgtaccgaaatgctgtctgccgaactcaagtcgtttcacatggtggccgaatgggcagcatcatccacgctgcgaagaagcttcgcatgcccggtcggctcagtccgcctcttgggcgtctgagcgcggctggtcccgattaggttaggcctcgcaggccgtaaataaaaaaagccgcccttgcaaacgcaaggacggctcttggattggtgcccgaggccggaatcgaaccggcacgaccgcgaagtcgagggattttcttaccacttcgactttcgccgccaacgcacatgcgctgttcgtggtctggagcacgccttcaccatagccctgcggccgtaggtgcccgccgtctgctctctacaccttcccaaccatacaggttgggcttggctcggcgttggctcggatacaagagcatccagggctttcgccgaatttgacgggcttcacctctgaggtttcccctagagggctcaaattgtttaagtcccttgtgtctaccgatttcaccactcgggcgtagtgcaaaaaactccaacgctaccagctgacgcctatctggccgctagctcgccaaggctaaccattaaattacgtcttggctactcgcaaccccttgtcactgctggattttcagctttgctcgattgcggcgcaggactataaccagccacccgtcgacgtgcaacccgaacgactcgaagatgtaagaggtttcgcgcggcgcgcaggaaggcaatcaaagaccacttcaaaacgcagtgcacaatggctggctcggatatcaatgccggcgacgcatgccgacgatcaaccagaacaccagaccgagcacgggaaacaatgcgatgccaatggcccagagcgccttggctcctaccgttcgaccgctcttgaagacattgattatggcaagtagatcaagggcaatcaccataacggccacggcaattgcgaaataactcatcgcgtcagacatgcagctctcctcgactcggctcataagatatgaggcttgagcacccggctgcagttccgttggagtaggcacctcggcagagatgtcgttgccagagacggcggcatcagagcactggcagaacatcggcaggtcaaatcgagcgcataaaaaaaccgcaagcttgcgcttgcggtttctttactaatggaggccgatgtcggaatcgaaccggcgtacacggatttgcaatccgctgcataaccactctgccaaccggcctcaaaacgataacgccgcatactgcggcgtcatcgtcaacaaactggagcgggaaacgagactcgaactcgcgaccccgaccttggcaaggtcgtgctctaccaactgagctattcccgcatcgtcttggtgacgggcgccattttatagtttcagcggcgcccgtcaagcccttgattaaaaaagttttttatttcttttcggatgggctgaggtgaggccaggcagccatcaggtaatggaccatcgaccatagcgtcaacgccgcggcgatgatcagcaaggcatagccaagcccgacccaaaccgtcgccaaaggcgggttggccagcagtatgatcagcgccaccatttgcgccgccgtcttccatttgcccaggttcgacaccgctacatgagcacgtgcgcccagttcggccatccattcgcgcaacgccgataccacgatctcccggccgatgatgatggtcgccggcaaggtcagccagaggtttgcgtgttcttcgaccagcagtaccagcgccaccgccaccatcagcttgtccgccaccggatccaggaaggcgccgaatggggtgctctgttgaagcctgcgagccagataaccatccagccaatcggtgaccgcggcaatggtgaacacggcgctggccgccaggtagctccactgaaacggaagatagaacagcaggacgataatcggtatcagcagtacgcgcagcacggtgagaatgtttggaatgttcatcgataccactgatccgcgaatttaggaggtgattctactcactgtgcaaagcggcataaatcgattcggccagctttttgctgatgcctggcgccttggcgatctcatcgagactggcgcgacagagttcctgaagaccaccgaagtgtttgagcagttcgcgacggcgtttcggtcctatgcccggtacgccttccagtgtcgaggtcatccgcgccttgccacgacgcgcccggtgaccggtgatggcaaagcggtgggcctcgtcgcgcacctgctggatcaggtgcagcgccggggagtcccccggcagcgtgaattcatgcgccgcgtcattgagatagagcgtttccaggcccggcttgcgggtaacgcccttggccacgccaagcaggatcaactccggcacggcgagttcctggagaacctcacgggccatgttgagctgccccttgccgccgtccaccaacaagatgtccggcagcttgccctccccctcggcggccttcttgaaacgacgagacagcgcctggtgcatcgcggcatagtcgtcgcccgcggtcacgccttcgatgttgtagcggcgataatcggacttcagcggcccttccggaccgaagacgacacaagaggcaaccgttgcctcgccactggagtggctgatgtcgaagcattcgagccgggtcggcagctcatccaggtccagcgcctcggccagcgactggaaacgtgcggcaaggtgctgacggttcgccaggcgtgcgcccaaagcctgctcggcgttggtcagggccagttgctgccagcgtgcgcgcgtgccccggacgcgatggctgatggtcagttcgacctcgcgcagctcggcaaccgcgctgatcagcgtttcgaagtcttcgtgaacggtattgacgatcagctcggacggaagatcgcgctccatcgaactgaggtagtactgttccaggaaagcctgcaacacatcgcttacgctctcctcgatggcgacctgcgggaagaagttcttcgaaccgagcacccgcccggcgcgcacgctgatcaggtgcacacaagcaccgcccgggctgaccacggcggcgacgatgtcgacgttgccgctaccaccctccatgctttgctggtcctgcacccggcgcaagatgccgatctggtcgcgaatctcggcggcgcgctcgaaatcgagcgccatggcggccttctccatgttgcgcgacagctcttcggccaaggcgttgctacgaccttcgagaaacatcaccgagtgccggacgtcctcggcgtattcctcgggatcgaccaggttcacgcatggcgccttgcagcgtttgatttggtattgcaggcagggccgggtgcgattgcggtaatagctgtcttcgcactggcgcacgaagaacgccttctgcaacaggctcaggctctcgcgaatggcccctgcgctcggatacggaccgaaatagcgccccggctccttttttgcgcctcggtgaatgctgagccgcggaaagtcgccgctcgagaggaacacgtagggataggacttatcgtcacgcagcaggatgttatagggcgggcgccactgcttgatcagcgtctgttcgagcaatagcgcttcggtttcgttggccgtgatggtggtttcgacctgcgcgatcttcgccaccagcgctgctgttttcggcgcttgtccggtcttgcgaaagtaactcgctaaccgtttcttgaggtttttcgcctttcccacataaagcagcttggcttcggcgtcgaacatccggtagacgccaggacgcccactgcaggaagccaggaaggcggaagaatcgaaaccgctcatcaattgatggtatcgaccatgccgtggcgaaccgcgagcaatgccagttcgacgtcgctggtgatcgcaagtttttcgtagatgcggtagcgataggtattgacggttttcggcgacaggcaaagcttgtcggagatggcctgaaccttctgacaattggcgatcatcagcgcgatctggatttcccgttctgacagcaggtcgaagggggacccgttcactttgggctggaacgatttcaatgcgagttgctgggcgatctgcgggctgatgtagcgctgtccggcgaacaccatgcgaatcgcctggaccatctcgtcgagcgctgcgcccttcgtcaggtaaccagccgcaccggcctgcaacaggcgagtcgggaaaggatcttcctcgcagacggtgaccgcaatgaccttgatgtccgggtggctgcgtaggagcttgcgggtggcttcgagaccaccgatacccggcatcttgacatccatcagtacgacgtccggcttgagttcgcgcgacttcttgatcgcggcctcgccggattccgcctgaccgataacctgtaggccatcgatatcggcgagcattcgggaaatgcctgtgcgtaccagatcgtggtcatcgaccactagcaccctaatcaagcagacacctctttattgcaaatttaaagctggctggctgctcgcttcatcagcggcgaactctaacaaaaactgaccggcttacccagaccatacatcgctacgtggccagatgacagcatgcggcgctcgttgctcgatttcggcaagttaaaacgcgagcatacaagcctgacctaacgatcaactagtgctgactgccggccgccgtccttatcgtctcctcggctattggtcgatcgcccgtcttggctcaggtacggtctaaccctcggtcgtaccattggcggctgcggttcacaatgcggaccagccagagcatgacgggcacctcgatcagcacaccgaccacggtggcgagcgcagcgcccgagttgaagccgtagagaacgatcgccaccgccactgccagttcgaagaagttcgatgcgcctatcatcgccgaaggtccggccacatcatgacgaacgcgccatttacggttcagccagtagccgagaccggcgatgagtaacgtttgcagaaaaatgggcactgcgagcatggcgatgaccaggggctgctcgacaatcgcctcgccttggaacgagaacagcagaaccagcgtagccagcagcgccagaatggatacgggtgcactaccggtcaacgcggcttgaaatacctctacgcctcgccgaagcagcagcgtccgaatgacctgagcgatggtcagcgggatcacaatgtacgtcagcaccgagagcagtaacgtatcccaaggcacgggtatcgacgaaacgcccagcagcagcgccacgatcggagcgaacgcgaacaccatcacggcgtcattcaacgccacctgggtaagggtaaagttcgcattaccgttacagaggttgctccagacaaacaccatcgcagtgcagggcgcagcacccagcaggatcaggccggccatgtagctgtccagctccgcggcgggaagccaggcggcgaacaggtgcttgatgaacacccaaccgagcaacgccatcgtgaaaggtttcaccgcccagttcacgaataaagtgatgcccatactcgcccgatgcgcatacacctcgcgcaacgatgagaagtcgatcttcatcaacatcggtacgatcatcacccagataagcaacccgaccgggatattcacgtgagcgagctccagcgcaccgaccgcctgggcggtggccggcgcatatagccccagcagcgttccggcgacgatgcagagcgacacccagagcgtcagatagcgctcgaagaaaccgataggcgcgcctgcgaccgatctgccggcggcttcacattggctagacatacggatccgatcctgcgttagtaaaatcaattcgatatacgctaaatcatatgtcctaatgggtaaagcgtgacctctttcctggcgccgcagtagctacatcgagacaccttgaagcttaaatggccaatctgttgctttacctgatatatggatttcaatatattcgagaacgcatgtttccaacggatctgccccatggtcgaacatctgacgcccaccaccctcttcaaatgcctggcggacgagacccgcgcacgactaacgctgctcgtcgcccgcgaaggcgagctgtgcgtctgcgaactgacctgcgcgctggacgaaattcagccaaaggtgtcacggcatctggcacagcttcgaacttgcggactcctggcgggccgacgccagggccagtgggtgtactaccgtctccacccgtacttgcccgactgggttcaccaggtactcgacaccattcttggcgctaacaagcattggctggcggactgcagcgggcggttggacgccatgcgcaaccgaccgtcagcctgcggttgaacgaaaagaggaaccgccatgaccacccgtgatacgcaggccgagctgccgaacgtcgacagcgacctgttcgcgcagcccgacctggaacggctcgaaaccaccgacgccctgccccaccctccgcgaatactgctgctccatggctcgaaccgcgagcgttcgttcagccggctgctggtcgaggaagcctctcgcctgctgcaacagctcggcgccgatacgcgcatcttcgatccatccgggttgccattgccggacgacgcgcccgactcgcaccctaaagtcagggagctgcgcgagctgatgacctggtcggaggggcaagtctggtgttcgcccgagcggcacggctcgatgagcgcagtgttcaaggcgcagatcgactgggttcccctggcgctcggtgccgttcgccccacgcaaggcaagacgctggcggtcatgcaggtttgcggcggctcgcagtcgttcaacgtggtcaaccagcttcgtgtgctggggcgttggatgcgcatgttcaccatccccaaccagtcctcggtgcccaaggcctttctcgagttcgacgaggcgggccgtatgaagccatcctccttctacgaccgcttggtcgatgtgatggaagagctgatgaaattcaccctgctgttgcgtggccggcaagactatctggtcgaccgctactcggaacgcaaggaaacggccgaggcgctgtcccgccgcgttaaccagcgctctatctagccgcctgcagacccagcgagaatccaatgcttaaaacgttagccctgtttgccgccaccgccgtggccgagattgccggctgctaccagccctatctctggctaaagcagggcaagagcatctggctgctggtgccggccgcgctgtcgctggccctgttcgcctggctgctgacgctgcacccaaccgccgcaggccgtgtgtatgccgcttacggcggcgtctatgtcggcgtggcgatgctctggttgtggctcgtcgacggcattcgaccaacccactgggacctgctcggctgcgcagtggccttgctcggcatggcgatcatcatgttcggcccgcgagcgacctgaattacattgctggagtgactttttatgacgaccaaagtaggcatcaacggttttggccgcatcggacgcctggcgctgcgtgctgcctggggctggccggagctggaattcgtccacatcaacgacccggccggcgatgcggcgacccatgcccacctgctgaacttcgactcggtccatggacgctggacgcacgaagcgggtagcgagggtgatcatttggtaatcgagggtaagcgaatccaggtcaccgccaacaaggcgattgccgaaacggactggtcggactgcgatctggtgatcgaagccagcggcaagatgaagacggtggcggcgctgcaagcgtatctgcagcaaggcgtgaaacgcgtcgtcgtcagcgcgccggtcaaagaagccggcgtgcttaacgtcgtcatgggcgtcaacgatcagttgttcgagccggcacaacatcgcatcgtcacggctgcatcctgcaccaccaactgcctggcgccagtggtcaaggtgatccatgagcatctgggcatccgccatggcgcgatcaccaccatccacgatctgaccaatacccagagcattctcgatcagccccataaggacctgcgacgtgcccgcgcctctggcatgagcctgattccaaccaccaccggttcggcgacagccatcgctgaaatctttcccgagctgcgcggcaagctcaacggccatgccgtgcgggtaccgctggccaacgcctcactgaccgactgcgtcttcgaggttgagcgcccgaccagtgtcgacgaggtcaaccggctgctgcgggccgccgcgagcgagggcccgctcaagggcattctcggctacgaggagcggccgctggtttcgatcgactaccgcaccgacccccgctcctcgatcatcgatgcgctgtcgacgatggtcgtcgacggaacccaggtgaagctctacgcctggtacgacaacgaatggggttatgccaatcgcaccgtggaactggcgcgcaaagtcggcctggccggctgacgctggtcgcagccccatcgagcaaggatcttccatgcatgccctctcccgccttgcgcccgacgtgcgccagtatctgctggtgaccggcaattactgggcgttcaccctgaccgatggtgcgctgcgcatgctggtcgtcctgcacttccatgcgctgggctataccccgctgcaaatcgccgggctgtttctgttctacgagatattcggcgtggtcaccaacctgctgggcggttacctgggcgcgcggctggggctcaaccgcaccatgaatgtcggcctggccatgcaggtggtggcgctgctgatgctggcggtgccggccacatggctaacgatcccctgggtgatgggcgcgcaggcgctgtccggcatcgccaaggatctgaacaagatgagtgccaagagctccatcaagctgttggtaccggagactcagcaaggcaccttgtatcgctggatagcggtgctcacaggatcgaaaaacgcgctcaaaggcgttggcttcttcctcggcggggccttgctcgccggcatcggttttcgcggctcgctgctggccatggcggcggcgttggcgctgatctggatcgccagcctgttcctgctcaagaaggacttgggcaaggccagggcgaagccgaaattccgcgaattgctctccaaaagccgcactatcaatgtcctgtccgccgctcggctgttcctgttcggtgcgcgtgatgtctggttcgtggtcgcgctgccggtctacctgtcgaccgtgtttggctgggacttctggcaggttggcggctttctcgcgctctgggtgatcggctatggcatcgttcaaaccgtcgccccggccatcacgggcactatgcgtggcgagctgccggacggtcgcgcggcattcatctgggcattgctgttggcaggcctgccggcggcgattgcactggggctgggctcggacgcctcgtccgaggcggtgctgctcggcggtctcctgctgttcggcgcattgttcgccgtgaattcatcgctgcacagctacctcatcgtttcctatgccaaggccgacggcgtgtcgctggatgtgggcttctactatatgtccaacgcctttggccgattgctggggacgctactgtccggctggatttaccagcgctatggcctggaggcctgcttgtggatttcatgcggtttcgtactgcttgcggccctgatatcgatgggtctgccaaggcgccgaacataggggtggcctcgcgcgccgctgctgcaagcgcctgcgctggcagacgtcgccaaccagcggctcccttcaccgacgccgctctagtccggctgcgcctaagcgcatttgccgcaggagtctcatcgagcgcttcgttgccctggtccggcgagtgccataaactcgtcgcaccacgcacgccgcaaagtcttccatgcgtctattgattgttgtactgctcatgctcgcgcttccaataaacgggatggcgcagttgctcatgccggtagaatcatcagcacctcacgcgatgcctcatatggagggcatggtgtcaggtgcggatagccaatcagtttttgatggggctgagcctgaatgctgcgaaaggcatgaacaaggcaagaccagcgtctgtaagaccggtcaggaatgcaagactgtcagcctccttcagattgttagtgctaaatcacagcacattcccactgaaagccacgtggccgcgccttatgacgcgcgcattccctctcgactcctggatgccgtctggcaccctccccgcgcctgattccgattaaatcctaagcaccacccgagcctatggcttcgggttggctaccgcgtgcctttggctcgcatggaaaagcaggaatcctttaaatgaaaccccgtattcattgggcgcctctctatggggctgcccttctggtgggcgcgttgccatttcccgggctcgcttcggcgctgacccttgaacaagcactgagcatggcagagtacgaagcgccgtcgctcgatgcacaggccgcaaaccttcaagccgtacgcagcgctgcaatccccgccggcgagcttccagaccccaagctcaggctcggcctgcagaatgttccaattgaaggcgagcagcagtggcgcctggatgaagacttcatgaccatgcagatggtcggggtgatgcaagacgtaccgaacagagcaaaaaggcgtgcacgagtcgaagcagccgaagccggcgtagcgcttgccgacgttcagcaaaccatcgaacgcctaaaggtgcgtcaacagaccgccgaggcctggatcgcgtccttttccgtcgagcaaaagctgagcctcttcaaacagctctacgacgaaaacctccttttttcccaggcagttaccgcgcgcattgctggtggtcgcggtcagaccgcggacagcgtccttccgaagcaggaggcggctctgttggctgaggaagaagacgaactgctgcgtagccagacggtcgcacgggcagagctgcgccgatggataggtgactcggcaagcgaaccgctcaccggcggttggccgcagtggcctgccgacgtaaaccactaccagcacaatcttcagctccatccagacctgctggctttcgacccgatgacgcgcaaggcgcaagcaaaggttcgccaagccatcgctgagaaaacaccggactggagttggggcgtcgactacctgcgtcgtggccgggagtacggcgacatggtcaacctcagcgtcagttttgacctgccactttttaccggctctcgccaggatcccaagatcgcggcggagcgcgcccgtcttagccaaatagaagcagaacgccaggcgacgctgcgcatgcatagccagaagctagcggcggacttagccgaattccagcgcctcgaccgagcgttcgctcgtcttgagaacacactgctgcctctcgcagaggagaaggtgcgcttgaccatggccgactatcgagccggaaccggcgaattaaccgccgtcgttgacgcacgcaggcagctcgtcgagacccgactacgccgcatcgatatcgcgagagaccgttcgctaagcagcgctcgcctgcattttgccttcggagacacgcgactatgaccttcagaatcaaacggctggctctcgtctccagactgccgatgctgatcagtgccagcgtcttcgtcggactgtctctagcccctgcctacgcacgagctgcggcagaaagcgataaagaggtgctctactggtacgacccaatgtacccccagcagaagttcgatgaaccgggtaagtcacctttcatggatatggacctcgtcccgcgctatgccgatgagggtggtaacggggcgtcgatgagaatcgacccgagcttgacgcagaacctcggcatgcgcctggcgaccgcaacgcgcgagtcgataagccagtcgatcgaggcaacaggcgtattggcgttcgatgaccgagacgtggcggtcgtacaggcgcgcgccggcggattcgtcgagcgcgtttacgactgggcacccgaggacatcattgaaaaaggcgcgccgctagccgatcttctgatccccgagtgggccgctgcgcaggaagagtatctggcgctgagagcgataggcgagcccgagttgctcgccgcggcgcgacagcggttgcgccttgcaggtctgccgccagaggcgattaggcagctggaacggaccggtaaggcacgcccggtctggaccgtaacgagcccgaccggtggagtcttgagcagtcttgatgttcgcgagggcatgacggtagcgaccggtgcatcccttgcacgcataaatggtctggacaatgtctggctggaagtggcggtacccgaagcgcaggtttccagtcttgcccagggccagtctgtaacagcacgattgcctgcttttgccggcgaaacactggaaggcacgatccaggccgtactaccgcaggccaatctggacagccgtacagtccgtgtccgtgttgagctgcctaaccctcagggacgacttcgtcccggcatgaccgccgacgtgaccttgagccgcgacgttcaggacgcgctcgtcataccgaccgaagctgtgatccgtacaggcaagcgcgcattggtcatgctggctgaggagcaaggccggtatcggcccgttgcgattcgtaccggtcgtgaattcgacgagctgaccgaggtactcgagggcctggaaaccggccagaaggttgtggcgtccggccagttcttgctcgactccgaggcaagtcttcgagggctgaccgctcaggctctgcagcagtctgcatcctcgcaagcgccggccctacatgaagcggaaggcacggtcgtcagcctggaagacggcatggttggactctcgcatggccccttcaagacgctcaacatgccgggaatgaccatgtcgttcccggtggcggacccgtcgctcctggtaggcctgggtaccggtgaccgggtgcgtgtcggcgtgcgagaaagcgatgagggtctggtcatcgcgcgcatcgagaagctcggaggctcgcaatgatcgcctccatgatccgatggtcagtggccaaccggtttctgatcctgctcacgaccgtctttgcagtcgcctggggcgtctggtcggtcaagaacacagctgtcgatgcgctgccggacctttcggacgtacaggtcatcatccgtacgccgtacccggggcaggcgccacaaatcgtcgaaaaccaggtcacttacccgctgaccaccaccatgctctcggtgcccggtgcaaggacggtccgcggctattcgttctttggtgatagctacgtatacgtgcttttcgaagacggcacggatctgtactgggctcgctctcgggtgctggagtacttgagtcaggtccagagccggctgcccgcagcggccaagccagcactgggtcctgatgcaacgggggtgggttggatctaccaatatgctttggttgatcgcacgggcaagcatgacctctcgcaacttcgctccttgcaggactggtttctacgctacgaactcaaaacactccccaacgtggcagaggttgcgcccattggcgggatggtcaagcagtaccagatcgtcctcgaccctgtacgcatggcagcccgaggggtgacgcagcagcagatcgcgcaggcagtcgatgaggccaatcgggaaaccggcggcaatgtcctggagcttgccgaaactgagttcatggttcgcgcttccggatatttgaagacgttgaaggacttccgtgcaatccccctgcgtctggatagtggcggcgtgccagtcacgctcggcgatgtcgcgcacatccaactcggcccggaaatgcgccgcggcattgcagagctcgacggcgaaggtgaggtagtcggtggggtggtcattctgcgcagcggaaagaacgcacgggaaaccatatccgcggttcaaaccaagctggacgagctgaaggcaagccttcctgaaggagtcgacatcgtcacgacgtatgaccgcagcaagctgatcgacagcgccgtcgaaaacctcagccacaagttgatcgaggagttcattgtcgttgcactcgtatgcgccattttcctctggcatttgcgctcatcattggtcgcgatcgtctcgctgccggtcggtatcctgattgcgttcatcatcatgcagcgccaaagcatcaacgcaaacatcatgtccttgggtggtatcgccattgcgatcggggcgatggtagacgcggcgatcgtcatgattgaaaacgcacacaagcacatcgaggcctggaacaaaaaacatcccggcgtggcattgaaaggcgagacgcactggacggtcatcaccgacgccgcagtcgaggtgggaccagcgctgttcttgagcctcttgatcatcaccctgtcgttcattcccgtgttcaccctggaggcacaagagggacggctgttcggcccgctggctttcaccaagacctatgccatggcggcggccgctggcctttccgtcacgctggttccggtcctgatggggtactggatacggggaaaaataccggacgaacaccgcaacccgctgaaccgcggcctgatctcaatctacaagcctgccctggaggctgtgttgcgctggccgaaggcaaccttgctggtggcggtcctggtctttctcaccggcttgtggcccgccactcgccttgggggtgaattcttgccgccgctggatgagggcgatctcctatacatgcccaccgcgctgccgggcctctctgctcagaaggcgtctgagctgctgcaacagacggatcggctcatcaagacagttccagaggtagcgcacgtgtttggtaaagctggccgcgccgacaccgccactgatccagcaccactggaaatgttcgagacgaccatccgattcaagcccaaagaccaatggcgagccgggatgacgcccgaaaaactaatcgaggaactcgaccgcacagtccaggtgccagggcttgcgaacctttggattcctccgattcgcaaccgcatcgacatgttggccacgggcatcaagagcccgatcggcgtgaaggtatacgggaccgagctgacgcagatcgataaggtcacccaggctgtcgagaagatcgccaaaacagtgcccggcgttacctctgcactcgcagagcgcctcacgggcggacgctatatcgatgtcgatatcgaccgcaccgctgcagctcgctatggcctgaatatcgctgatgtgcaggcaatcgtggccggagccataggcggtcaaaccgtcggcgaaacggtcgaagggttggctcgttattcgatcaaccttcgctatggtcgagaatggcgcgactcgctgtcagatctgcgcgacctgcctatctacacgccgcagggcagtcaggtcaccctgggcacagtagccaaggtacaagtgaccgatggcccgccaatgctgaaaagcgagaacgcacggctgtccggatgggtgtatgtcgatgttcgtggccgggatatggcggcggtcgtaaacgatctgaggagggagatcgcaagtggtatacaactcgactccgggatgagcattagttattcagggcaattcgagtttatggaacgcgcaaacgccaagctcaagctcgtggtgccagcaacattgctcatcattttcgtgttgctgtacctgacatttgcccgctttggcgatgcgctgttgatcatggcgaccctgccgtttgcgctcacgggcggtgtctggctcctatacctgttggattaccatctgtccgtcgcgaccggtgtcggttttatcgcgctcgcgggagtctcggccgaattcggcgtgatcatgttgctttacctgaaaaacgcatggagcgaacggctcgatgcggaaaacctcggagagcctgcccttctcgatgcgatacgcgaaggggccgttcagcgcgttcgtccaaaggcaatgaccgtcgcggtgattgtcgccggcctgctaccgatcctttggggcagtggaacgggcagcgaaatcatgagccgaatcgctgttcctatggtgggcggcatgatcactgcgcccttgctctctttattcgttttgccggcagcgtatctcctgatgcgtcgcaagcagtttcgcgtcctcccacaacaagccactcaccgcgcaggagaataaccatgaaactcgtaagtactgccttcgccgccctcatcatggctcccgcctcgtttgctgatgacaagcagcccatggaaggtatgcagatggatcataaaaacatgaacatgcagacggacgacaagtcggctgggcagaccgctacggcttccggtacggtcaagaaagtcgacaaggataaagagattgtcaccattgctcacggccctgttgaagcgctgggttggccctccatgacgatgggcttcaaagcacagcctggtcagctggaaggtgtgcgagaaggtgacctcgtcgacttcgactttgcatcgaagggcatggaatccaccatcaccagaatccaaaagcagtagcgtagagagcgaccgtcatgcacggcggtcgcgattcaattacggctcagctgcgccagatgctcagcgcacactgccatggcgtttgtcggttttagccgtttcctctcgcgcgaacgagtcgttgagaaggtggttcaacaccgagcgcatttttcctgctttgaccggtttgttcaacaccggcacgcccaggccctggagttggcggcggcattcgtcgctgcggtcggccgtgaccatgaccaccggtatcgtctgaccgtagtgcgcgcgtagcgccgtcaccacatcccaacccgtcacaccttgatcgagatggtaatcggcaagtatcacttccggcggcaagccgctcagcacggccaaggcggccgcctcgtcggtggcggtcaaaacttcacagccccactgccccagcaatgccgccatgctgtgcagaatgctcagctcgttatccaggaccagcaggcgccggccaggcagtggatcgcccagcaccggcatcttcaccggtgcttcgaccggtagcggcgcggggttatcggcgagcggcacatcaatgctgaagaccgatccgcgtcccggccgcgagcgcaccagcacccggtaatcgagcatcgtcgcgatgcgatcgacgatggccaggccgagcccgacacccgcgcgctcagcggcacgctgcacgcccagttggttgaattcgaggaagatcgtctgcaactggtccgcttcgatgccccgcccggtatcccagacctcgatccgcaggaactcgccacgtttgcgcgcacccagcagcacccgtccgctgtccgtatagcggcaggcattgctgagaaaattacgcagaatccgcgtcagcagcctgaagtcgctgcgcagcgcataggccgggatgaagtgctcgaagccgagccccttcgcttcggccacggactggaattcggaaaccagcggcagcagcacttcgtcgagacggtagacatcgatgtcgggcttgatggcctgttggtcgagtttggaaatgtccagcaggtcggtcagcaggtcttcggcgccttccagcgcctggtgcgcgcgctcgacgagggtctgctcggaggccggcagcccccgctcgcgcagggtcgagatcagcaggcgtgccgcattgagcggctgcaacaagtcatggctggcggcggccaggtacttgtccttgctgtggttggccgcctctgccgcatcgcgcgccttgcgcaattccaacgtgcgctcggcgacccgttgttcgagctgttcattgagctgcaacaggcgcagttgcgccagtttgcgctcggtgatatcggcgacgaagccttcgaccaacccctcttcatcaggcttgaggagcaggttcatcatcacgtcgagggtgctgccgtcctttcgccgcagccgggtttcatagccgaacaacccgcgctgagtgctcagcacgtggcggatctgcttgagctcgccctcaccacccagaaacagatgatgggacaggtcggtcagcatccacagcgcttcttccggactctcgtagccgagcatgcgcgccagggcgggattggccgcccggatgccctcttgcaagctggcctggaaaataccgtgcaccgcatgctcgaacagccacttgtagcggttgcgttcggactccagttcctcgagacgcgccaccaactcgggatagtggctcttgcgtgccgaatgactacccaggccgagtagcccggcgagcgcctcgtcctgttcagagtgcttcggcatagaccacttcgacgtcccgctgagtggatgaacgcggattggtcaggatgcagggatcttgcatcgcatgctgcgacaggaacgggatgtccgagagatcgactccgtgcagacccagggtctcgtggaaaccgatagcctgcttgagcgcggcaagatgctggaccaggcgctcgcggatctgccgatggctcaggccgcggcagtctatccccagggtttcggcgacgaccttgaaacggtccggcgccgcgtcgtagttgaatgccaccacgtgctcgaccaacacggcattgcacaggccatggggaagatccagataacctccgaggctgtgagacattgcgtggaccgcaccgaggatagcgttggaaaacgcaaggccagcctgcatgctgccgagcatgatcttctcgcgcagctggatgtcggttggattggcgatcatctgcaccagatgcccgttgatcagccgcatcgcctccagcgcatgagggtcggtcaacgggccatggccggtagaaacgaacgcctcgattgcatgcaccagcgcatcgatgccggtacaggcggagaggaacgggtccatgctgagcgtggtttccggatcgatcagcgagacgtccggcacggcgcccttgctgacgatcgagaacttcatgcgctcttcctggttggagatgatcacgaattgcgagacatccgccgaggtgccggcggtggtcgggatcaggatcaatggcgggctcggcacccgcaaggtatcgacgccttcgaattcgatgatgcagcgcccatgggccaccgcgatgccgatgcccttggcgcagtccatgggactgccaccgccaaccgcgacgatgacgttgcacccttcgctgcgatagacctcggcgccggccatcacctcttccgcacggggattggccgatacctgggtgaacagatggtagtcgatgcccaggttggtcaggctggcctgaacatcgccgacccagccggcggcgacgacacccgggtccgacaccaatagcaccttgcgtgcgccaaaattcttcgcgtaattgccgacgctatggcggcatcctgcgccgaaaacgatctctggcgagacgaacttacgctgcatgctaaggtttgggctcatacaacggccttcgtaattatttgttaccgacgccaagcctactgctttgcgcgatcaaagcaatcggcaaaaaggtgcagccggggccaggccggcagtctacaggttcgccgactggaccgggtggctcgaagcgcccgcaatgacgcctgccgctagccgagtaggcgctggtaaaaacgatactcgcactcgagggcgtcggccaggttggctgcctggcggaagccgtggcgctcctgcgggtagagacgatactccacggtaatcccttgccgcttcagggcatcgaccatggatgcggtctgctcgggcaataccaccgcgtccttaccgccctgaaagaagatcaccggcaccttgatccgcgcggcattgttaagcggcgcgcgctggcgataacggtcagcgtgctgctcgggatcgccgatcaaccaatccaggtagtccgcctcgaacttgtgcgtgacgcggcgcagggcaagcggatcgctgactccgtacagactggcgccacctctgaagccactgtcggacgccaacgcgcaaagcgccgtatatccgccggcactggagccgcgaatgaaggtgcgggccgggtcgatctgcccgctcacgttcagcgcccggaccaaggctgcggcgtcctcgacatcgaccacgccccactggttcttcaggcgttgccgataggcacggccgaagccgctgctgccgcgatagttgagatcggcaacagcaaagccgcgctgggtccagtattgaattcgtggatcgaataccggatagcaggcggacgtcggccccccatgcaggaagaccaccaatggcggcttttcccctgtccggcttcggtagtcagcgttgctcggcggatagaagaacgcatgagccgtctcgccatgggccgtggcgaagctgaacggctgcggtcgcgacagctgctcggccggcagcggctcagcgccgcccgcgacgattcgcacgtctccggttcgccgggcgatggccagcacagcgggcgcgcgattggcggcgccggcaatgcagtagaaatatcgatcatctgcggcaagctgtcggcaacggtcgaatccggtcgccaactggcgctcctgaccgcctccattgcgctcgaacagcagtccatagccatcgatcatgcgcgtcagcagcaggccgccgtcggccaacggcaggtagctgacggttccgagctgccagggtgcaggggcgtggtcgtaaggaggcgccaggtcgtcggcctcggcgccgacgtcagcatccggcgcgaacgccgggaccagccggccgcgctgctcgcgccagggttgccaccagcccgaccggtcactcaggcagtagagcgtgccatcgggggcaaaacgcggttgctgcagggattcgccgccctccgctccggccaggcatagcgccggccgccaggcgccgtcatcgccacgttcggccatccacaggctggtcgccgtccacggctgttcgggccgctgccactggatccaggccatccgccgggattgggcatcgacgaccgcggatgagtagaagtccgcgccttcgccgagcacgctgcgagcgccatcgctcgccgagaaactgaccagccggtgcacaacgggctgcgcggcgtggctttcttctaccgcgatgatggccgattggcgcgaatcgaattgcagatcgccgtaacggcagtcggggcacgcggtcagcgcgacaggttcgtcgaaccggccccgttcgaaggattgcagatgaatctgctggtccgtttcatcgacgaaggcgacgccttgcgtcgtcacgcagaaggcgccgccgccatattcgtagacgcggctgcgcagcgaacggccggctggcgtcgcacagacaagctgcccgtcgcgccagtaccacagcgtgcagcgggcgtccgtcgggtcgtattcgatccagaacaggccgtcatggcctgcgcggatctcagcgaagtcgcggctcgccgctgccgccttttcggcgctccaatcgcttggccagaagccgaagggtgtagcagtcttggtcatcgtgatcgcgctcgacagccataagctcgtgtcgagccaccttacaccttgaggatcagttccgaagccttctcgttgcggaaggtcagttcctccaacccgcggggagcttgctcggcctcggtacgtgcagcgagaatcttgccgtgatgagccgacttgctgcacaccggatccgcgttggctgcgtcgccggtgagcatgaaggcctgacagcggcagcctccgaaatccttttccttctcgtcacacgactggcatggctcgggcatccagtcgaaaccacggaatttgttgaagcccatcgagtgcttccagatctgttcgatgctctgctcgcgtacgtttggaaagctgatcggcaattggcgggcactatggcaaggcagcgcggtgccgtccggcgtgatgtcgaggaacaggttgccccagccgttcatgcagcccttggggcgttcttcgtagtaatcgggcgtcacgaagatcagtttgcacggatggttctcggcggcgagcttgtcacgccactcgttggtaatccgctcggcccgcaccagctgcgccttgctcggcagcagtccggcgcgattgagctcggcccagccgtagaactggcaggtggcaagctcgacgaagtcagcctccagctccaggcagagctggatgatgcggtcgatgttgtcgatgttgtgccggtgggtgacgaagttcagcaccatcggatagccatgcgccttgaccgcccgcgccattgcgagcttttgtgcgaacgccttcttcgagccggccagcaggttgttcacttcctcgtcggcggcctggaaactgatctggatatggtcgagcccggcctcagcgaacgaggcgatcttctcctcggtcaggccgatgccggaggtgatcaggttggtgtagtaaccgaggtcgcgcgccgccttgatcagctcggccaggtcctggcggaccagtggctcaccgccggaaaagcccagctgcgccgcccccagctcccgcgcctggcggaacacctcgatccactgtgcggtggtcagttcgtcctgattgcgggcgaagtccagcgggttcgagcaatacggacattgcaacggacagcgataggtgagctcggccagcagccacaacggtgggccaggctcgaaacccggtttagcgaagctcgatccagaaccgttcaacggctacctccaggaacgcaacgatgtcttcctcgataccttcggcatcgggaaacctgctctgcaactcagcgacgatattgccgaccgtgcgagtgccgtccacttcgctcagtacggccgacgcgctctcgttgagcttgatcatgccctcgggataaagcaggacatgacagttctgcgcaggctcccattggtagcgaaagccgcggcggaaggctgggatttgcgtcagttggatatcgctcatgttctctgtctcgccgttggcagacggtggcctgcgagtggtaaatctgtgacctgtcggatgagtcggcggcgccaagccctggcagtccagtttggcgccaatgctcagacggtgatgcccttatgccagacgcgctcgctcgttacggtgtgatacggcgggcggtccagctcgtaggccatgctcatggcgtcgagcatgctccacaagacgtcgagtttgaactgaagaatgttcaacatgcgctcctggctttcgcgggtcgtgtagtgctccaaggtgatgcgcagaccgtgttcgacatcgcggcgcgcttctttcaaccgcttgcggaaatagtcgtagccagacggatcgatccagctgtaatgctgcggccaggcgtccagtcgggactggtgaatggtcggcgcgaacagctcggtgagcgagctgctggctgcctcctgccagaccgctcgacgcgcgaagttgacgtaggcatccaccgcgaagcgcacacccggcagcaccagctcctgggacagcacctgctcgcgatccagccctaccgattcagccaggcgcagccaggcctcgataccgccctcctctccgggcctgccgtcatggtcgatgatgcgctgtatccattcacgccgcgtctcgcgatccggacagttggccatgatcgccgcgtcctttaccgggatgcagacctgatagtagaagcggttcgcgacccagccctgaatctgcgcgcgggtcgagcgaccttcgtacatggcccgatggaacgggtggtggatatggtagtagtcgcccttggcgcgtagcgccgcctcgaactcggcgggggtcatggctggctgactcatagagtttccttacggtgattgcgagcgactgtccgggcgcgcctggctgcgttggacagcgatacctgtaggcttggcgatctatcccgctagagttcgatgctcatgccatcgaacgacacctcgatccgatgcctgtcgagctcggcacgctcggcggaatcctcgtcgaggatcggattggtgttgttgatgtggatgaggatcttgcggctggctggcatgccgtcgagcacctcgatcatgccgccaggcccgctctgttgcaggtgccccatctcggaacccagcttggttcccacttcccgcacccgcatctcatcgtcacgccagagcgtaccgtcgaccaacaggcagtcggcgcctcgcatcaggtccaacagctcggggctgacctggccgaggccgggcgcgtagaacagcttgccgccagtgctccggtcttcgatcagcaggccgatgttgtcaccgggatgcggatcgttccggtgcggtgaataaggcggcgccgagctgcgcagcggaatcggggtgatctccagattcggacaggtcgggatgcggaagctgccttccagcgcgatcgggttccagcgcaggccgccgttccagtgctcgagcatcttgaacaatgggaacccggtggtgaggtcctggtggaccatctcggtacaccagacttcatgtgggcagccttcacgcagcgtcagcaagccggtggtgtggtcgatctggctgtccagcaggatgatggcgccgatcgcggtatcgcgcggcgcccgtgccggttgcagcttgggaaacgattcgagctgggcacggatatccggcgaggcgttgcacaggatccagtcttcgccgttgtcgctgatggcgatcgatgactgggtgcgcgcttgggcacgcagcgtgccggctcgcagcccggcgcagttggcacaattacagttccattgtggaaagccgccgccagcagccgaaccgaggatctggatgaacatgggcagctcccaaaaagcggagccccggccggggccggggcagatcaatcagcgattggcgaagtacatggtgacttcgaaaccaatgcgcaggtcggtgaaagcaggtttggtccacatggctcgattcctctttttatggatggcgggttatcccgacgactcattaagcaccctgttccgtcaaaagcagaatggtactttggaaggagacagcgccctgccttggtagtgcccgctcgctgtcggcagcgacgaactatcgctgccgcgtcgccgggcggtcgttcatgccccgccaggccaattcgttggtgagcgtggccatgggcgagaacatgtcgtaatcgaacgaggtcatcctgtcgccttgctcggcgcgcaacggccagtcgtgattggccagcgcggccttgcccaccgcgacgaggtccagctctccgtcgtccaggagcttctgcgcctgctcgcgggtctgcaccccaccgttgcctatcactggtatcgacacgctggccttggcgatcgccgacagcgtcgggccttcgtcgaacgctggcgcaccgacgtcgtattcggtgatgtgcaagtaatccagccccgcgtcggcaagggtggcgaagcgaaccctggccgcctctaccccgccgtcccatttcagccggctcgcggacaccataccctgggacagccgcatcccgaccagaaattgcgcaccgaccgcttcgcgcacggcctcgatcaccgccaacggcaacgccagccgagccttgaagtcgccaccccaacgatcggtgcgctggttgaactcggcgctcatgaactcgtgcagcagatagccattggcgccgtgcagctcgacgccgtcgaagccggcatcacgcgcgtgccgggcggcctgaacgaacccggcaatggcctgctggatttcttcctcggtcatctcggcgggcgtggcgtacggaccttcgccgccatagaagctcagttgctcaccaccaggctgcaccgcagatggcgcaacgtggcgcgcatggtgaacgttgccctgggtctgggcgccaccgtgcatgagctgtgcaacgaaggcggcacccgcctcgtgcacggcctggaccaatggtttccagctgtcccgctggacctcggtcgccagccccggctgattgaagtatccctggctgtaggcggtatcggtgtaggtaccttcggtgatcagcagggcgaaaccgccttcggcgaacgcctggtaataatcgcgcatcagctcgttggccgtcccgtccggctcggcgctgacgcgcgtcatcggtgccagcacggtgcgattgcgcagggtcagttgcttgagcgtgaaggattcgaacagctggggcatgggcctttcctcatgaaagcggggcgtttccgaatctgaggggtttcagggcagcggagttcgtggataacgatggctggtctgtcgcgaataaaaaaacgcggccctaaggccgcgttgcgttgacgaaccaacgaccgcacccagccggccgatggtcccgcactcagggtgcgagcaagtcctgccgacgcgctggagcgaacgcgccgggtccaacgagtgacgacgccggcttagaagaagcccagcgggttgatgtcgtagctgaccagcaggttcttggtctgctggtagtgatcgagcatcatcttgtgggtctcgcggccgaccccggacttcttgtagccaccgaaggcggcgtgcgccgggtacaggtggtagcagttggtccacacgcgaccggccttgatgccacggcccatgcggtaggcgcggttgatatcgcgggtccagacgccagcgcccaggccgaactcggtgtcgttggcgatggccagtgcttcggcttcgtccttgaacgtggccacaccgaccaccggcccgaagatctcttcctggaacacgcgcatcttgttgtggcctttgatcagggtcggctgcacgtagtaaccggtcgacaggctgccttcgagcttctcggcgttgccgccggtcaggatctgcgcgccttcctgctgggcgatttccatgtacgaaaggatcttgtcgaattgctgctcggacgcctgtgcgccgaccatggtgtcggtgtccagcgggttgccgcgcttgatggccttgatcttcttcatcaccacttccatgaagggttcgaagatcgattcctgaatcagtgcacgcgacggacaggtgcagacttcgccctggttgaagaacgccagcaccaggccctcagcggccttttcgatgaacgccggctcggcattcatgatgtcttcgaagaagatgttagggctcttgccgcccagctcgacggtgctcggaatgatgttctcggcagcgcagcgcatgatgtgcgagcccaccggggtggacccggtaaaggcgatcttggcgatgcgggtgctggtggcgagcgcctgccccgcctccttgccaaagccctgaacgatgttcagcacgccggccggcagcaggtcgccgatcagctcagcgaagaccatgatcgacagcggagtctgctcggcgggcttgagcaccacgcagttgccggcagccagtgcgggcgcgagcttccaggcggccatcagcagcgggaagttccacggaatgatctgaccgaccacgcccagcggctcatggaaatgataggccgcggtgtgttcgttgatctcagcggcgctgccttcctgggcgcggatgcagccagcgaagtagcggaagtgatcggctgccagcggcacgtcggcgttcagggtttcgcgcacggccttgccgttgtcccaggtctcggcgatggcgagtttttccaggttggcttcgatgcggtcggcgatcttcagcaggatcagcgcgcgatcctgtaccgaggtcttgccccaggcgtcagcggcagcatgcgcggcgtccagcgccttctcgacgtcttcggcgccggagcgcgggaattccgcgatgacctgcccattgaccggcgaggtgttgacgaaatactcacccttgaccggcgggacgaattcaccgccgatgaagttgccatagcgtggcttgaaggaaatgacggagccttccgtaccgggttgggcgtagatcatgagcggcctctccaatgttctgcttatcgagcctgaccggggatggacagggcatggagcgatagtaggcagcgcgacagccgtgccggaatgcacccaagggagagatgcgctcgtcatttggtagtagatgccgggtggcgtccaggcggcctgtcgcggcggcgatcagactcgggaacggccagcgtcggatcgaaaaatccgacaggttaatccgcgtcgcccagctggaaattgaccatcggcaagcccgatcaggtggatcgcaaattctcttgcgacgcaacaaaagcgcgaccaattacccatgaaatcgagccgaaagtcctattaggacgcccctcctcgcaccgtagttttcggctggcggcaccgttccatttccctgatacggaaagccaaaaacgaaaacaacgatgaggagataccccatgcaatggatcgatcctgacttctgcgacctgcgactgggcttcgaagtcaccgcgtacgtctacgtacgctgagcccctgaccggcgtggcggcgcaagccgtcacgctggcggtgcgaggaaatcgacatgaccaccccgaacactgcgcttgagcgctgctacgagatccgcccgccgttcctgtttcgctgggaagactcgcagcaggcccacgtgctgctctaccccgaaggcatcgtcaagctgaacgccaccggcggcgacatcctccgacactgcgacggcaagaccagcgtggccgagctgatcgaccggctcagccacctctacaacgcaaccgaccgcgacgccataagcaagggcgtcctgaacttcctggaggtgtcccatggcaaggggtggatccgagctaaggcttgatggcagcggcaaccccgtctggctgctgctggagctgacctaccaatgtccgctgcagtgcgcgttttgcagcaacccgcgcaacttcggcgactaccgccaagacgagctcagcaccgccgagtggatcgacgtgatggcccaggcccgcgccatgggcgccatgcagatcggcttctccggcggcgagccgaccctgcgcaaagacctcgagacgctggtcgccgaggccgatcgcatgggctactacaccaacctgatcacttccggcatcggcctgaccgaagctcggctgcacgccctgaaggacgccgggttgcgccacatccagctcggtttccagtccaccgaccgcgacgtggcgcgccagctggccggggtcgatgcctgggagcgcaagctcggcatggcgcggctgatcaagtcgctggactttcccatggtgctgaacgtaccgattacccgacagaacatcggccagatcccggacatcatcgacttcgccatcgagctgggcgtggaatacctcgaactggccaatgtgcagtactacaactgggcgctgctcaaccgtgatgcgctgatgccgactcgcgccgatctgctgcgtgcggaaagccaggtgcagcaagcgcgcaagcgtcacggcgatcggctgaccattttcttcgtcatccccgactattacgaaggccgacccaaggcctgcatgaacggctggggtgccatccacgtcaccatcgcgcccaatggcgacgtgctgccctgctcccaggcggccaacttcaagcatctccagtttcccaacgtgcgccagcagcgtctggcgcagatctggcacgattcgccggtgttcaacctgtaccgcggcgatagctggatgcctgagccctgccgcagctgcgacgagaaggaaaaggacttcggtggttgccgctgccaggccctgctgctgaccggcgacggcgccaacaccgatccggcgtgcaaccggtcgccgcatcaccaactggtgcgccaggccgtggcactggccgaagaggccgcgcgcccgcagggcaccctgattgcccgccaagccagccagggggtcgaaattgaaactgccccatgattcgttcgccggcactctcggcgccggcctcgtattgacgctcggctgctacctgctgctgcgcgtgctggtctaggaggcgtcatgcaactgcccatcctcgacgtgctggcccgctacgcgcatttgctattcgcgctggtctgggttggccacaactacgccaacttcatccagaatccgcgcttcgtgccgctgcacaacggcatcgacactgccacgctgaatcgcgacctggaagcgcggatgaagcgcgagcacggcatcttccgttacgcctcattagtggtctggctgtccgggatggccatgctctggcatcgcggttggctgcccgacgccctgttgctcaaaggtccgctggcggtcatcggcctcggcgcctggatcggcacggtaatgctgctcaacctctggctcgtgctctggccacaccagaagaagttgctcggcttcgtcccggcgacgctggaggagcgcgtgcgctgctcgcgtatcaccttgctgtcgtcgcgcagcaataccatcctgtcgattcccctgctgttcctgatggcgactggcggccatggcttgcacctctactgaaccgtccgctcgctacaacttcgccgccggtccggcgatgctgccggtcgaggtgctgacgcagatcgccgaggagttgccgaactggcaggcgagcggcttttcggtgctcgagcaaccgttcaccgatgcgccgttcaagcacttgatgagcgataccgaacagttgctgcgcaggctcctggcgattccgcacggctaccgcgtgctgttcctgcagggtggcgcatcggcgcagttcgggctgttaccgctgaacctgcttcgccccggacaaagcgccgactacctcgaaagcggccactgggcacgcaaggcgatcgccgaggcgcgtcggcacgcaccggtcagggttgtcgccagcggtgccgcacgaggcttcagcgccctgccctcgttcgaacactggcggctcgatcccgatgccggctattgccacctcaccggcaacgaaaccagcaacggcctgcagatgcagcatttcccagagtcgcccgtgccgctggttgccgacatgacctccgacctgctgacgcgccccttgccggtcgggcgcttcgggctgatctatgccagcgcacagaaaaacctcggcgtcgccggcctctgcctgctgatcgtgcgcgatgacgtgctacgcaagccgccgcgcgggctgcccgccgcgttcagctatgccgtccaggccgagcagcagagccgcttcaacacaccgccaacctttgccctgtatgtcgccaacctgatgctgcgctggatcgagcgccagggtggcctcgaggtgatggccgccaacgcccgcgagcgcagccagcggctttatagccatatcgacgccagcggcttctaccattgcccgcagcgcgtggcacaccgctccaccatcaacgtctgcttccagttacgcgatccgcagcgggtcgcggcgttcgttgccgaggcggcacatcaggggctgcatcacctggccggccacgcggcggtcggcggcctgcgggcgagcttgtacaacgccatgccgctggagggcgtcgagcggttgctggcgttcatgcaacggttcgagtgccgccatggctgagggggttttgccagcacagcgcacgcgtctgcgccaccgcttcgcactggacctggcgagcctggcgtgccgcctccccgcgcagccaatcgctcaaccggtcgaggcgatgggcctgcagttccagaccccggtgggtatcgcggccggcttcgatcgactcggacggctcgggcgccgggcttcgacgctgggcttcggttttaccgagatcggcagcctgaccgccgccgacctgccccttctggcagctccccggctaggcgcggcgcaactgggtgtcaacctgacgctcgacgcgggtcatgcgatcgcccagacctgcgcgctgctccagggcgcctggccttgggccgactatctgttgctcaacctcatcgggccggcctgtgcgcctttgctggagcagcccgggcgtctccaagcgcggctcgccgcactgcgtgaccatcaccgacatctcaactgcgcctacggtcggcaggtcccgctggtggccaagctacgctgcctgcccggcgacctcccgctggccctggtcgatcggcttctggggctgggcttcgatggtctgctgctggcccatgaccccggaccgccggccacacgccagcgctacctcgcctggcaggatgagcgcgtccaggcgcaggcgtgcgcgcaggtcgcgcagctgcaccgtctctgcggaccgaacgctgtattgatgtcggtgggtggcatccagacggccgatcacctgcgtgagcgcagggcggccggcgcgctgctggtccaggtgcatgcggccctgctgcagcaaggaccctggctggcgcgccgcctgctgagggcgggaaccgaacgtccggttcggtagagggcgcaagcctagccgcgcgaaggcgttgcccgccacgactgcctgcgcacaaacgaaaagggccggctaagagccggccctttgtcttcaggtatcgatcaacgcttggcgacgacctggtccttcggcagcttgaaggtccagaccatgccaccctggttgaagtccttgatgcgcttggcgacttcgccgccccacagcgggaccgcaccaccccagccggagagcacggagacgtactgctcgccgtccatttcccaggtaatcggcgagccgatcacgccggagccggtgttgaactcgtagagtttcttgccggtcttggcgtcgaacgccatcaggtagccttccgggttgccggtgaataccaggttacccttggttgccagcacaccaccccagagcggcgcgtagttcttgtagcgccagacttccttgccggtcttcggatcgatggcgcgcagcacgccgatgtactcctcgttcagcggatgaatggtgaagccggcacccagataggccgcgcccttcttgtaggcgacgccttcgttccagatgtccatgccccattcgttggacggcacgtagaacagcccggtgtcctggctgtaagccatcggcatccagttcttgccgccgaggaacgacggcgcgacgaagaccgacttgcccttgtccgcgtcgcccggggcgccaggacggttggcatcgtcgtagaccggacggccatccttgtccagacccttggcccaggtgatcttgtcgacgaaggggaagccgcggatgaacttgccgttggtgcggtctagtacgtagaagaagccgttacggtccgcggtgccagcagccttgacggtttttccgccgtcctggtaatcgaaggagatcagctcgttcacaccgtcgaagtcccagccgtcatgtggcgtcgactggaagtgccatttgatcgagccatcgtccgggttcaatgccaggcgggacgacgagaacaggttgtcacccgggcgcaggtgcgagttccagggcgacgggttaccggtgccgaacagcagcgagttggtatccggatcgtaatagccgcccagccagggcgcggcgccgccagtcttccacaggtcgcccggccaggtcttgccggcctcaccaccggagatgccgttctcgaccttcttgccgtccttcatcacgtagcccatgtggccttcgacggtcggacgggtccagatcagctcgccgttcttggcgtcgaacgcctggatcatgccgacgacaccgaattcgccgcccgccaagccggtgatgaccttgcccttgacgaccatgggtgcggcggaaatggagtagccggccttgtagtcagcgacggtcttcttccagacgaccttgccggtgtccttgttcaacgcgaccagcttggcgtccagggtgccgaagatcaccaggtcgtcatacagcgcgacaccgcggttgatcacgtcacagcacggcatgatgccatcggggaggcgcgcatcgtactgccagatttccttgccggtacgggcatccacggcgaagacgcgggaataggagccggtcacatacatcacgccgtccttgatcagcggctgcgcttcctgaccacgctgcttttcgccgccgagggagaacccccagaccgggcgcagttggctgacgttttcggtgttcagtttgtccagttgactgtagcgctgcccttgcaggcccaggccgttggtgacgatctgatcggtggacttggcgtcgttgagaatttcctgatcagtgactgcccaagccgacacgctggacatcgccatggcggcgcatagcgcggtcagggcgaagggcttgcgaagaccggtgtgcttcattgcggctacctctacgggttcattgttatcgtcgccgggaagttttcccggtctgttgccgattcttcgttgcaggccctttgccaacaattgcacgcagtaccgattttcctactcccttggtagcaataccgtcacgcagggcgcgccagctcagcgatcgaagggtctggccgagcgcaactcgacaccgaagtcgcagcccgggggcccgaaaagacaatttctcgcggtgacaactgcccgtataaaagcggttcccccgctcacaaggacatgagccatgcttcgtccccttttacttatcctgctattggcgctgacggctgacggccaagcggcaacggcgattcgcgtcggcctgaactacccgagcaccggtaactacaaaagcgaagggctggagctgcgccgtggcgccctgctcgcgatcgatgacatcaaccgcgagggtggccttctcggcaggccgctggagctggtcagccacaacacggcggcacgcgacgaaaaggccagcgccaacatcgatcgattcgtcgctcagggcgtttccatggccttcggcggtgctaccagcgaggaagccatcgctgccgggcaacgcgcgcgcgagctcggtttgctgttcttccccacgctggcctatgccaattcgatcaccggccgtgacgggcagcgttatttgttccgcgaaaccaacagcgcctggatgagtgcgcgggtgctgggcgagtacctcagctggcacctgcccaaccgccgttaccactacatcagcctcgacgacagctggggtcacagcatggaacaggcgttgcgcgaagccactcgcagccgcgatcgcgcccgtcatggcttctccagaatcagtgccagaggcgcgcatcatgacgagtatcgcgccgcgctgaagaaggccggtgccagtgatgccgatgtgttggtcatcgtgctgctcggccaggatctggtgcagacgatgcgtctcgcccatgatctgcgcctcgatcgacggatgcagatcatcgtccccaacctgaccagcagcatcgtcgaacaggccggtccgcaggtcatggagcatgtgatcggcaccaccgcctggacctggcaggtgcctgcgctggtcaagagcgcccagggtcaggcattcgtcgacgcctacatcgcgcagcatcgacgctaccccgacagcaccaccgcctcggcctatagcatcgttcgggagtgggccgctgccgttcagcgagccggaagcctggacagtgaggcagtcatcggcgcgctggaggatcatcactacagcctgctcaaggatgaccagtactggcgcggcttcgaccatcagaacgtacagagtatctatgccgtgcgggtccgctcgcgcagcgagatcatgcaggaccgcttcaagcaggactacttcaccatcatccaccgtatgggcggtgaggaagcggccccaagccgtgatgattggctggaagagcgcggcgacgatccaatcctgcgataatccgcgcccggtacgccgtgtctgtcgcttgcatcgggcagacgaaccaaaccgcttctgtatcgtggcggcggcgtcaggcttcctactcaatctctatggctcccaaacacaacacgggaccggatcaattccgttgtgcaggcgtttttttaaatgaaagagaagtggtcagcgtttccctgggtgtgcttcgccatgtgcgtaggcgtgatgggcaccgcgctgatttcgccgctctacccgttgtacaagacggcgtggcaactacgcaccagcgacatttcgctgatttacgtggtgtacatggtcggtgcgttgttcgggctgctgttcatgggccggttgtcggacaccctgggctttcgccgggtgatgctggctggcctgctgctgggttggggcgggacgctgctgacgatgctcgcctggagcctgccgagcctgaatgtgggtcgcttcgcggtagggctgtcgtcgagcctgatcgtgaccagcgcctcggtgggcctggtgcagatctctcgcgacggggcgtcccaacgaatatcgatgatcaccagcttcctgctcgcgttcggcttcggcctgggcccgctgaccggaggcgtcatcggtcagtggttgccgcacccgctgacgatcacgtatgtgccttcgctgattctcggcgtgctggccgtctatgccttgatgcgcgtgcagctgaagcaccacgaggccgtcacgaccgcagcgctcggttggcgatccttcatcccgcgtctggcctgggcgagacgcagcgactcgctggccttcatgctgacctgcgcttgcccgttcttcgccttcggcgtcttcgggatctacgcgtccatggcgccgttgtttctggaaaagatgattccctggcacggtccggtggtgagcgggacgtccatcggggtcatcctgctggcttcggccatgacgcagctggcatgcgcgcggataagcacgcgctggtgcggactggctggtctgttaacggtggtgctcagcaacgccatgctcgtgctcaacttcaagctcggctcaccggctgtgttcatcgtcggcgtctgcgccgcagccaccggacacggcctgtgtctgctggcggggatcagcatggtcaaccgaatcgccacgcctaccgaacgttccggattgatttcaacctatctggtgtgcggctacgtcggcagcatcgtgccgctgatcggcgtcggctggattgccgaccagcatggattacccgtcgcgatctcggccctggggctttgcgtcatcgccaccgcctcgccgctggcggtgtggttttttcagcatccgcggatgcgcgacgcctaagcctgtaactgccgctgcggcaagcgcagccgtcaggcctcgaccatcaaacggtagccgaccccagcctcggtcacgatgaatcgcggcgcggccggatcatcccccagcttgcgccgcaggtgcccgaccaccacgcgcagataatgcgtgtcgccgctgtggctcggcccccatatctccttcaacagctgctgctgcgtcaccacgcggccgaggtgccggcccagttctgccagcacggcgtactctttgcgggtcaggctaatctcctgctcgtcgaggcttacccgtcggaaggcgaagtcgatgcgcaaggagccggacaccacttggctcggcgccgcgtcctggctcggggcctgacgcaacaacgcacggacgcgggcgagaaattcctggatgccgaagggcttggtgacgtagtcattggcgccgccatcgagcgcggtgaccttttcagtttcgctggcgcgtaccgatagcaccagcaccggcacctggctccattcgcgtagctcgcgcagcacctgctgaccgtcgatgtccggcaggcccagatcgaggatcaccagatccggcttttcgagcgcagcacacgccaggccttcccggccggtcgcgctttccagtacgcaatagccttgtgagccgaggctgatgcgcaggaattttctgatctgcggctcgtcgtcgatgaccagtagacaggcttgctcgctcaagagaggtccttttcaatttccggttgaggttgcagcggcagctccagaatgacgctagcgccgcgtccatcgagaccgtcgccgaccgagacgcgaccaccatgggcgccgatcatgccctggcagatggccagaccgaggccggttcccggtccgccgcggtcgccgcgcgcagcggtatagaacatgtcgaatatctgctcgcgctcggcctcgggcacgcccggcccctcgtcactgacgatgaagcgcaggtgcccggcgtccgcctcgacggcaacacgcaagcgcccctgcgccggcgagaaacgcgccgcattctccagcacgttgaccagcgcctgctcgatcagggccggatgcacatagagcagcggtagcgaatccgggattgcaacctccagcttaagttcggccagtacacgctgaaggcgttgcagcgcgctggcgacgatatcgcttggcgtggtccagtctcggatcagtttcaggccaccgtgccccagacgagtcatgtcgagcaggttctggatgtagcggtccagccgttcggcctcgtcccgggtcgcatccagcaacgcctgtcgatcggcttcgctcatgctcccacctagagtggccaggctgtcgatggagccgcgcatggcggtcagcggcgtgcgcaggttatgagagacggaggccagcaaggcgctgcgcagctcttcggtctgcccatgcagccgggcggcctccagctcttcggctagcacggcacgttgcagcgcctgcgccagtggatgagcgagcgcagcgatcaaccgacgcgtctgtggccgtgccgcccgggtctgtcggatgccaagcaagccgagggcgcgcgtctcgccgctcaagggcaaccaccaccaattgccgctcggcagcgtatcggtgccctgccccgcaggctggcctcgctgccaggcccagtcggcggccgcttgttcctgttcggcgagcggcggcgcctcgccgttgaacaaccattgcgcgtccttgccgcgggtcgcgaccacggcctgtatacccggcaactgttgcaactggcgcaccgcagcggcaccaacggcctgtgcatcggttgccgcactgagctggcgggacagatcgagcaaagcggtggtttccgcctgcgtctgccgcaacgcctgatattgccggcgctgacggctggcgaggttgccggtcaggacagccatcagcaaaaagaacagtagcgtgagcacgtcttcctgccgcgccacgataaaggtgaaggtgggcggaatgaagaggaagtcgtacagcaggaaggaggcaccggcacaggccaacgccgggccaaggctgcttcgcaccgccaccaccagcaccgcagcaaggaataccagcgagacgttcggcaattccagatagcgggacagcatcaatgccgctgccgtcgcaacggcggtcgcgacggccgccagcaggtagttgtgccagtcgacaggcgtcttggctgccgctgtggttaccgcacgagccggctgttgcgccaggacgctgacctccagcgcctgccccgccccgatgagctgctcggcgatacctcgcctcggccagagccgaaaccgccgacgcgatcgatcgctggcgccaatcagcaccatcgtggccaatcgctccgaggcatgctcgctcagggtccgcgcaatgcgctcgccgcgcaactcgaccacttcaccgccgagccgctcggcaagttgctgtgcggactggagaaagcccaactgcacctcgccacgactggtgccgtcgctgacgtggaccactgaccaaggcagatgccgccgctcggcgacacgggcagcgtggcgcaccaggccctcggcgcactcatcgccgtcgatcccgaccagcaaccggccgcgcacgaccggtgccgtttcacccaggcggcgggagcgtcgaagcagatcggcatccacccgtgccgccgcggtctgcatggccagttcgcgtaaggcggtcaggttggtctgggtgaaaaacgcatcgattgccgcgcgggcctgttccggtacgtagaccttaccttcacgcaggcgctcgagcagttcgcgaggcggcaggtcgatcagcaggatttcgtcggcgttgtgcagcacccagtccgggaccgtctcgcgcacctgcacgcccgtgattgcacggacctgatcgttgagactttccagatgctgcacgttgaccgtggtgtagacgtcaatgcccgcctcgagcagctccagcacgtcctgccaacgcttgctgtgacggctgccaggcgcattgctgtgggccagctcatcgaccaggaccagtccgggacgcgcccgcaacagcccgtccaggtccatctccaccagcgtcacgccacgatagtcgctgcgattcagcggttgttccggcaaccccacacgcagcgcttcggtctcggcgcggccgtgcgactctactaccccgaccagcacctcatggccgagacgcaactgccggtgggccgcctgcagcatggcgtaggtcttgcccacgccgggtgcggcgccgagaaacaccttgagtcgaccctgcccatggcgaggtcggtcgtccagcaaggcgtcggcgtgcaaggcatcgctcattcggctcactcgtctcgttcgggccagcgattttccgccatcgcgaggttcacggccagcacgttgaccactgcggggccgaccagaggcgcttgaagatgcgcctcgagcaggcgttccagccgagcctcaggcaacccgcgggctgcggcaacagccggcagttggtagcgcgccgccgccagcgtgaggtgcggatccagaccactgctggaggtcgtgaccagctccattgggaccggcttgtcagtagcgccttgccagcggctgacgttcgcctgcacctgcttgagcagttcagggttgcttggggccaggttgctagcgccgctggccaccgtcgcgtagtcagcggcggagggccgcggctggaaccacaggggtccatcgaaaggttgtgccagcagtgcgctgccacgaacctgcccggcggcatcacgcacaaggctgccattggcctggtcggcaaacgccagctgagccacggcggtaaccgtcaagggatacaagaccccggtaatcaaactcatcaacagcagcgcggccagtgccgggcgaacatgcttgagcatctgttatctcctgaaggcgcgccgaacctcggcgcatcgaggtcagaccaggccgaccgtggtaagcaaaagatcgatcagcttgatgcccacgaacggggcgacgaggccgccaacgccgtagatcagcaggttgcgccgcagcaggctggccgagtccaccgctttgacgtcgaccccgcgcagggcgagcggaatcagcccgacgatgatcagcccattgaacacgatggccgacaggatcgcgctggccgcgctgtgtagctgcatcacgttcagcaccgagagctgtgggtacagaccgatgaacaacgccggcaggatcgcaaagtacttcgccacgtcgttggcgatggaaaaggtcgtcagcgcgccgcgggtgaccagcagctgcttgcccacctgcaccacgtccagcaacttggtcgggtctgagtccagatctacgagatttgcggcctcgcgcgctgcctgggtgccgtcgttcattgccatacccacgtcggcttgggccagcgccggcgcgtcattggcgccgtcaccgcacatggcgaccatcttgccttcggcctgttcctgacgaatccgctgcagtttcttttccggtgtcgcctcggcgatcacatcgtccacgcccgcctcggccgcaatcgccgccgccgtcagcgggttgtcgccggtgaccatcacggtgcgtatgcccagctggcggagttcggcgaatcgctcgcgaatgcccggcttgaccacatccttgaggtgaattgcgccgagcaaacggtcgtccgcgcagacaagcaagggcgtgccgccactttgcgcgatggcctggatctcgcgcgccagtactgccggcacctggtcgcgtgccatgcccagatgcgccaacaccgcatccaccgcgcccttgcggtagcgatgcccttcatgatcgacgccggacagccgggtttcggcggtaaagggaatcgggctgatctcgacgcctaccggttccttggcaggcgacagcgcgcgcaggtattcgacgatggacttgccttcagccgtgtcgtccgccagggaagacagcagtgccgcccaggacagctccgtcgcggtgacgcccggcgccttgaccatggctgtacagcggcggttgccaaaagtgatagtcccggtcttgtccagcaacaggacctgcacatcgcccgccgcctcgacggcgcgccccgacttggcaataacattgagccgcaccaggcgatccatgccggcgataccgatggccgagagcaaaccaccgatggtggtcgggatcagcgtaaccagcagcgccaccagatacaccagcggcaggtcaccgccggcaaagcgcgcgaacggctgcagcgtggcgaccaccagcaggaagatcagcgtcagcccaatcagcaaaacgtccaaggcgatctcgttaggcgttttctgccgtttggccccttcgaccagcgcgatcatccgatccagcgtggactcccccggattattggtgatgcgcaccagcagccagtccgagaccactcgcgtattaccggtcacggccgagcgatcgccgccggactcgcgaatcaccggcgccgactcaccggtgatcgccgcctcgttgaccgcggcaatgccctcgatgacttcgccgtcgcccgggatcagttcgccggcttcgacccgtaccacatcgccccgacgcaagcggctggccggcacgcactggtaggcacccgagtcggtttgcagccgggctgcgaggccttcggagccggctttaaggctgtcggcacgggctttgccccggccttcggccaatgcctcggcgaaattggcgaagagcacggtaaaccacagccagagtgcaatctgtaccgcgactccggtgctgaccgcactgtccgggaccagacacaacgccgtagtcagcaccgcggtgagctcaaccaccagcatgaccggcgagcgcgacaggctgcgtgggtcgagcttgacgaacgcctggcgcagcgccggcctgaatagcgcagcaaggctggttgaggttggctgctgggcactgtcgagtgccgcttgatgggtattcatcgtgacgatcctcagaggccttgcagaagagagaagtgttcggcgatcggtccgagcgccagcgcgggcaaaaacgtcagcccgccgaccagcaggatcaccagcgtcagtagcaccacgaacagtgggccgtgggtagggaagctgttggcgtccactggcgcgcggttcttcgccgccaggctgccggcaatggccagcaccggcaggatgtagccgaagcgcccaaggagcatggcgaacgcgatcatcaggtcgtggtaggtggtgtcggcgccgaacccggcaaaggccgaaccgttgttgccggtgccggaggtgtaggcgtagaggatctggctgaggccgtgtggccccggattgctgatcgaagccgccgggccgggcagactgacacccaacgcgaccaggaccagcacgccgaccggcatcaccagcagcgtcgccaccagcagccggacttcccctgcttcgagcttcttgccgagatattccggggtgcggccgatcatcagcccggcgaggaacacggtgatcagcacgaacagcaacatgccgtagagcccggcgccgacgccgccaaagatgatttcgccaagcatcatgttcaccagcggcaccatgccgcccagcggactgaagctgtcgtgcatcgcattgaccgaaccgttggaggccgcactggtagtagtcgcccagagcgccgaggcggcaatgccaaggcggctttccttgctctccagcgacccgccctgctcgatcgccaggccggccagtgctggattcggctcatgctcggccagcagcgtgacgccaagggcgagaacgaacaccagcagcatgcaacccaggatcgcgcgactctggcgcagatcgcggacgtaatgcccaaacatgaacaccagcgccgccgggatcaggatgatcgaaaccacctcgaacaggttgctccaggccgtcgggttctcaaacgggtgcgccgaattgacgccgaagaagccgccgccgttggtgcccagctgcttgatcgcgatttggctcgcggccgggcccaggggaatggtctgttcagcgccttgcagggtggtcgcatggacgtagctgcccaggctctgcgggacgccctgccagaccagcaccaacgccagcaccaggctgagcggcagcaagccgtacagcacggcgcgggtcagatcgacccagaagttgccgacctccttcgaggagtgacgcgcgaacgatcgacagaacaccaccagcaccgccagaccaaccgccgggctgacgaagttctgcacgccgaggcccagcatctggctgaaataactcagctgagcctcgccgctataggcctgccagttggtgttggtgacaaagctgaccgcggtgttcagggccaacggccagtccatgccgaacacttcctggggattgagcggcaaactgccctgccccatcagaatcgcgaacagcgccagcaggctcgcggcagtcagcgccagcaaagccaggctgtagtgcttccagtcctgctcccgctcagggtcgatgccggccgcgcgatagcagagccgctcgacgggcgcgagcatcggcgtcagccaggtgcgctcgccctccatgacccggtacaggtagcgccccagccagggcgccggtgacagcaccagaatgaaaaaggccgcgatcagccaatagtcgttggcgtgcatgcgacctcctaactgcggtcagcgcgaagcagcgccgacagcaaatagaggaacagggcgatggccagactcagcgagaggccgtcaaggaaggacatggggttaactccgttttacgcgtctatgcggtacggagattttcagagcgaggggtgtaaagattcgattgcagagacgcccggccggcgtaaagaaagcgtattttcccgccccggcggcgtagcgcagcgcgatggccgagctgcaacattctcagcgcaccgcagccgagagcaatcagtcagcctggtacagatccggcagttcgtattgcagaccgtaaccgttgaacattttcttcagaccgccctcctcgatcagctcctgaacctgggcttccagcgcataggccagctgacggttggactcatggacggccatgccgagatcccaggcctggcggcccatgttcgggtaggcgttttcggccagcttgaggtgatcgtcgtgggcgttgtgcagcatccagtcgatctcgccgcgcatggccatggtggcatcgacttcacccgtatgcatcgcgttgaatgccgcctgcgcggtgggatagtggtgcagcatcttggcgatgctgccgttgaacaccgaggacaggtagaacgacggcacgctgtcgatctccacgccgaccgggtggaaacgcagcacacccacactggacagctcttccaggcggcggtcgtcgtaggcggcctgccagcgctcacgctggtagggtgcgaacatcaccacctgctcgttgaccagctcgccgacgtcgttgcgcttgaggctgtactcacggtcgtaaggcacgcgcatcatcacgtcggccaggacgtccgggcgcaggtagtgccccttccagatgaagttgcgcaagtcatcgtccagcgtttcgccgggcgtgacccagagcacctcgaccttcagcccgagcgccttagctagtgcgttggcgaggtccacatcaaccccgcgcggtttgccatcctcgatgaagctatagggcggaaaattctcgtacatcgccaccttgagcacgcccgaggcgacgatgtcatcgtatgcccgcaccttgatcacgcccgcctgagccagcaagcaccacatcgataggcacagaaccgctagcaactggcgcatggcgatcaccgcttggcagcttcgctttcgatgtaggtgcgaatcgcccagagcgcttcctggctgaggtaatcggccatacgcggcatgtacacggcgccgtcgcggaccgctccgttgatcacgcgctccttgaaccactcgtcgccgtcatagctgacttccaggtctcgcaggtcgggcgcgataccgccagagatcgcctccaggccatggcaacgcgcgcagttctggttgtaggcggaagcgccgatctcgacggctttgtcatggtccttgctgggggcgcgataagggttctcatccacccactcttctcccaggggagtcaggcccttggtctcgaccttttgtggcgtgacgtcgccgtgagccagcgccaggccggcaacaccaagcagaccagcagcaaagagagcgcgcagtgcgattttattattcatgactaccaccgttgatttcgaatacctgagcaaggcaaccccattcggagcgcatgctggacatcttggagtttgcgactccacggcagaatggtgctttggttgcctgcttctcctcccttggtagtagggcctcatgaggcctgtgcacggcacacctgtagcggttcgaaaacacaggctgattgggaagttttccctgaatcagcgggagcttttccgtatcggccgccacgcccggcttccactattcgaatcgcctggcctgttgcttgccccccaagcaaccgaccgcatcgcgagcgcagcgcctggccacgttcgaatcgaccaagggaaaccaataatgacaactcgatcagatctgggcagcagatgcccgcttgccatcgccgtgctcgttgccgggctctcctccagtggcgtcgcaactgccagaaacgtcacctgggaggacatcgccaacgatcacctatcgaccgcagacgtgctgcagtacggcatgggcaccaacgcccaacgctggagtccgctggaccacgttaacgatgagaacgtcttcaagctgacacccgcctggtccttttccttcggcgacgagaaacagcgggggcaggagtcccaggccatcgtgcatgatggcgttatctacgtgactggctcctactcacgtgtcttcgcgctcgatgcacgcaccggcaagcgcctctggagctacgcacaccggctgccggccgatatccgaccttgctgcgatgtggtcaaccgcggggcggccatcttcggtgacaagatttacttcggaaccctcgacgctcaagtggtcgcgctgaacaaggacaccggcaaggtcgtctggaagaagaagttcggagatcacggggcgggctacaccatgaccggcgcgcccaccctgatcaaggaccagaagagtggcaaggtcctgctgatacacggcagctccggcgacgaattcggcgtcgtcggcaagctgttcgcccgcgacccggacaccggcgaggaggtctggatgcgccccttcgtcgaaggccacgtgggccgcctcaacggcaaggacagcacgccgaccggggacgtcaaggcgccctcctggcccgacgacgccaactcccccaccggcaagaaggaagcctggagccagggtggtggcgcgccctggcagagcgcgagtttcgatgccgagaccaacaccatcatcgtcggtgcgggcaacccggctccctggaacggctgggcacgcaccgccgagggcggcgagccgaaggactatgacagcctctatacctccgggcaggttggcgtcgatgccagcacgggcgaagtgaaatggttctaccagcacacgccaaacgatgcctgggacttctccggcaacaacgagctggttctgttcgactacaagggcaaggacggcaaaacggtcaaggcgaccgcccacgctgaccgcaacggtttcttctacgtcgtcaatcgccaggacggcaagctgcagaatgcgttccccttcgtcgacaacatcagctgggccagccatatcgacctcaaaaccggtcgaccggtggaaaacgcaggccagcgcccgccgaaacccgagcctggtgaagcgcatggcaagtcggtggaagtctcgccaccgttcctcggcggcaagaactggaatcccatggcctacagccaggacaccggcctgttctacgtccccgccaaccactggaaagaggactactggaccgaagaggtcagctacaaaaagggcaatgcctatctcggccagggtttccggatcaaacgcatgtacgacgatcacgtcggcatcctgcgtgcaatggacccgcgcaccggcaaggtggcttgggagcacaaggaagcgctaccactctgggccggcgtgctcgccacccaaggcaacctggtgttcaccggaacaggcgatggctacctgaaagccttcaacgcgaagaccggcgaggagctctggaaattccagaccggtagcggaatcatcgcgcccccgattacctgggagcaggacggcgagcagttcattggtgtgacggtcggctatggcggtgcggtaccgctgtggggcggagacatggccgtactgaccaaaccggttgctcagggtggttcgttctgggcctttcgtatcccgagttgggaaaaccagaccgccagacgctgatccggcagcaagctaatgcgatggcgggagcgtcgcccgggttggcgctctctcggcgccccgccattgccctggccatcaccggatggccgacatttttccccgatgcttcggagccgccatgaacatgtcccgctatctgctgcccatcgcgctgctcgtcagcgcaccactgcatgctgaagacgagcagcccctgaccatcaacggttgcatcattcaaccggagagcaaatgtccccacgccgatctccgcggtgctgacctgagcaaccaggacatgcgcaaaatggatctggcaggagccgatctgaccggcgccaatctgcgccacgccaacctcgacctggccaacctggagaaggccgatttgaccggtgccatcctcactcgagccagcctgcaacaagccaacctgcgcctggcgattctcagcgatgcgcagttggtcgcgatacagggatggggcctgttcggccaggccgcacggctcgacggcgccaatctgactgcagccaatctcgagttcgcgcgcctgagcggggcaaagctgcagcgcgccaacctgaccgctgccaatctggagatgacctggttgagcaaggctgacctcagccatgccaatctgaccgatgcaaatttgcaggaaggcaagctcaacgaggccaatcttgcaggcgctaccctgacaggcgcgcggcggcactacgcaaccttccagggcacctacatggaagattgcctggactgcccacgcgactgggaacaataggcaagcgctgtcgatgtttggatgcgctttactaaggggccctatgtagattcacgacgctatcgtcagcggaggcacacatcattcgaatcccacaggtaacgcaactcgacagcctgccctgcttcgccggtctagccctggaccggatcgtaatccctcgcacgcctacggagttccgtcaggcggtcgaagatgttctgggccatgcgcagatcggcttcgacaccgaatccaagcccaccttccgggtgggtgagcgctccgatggtccccatctgattcagctcgcgacgccggaacgggcttatctgctccagatcggaacgcaaggttgcgcggaggcggcgaagcagatactggaatccgagcgggtgctcaaagtcggattcggcctgggctccgaccgcagccgtctacgcacccggctggggatcgaactgcagcacagcatcgatctcggaacagcgctgcgatatgagggcaagaagggccaggtcgggctccgcggtgcggtggccgcggtgttgggtgcagccatcagcaagtcccggcgcgtgtcgacgtccaactgggccaatgcgcgcttgaccgaggcacagcagcgctacgccgccaacgatgcctatgccgcgctagccgtgtttctggcgcttggggatgatcccgagcggctgctggccgatcgcatcatgccagcgcggcgcccgcaaccctgacgattcgactccataaacccggcaccgccgtgcaacccgtccgcgcgattgtcgtctaccgcagacgttccccaacggaggtagccgtggaaggcatgttttttagcggttggtcgaccctgcttcgcacgctcgtcatcggcgtgctggcctatatcaatctcatcgttttgctgcgcatttcaggcagacgcaccctttcgaagatgaacgccttcgacctggtcgttaccgtggcgctgggctcgactttcgccaccattctgctgaaccggaacgtggcgctggctgaaggtacgctggcgctcgcgttgctgatcggcctgcagtttctggtgacctggaccagcgtgcgggttggctgggtgcgcaagctggtgaccggcgagcctgcgatgctgtattaccaagggcagatgctgggcgaggcgatgcgcaaggtccgggtgaccgaagacgaagtgcgttctgccctgcgttccagcggcatctcggcacagggcggcgccgaggcggtggtgctggaaaccgacggtagcttcagcgtcgtcaagaaaggtgctggcgacagccgctcttctctgtccgacgtagtgacgcccggcccgcgagacgtccaggtgtagctctgactcaacgagcaccagagctcatggctgcctgctaaaagcgcagccatcgtgcgctggtagcggccatgagccctttgccgtgccagcagtggcgacgcctgctccgggtaaaaatatgtttgaaagtcactcaagaaaaacttgtacatgccgattagcttgtacaacattcgtgctttcactcatcggaccacaaacatgttcaacaagcagttgaaactggagctagcggcgttgcgcgaagaagtcgcgaccaaccgacagatcaaggagtcgttgtaccgggagatgatggtgctggaggttgatcccaacgggcacgttcagtacgccaacccggttttcctgagcgagatgggcttgcgcctcgacgatatcgtcggccgctcgatcgatagcttcttttccgatgaattccgcaaagagcccaactacaccagcctcaagcgcgccatgcagcgcggcgagcatctcaacggtgccttccgcatgctgcaggcgaacggaaaagaagcctggcttcggtcgatctggcagcccatcaaggccgctgacggctcgctgcgccacttcaccctgtgcgccaacaacctgacccgcaccattgcgacctcacgagagcatgaaagcatcatcagtgcgctcaaacggtcgaccgccgtgatcgaattcgatctggacgggcacgtcatcaccgccaacgatcagtttctcaacgccatgggctaccggttggaacagatcaggggcaagcaccacagcctgttctgtacccgcgaagaaagcgattcgtcggcctaccgcgacttctgggcatgcctgaaccgtggcgagtatgtcgctgaacgcttcaagcgtatcgacgcgcacggccaggtcgtctggctcgaagcctcatacaacccggtacacgacgcttacggaaagttgtacaaggtgatcaagtttgcaaccgtgatcacggaccaggtcaatcgcgaattggcggtcgccgaggcagccaccattgcctacgacacctcgcagcaaaccgatctgagcgcccagcgaggcgccgctgtggtacaggagacggtcggcgtcatgcgcaagatcgccgcgcagatgcaggaagcatccgacgggatcgaggcactggacaaacaatcgcagctcatcagcgcaattctcaaaacgatcagcgacatcgccgaccagaccaacctgctcgcactgaacgcggccatcgaagccgctcgagccggcgaccagggccgtggttttgccgtggtggccgatgaggtccgtcagctcgcggcgcggaccagcaaagcagcgggtgagatcgtcggcgtcgtcggcaagaaccaggacctcgcgcaggccgccgtacacagcatgtcgaccagccgcagccaggccgaaaacgggctcgagctcgccaaccaggccggctcggtgatcgtggaaattcaagacggcgcccagcgcgtggtcagcgcggtgggccagttcgccagccaactgaagaactgaacgcgacggacctgagccgtcgggcctacgcctggccttgccagacgcaggcccgttcagcccgaacgctgcgcggcggtcccgtagatgtgctcccaacgccagccatccgcctcgagcagcgcggtcagcagtgcgcgccgctgctgctcagtcccatcctcgcccgtgcgtgctttcagcggaatgtgcacaaccttgagtggcgaaacgtcgatgtcaggtcgtgccacatcggaagaagcaccattcagatagtgcgtgcgttgcaaatagagatacctatcgagtgccgacccgagcatcttgcgcttgagcccgtcctgagggacgtcctcggcgacctggtcgagcaacctcagcacttcatcgagcatgacgacagccggaatgatgttcttgctggcatgcctgttgtgaaagcagcggatcaccggataggcgtgatggttcaaggtgtgctccaccagcatctggcggatgtcgctggcgttgtcgtagaaacgcgaaaagtcggagccgttccagctgttcaccaggatttcctgtggcgtccggcccatgctggtgatgagcaggctgagctgattttgcaagctgacggctgacagcaccggaacgatgtaggtaatcgcagctgtgatgaaggtcagcccgcaaaaggcggcggcactggtcagaacccgccagccatcgcccgatgccacgtagtcccccacgcccagcgtcgacagggtgaagcccgcgaaatagagcacttcccacgagtcagcggccagtttggtcgtgccatcgaccaccgcgccgggatccgaggcgagcatcagaaacaggctgagccacaaacagacgatccaggtgagcaacaccagcatcagcacgcactggccggcgtattcgagcggcttcgacgtccctcgccgccccgccgcgataaaaaagccccgccacaccagccgggagacgccattggtgatcgtcccgccgccccgcgtcgacaatgtggttttggtgatatccgctgctgtgatcagaaaaagcgcgattcccaggaaaagaaagaccatatcggtgctgtggcgctccattgcaacgtaatcaaagtatgaagaacgcagccgtcgtaagttcagaatcgacgccctagctccgctgagagcgccgaaagaaaggcagaacgccagtacaatcattcacccggatacacggctttcaggtatcttcgccgcacagaaattcgctcacctgcgcacgtatcgagggcggcccgatgttggcctgtttgaattcagattggagtttttcagccccggtgctgatggctctgctggttggcctcggcgtcgcggtgttggctcgctgggtgcgtcaccaacggcaattcgccggcagttccgctttcaccttgatgcacctggctatcctctggtggctcggcgttgctgcgctggaaatgagcgttcaccagcagagttgcaagatgttctgggcaggcatggcctggcccgcgatcctcggtgtgccgacgttctggtcggtgtttctctggcaatacgccaacagcgtgcatcgcccactcaagccgctcgctatcatcgccctcatggcaatgccggcgctgttctggctgctggcactgaccaacccctggcactggcagttctacggcacggcaagcgcgccgatctcttcagcgcccaacgcaccgatcgcctaccagcacggaccgttgttctacctggcggccgcttatggctaccctttcatgctgttctgcatcggcatcaccttgcgcgcggcggttctcagccgcggcttgcataggcggcactatgtggttttcctggtgcttaccaccattccctgggcggccaatatcagttacatcgcgtttggttggtcgctgttcggcttcgatcccacgccgttcagctttgcgcttacgcttgcagggttcggttgggcgatcagcgggctgcggctgttcgatctgttgccaatagcgcgccacctgctgctcgatgcattgatcgacccggtgctggtggtcgacccgcaacgccgcgtaatcgaggccaaccccgctgcacttcgcctggcgcacctcaagcgcgactggcgcggtcgcccgttggcgcaatggccctacatcggcagcacgctggacgacatcgtgcagcggtcggagctcggagacgcgccgcagatgctgagcgtcgacgcgcagcagcagcatttcgaggtccgcgttcgatcgatctgtcgccctacgcgggaagggccggtgagcctggggcagatgctctatctgcgcgacatcaccgagttccagcgcagccagcagcaactggccgaggcgctggcactgagcgaacagcaactggcgaccattaccagccttcatgaaacgctgcagaaccaggcacttcgcgatccgctcacgggcctgtacaaccggcgttccctgcaggaattcttcgcccacgagctggcccacgctcagcgtgatggaacacctatcgcactggccatggtcgacctcgatcatttcaagcgactgaacgacacatacggccacgcggccggtgacgacgccttgaagggcgtggcggcattcctgctgggcgggttgcgcaacaccgatgcggcttttcgcatcggtggcgaggagttcttgctggtattgccgcgcaccccgccgcacgaggccgtggcgaagctggtgcggctgtgcgaacaattcgcagcccaggcgctggatacgcgcgccggcgcgctacgcctgaccatgtccataggcgtagcgcactatccatcacaagccagcgacctggacggccttatgcagcaggccgaccggcagctctatctggccaagaacagcggacggaaccaggtcaggtcggcgcacgacaccattgacgcggcggtcagtgccctaccacgacctcgctaacctgccggatcggcgtcaaatcggtgtaattggcgatgtccgccatgatctcttcggcgtgagggcctatgccggcctgaaaggcttcgaccgaatcacagaagatgtggcacatcgcaacgtacggcgccggcttgtcaggggtgccgccggcaatggccttgtcgatcgtgtaataaagacaggcatcgcccatgcgggatttgagcagcggcagatgcttgtcgcggtaatagtcgtggtcgaaccgggcgcccggtgtgttggggtacatcacgctgactttgatcatgcaacggctcctcgatcgcgggcgctacccgcggggattagggacggtcaactattgcacggttcggcagtgacaaccatgcgcgggggttgtgcttacagctccatcttagccggcaacccgttcgccaacccgcagcacgccggtgtcaatggccaggtgaaccagttcggcgtgtgagctgacctgaagcttgctcttgagcatggtcaggtagttggaaacggtcttgccactgatgcacagccgctcagcgatcaaccgcgaaggggttcccttggcaagcatcacgaagatctcgaattcgcgctgcgtcatttcctgcaggcgcgggtccggcgcgtcaactgtcaccggattgcgcgccagctgggtcgccaacggctgctcgatatacgcatgaccagccagaatacgccgcaccgcatccaccagcacctcgggcgatgagcttttggtgatgtagcccgcggcgcctgcatccagcgcctggcgcaccaacggcagctcgtcgtgcatgctgaaaaacagcacacgcagttggggcagtcgctgcagcaatcgccgtgtggtttcaacgccgctgatgcctggcaagccaacgtccatgatcaccaggctgggtggggcttgctcggccctcgacaacgcttgctcgccatcgcaggcctcgatcacctgagcttccggaagcaatacccgcagcagcgcggcatagccttgcctaaccacagcgtgatcatcgacaagcagaatcttcattggacgctgactccttatagggaatgtcgaggtagacgacccagccggtgcttctgcagtgggttgcgatcagggtgccttccagcgcacgcgcgcgctcttgcattgaccgcagaccgatgccgggccgtcgtgccccctggtggccattgccgttgtcacggatcagcagctttaacctccgcccgctcaagcgcagccgcacacgtacgaagctggcctgcgcatgtttggccacgttggtcagcgactcctgcaagagacgatacaggtgctccttggtatgcagtggcaggctcggcacacggtgatcgatccgcaggcgcagttcgataccttgagcgctctgccactgctcggccagcaggcgcatggcctctggcagctcgagatgatcgagcatcaccgggtagagctcatgggtcaggcgacggaatccatcctgcaattgctcgcagtgctcgtcgaggcggtgcgcggtgctgctgaccatacatggctggtccttgatcgcctggagcaagcaggcctgagcgcggatgccagcaaggtattggcccagatcatcatgcagcgtctgagcgagctgggtgcgttcgcgctcctgcaatgccagtaaagcgcgcgtcagatcgtcgttgtcccttcgtgcattctccagcgagctcaccatgcggttgaagtggccggccagctgccgcgcttcaagcatcgactgattcggcagacgtgtatcgagctggccttgcgatacccggccgaaggctgcgagcaactgatgcagtacgtccgaggctggacgaacggcccagcgaatcgccagcaggctcagcgccaacgcgatgccgaacagcaccagcagctggcgcagcgaatcccggacttcctcaatttcatcttgcggatcgacgcttaattgcaaagcccggccatcggctaagcggacggtcagcggctcggcgagcggatccggatacaaggccgcttccagccagccgcgccgctccgacaatggctgtgtctggacggcagcatcattcaaccaacgcaccttaacgtgtcgcaggtgacgggtaagacggggctgcaagtcggccgggtcgcgctctgcgacgtctttgagatagccgatcacagcacccgcggcatcgagctcccggaccacatcgtgactggcctggcgcaggagcaccaccgtgcagatgctcgccaccagaccgaaaaacaatgagaccagcagactgattcgccaaagtgccgacatgcgcagcgcccggagccgttagatcgaaggccagtgcatcacttgatcacgaagcgcccttccatgcctttgttttgcagcccttggcagtaataagcaaagctgccgggcttgacgggcacgaagaacagctccgcctcgccggcgtcttcgaactccagctcgaccagcgtgatggccttgatctcgaccccaccggcctcgaccttgcgcaggaatatcgagcgcgcgaactccggcgcctggaacgcacaggccttttgtccgtcgacaacgaccttcaaccgataggccgtgccggtttcaagctgatattccttctgcgagacggcgtaatcgctttcctcggaaccgaagcgaagatcgggtaatgcctgcgggcgcagggtcaggtcgccggctgcgtgaacctgatcgaaaccgatcaggctaccgaacagcaaaagattgaggatcagggctctgcaaggcgtcatggggggcaagctctttttattgtggatgagcgccatcctagggcgcctcgccgacgcgctggctactaccttggtacacaacgactggtactttctgcatatttccccgccccgccagggttcctatgctggtcgcaacgccataggagtcgcccatgccccatcctttgctacgcaccggtcgcctgctggtactgtgttgctgcgccgccctggcgaacaccgcagcggtcgctggcgaagcgctggacgtgcgcatcggctatctaggttaccgtccggatccgggcccgctgctctccaacgtcattcccgagccggacgatgccgggctgcgcggagcggagctggcgatcaccgacagcaacaccacaggtcgcttcctcaaccacagctaccagctgaccgcacgtaacagcgactcgcccgaacacctgctcgacgatgcgcgcgcgttgcgcaacgacgggctgcggctgttcatcgtcaacgcaccggacgacagcctgcgccagcttgccgaagcattacccgacagcctgctgatcaatgccggcagcgccagcgacgagctgcgcaccacgacctgcctggccaacgtgctgcataccctgccgagccgcagcatgctggccgatgccctgggccagttcctcgcggtgcgccgctggaaccgctggctgctgatcagcggcccgacgccggaagaccaggcctacgcggcggccatccggcgcgcggccaaacgcttcggccacaagatcgtcctcgagaaggcctggaccttcgacaatgaccagcgccgcaccgcccaggcggagatgccactgttcacacaggccgacgattacgacgtggtggtggtggcggacgagcgaggcgacttcggcgagtacgtgccctatcagacctggctaccgcgcccggtggtcggcacccagggcatgacgcccaccggctggcacaagacggtggaaacctacggcgcggcgcagttgcagaagcgcttcgaggctctcgccaaccgctggatgaacgaccgcgacttcgccgcctggattggcgtgcgcagcattgccaccgccgtgacccggctgggcaacgccgacccggcggcaattcgccaattgtcgctgagcgagtcgctgccggtggacggcttcaagggccgcaagttgacctttcgcccctggagcggcgagctgcgccagccgattccgctggtgcacccacgcggtctggtttccaactcgccccaggaaggctttctgcatccgaccagcgaactggacacgctgggcttcgaccggcccgaaagccaatgtcgtttgagcgagcaggaactctgagccaatgccagccaattcactacgtctggcactactcctgatggcgcccgcggcgtttggcgagaccagcgatctgagctacgaatccttcgtcgacagcgacaagcgaatcaaatgcctctacgggtacgcagcgcagaaaaccggcgatcacgccgcggcgctgaagatattcgaagactgcgtcgagcgctggaacgacgtctattcgatgatatggctggcgcagatgtacgaatccggcaccggagtgcccctgagcctggaaaaggcggctgcgctcatcaaactcggtgccgagcaaccggataccgccgcctacgtaagtctcgcccgttatcactggggcgttgcgctcgccgagggccgtggcgtcacggttgacgtacaggccgcacgctactggctgcagcgcgcctcggcagatggccagaccgaggccgatgactatctacgacggctggattcacccactgcgctccactgacggcaagcgcccttacaacaataacgagaccgaaccatgacccgaacgctccttgcctctgccatcgcctgcggcctcgcgtggaccgccagctctgcgctggcggccactgcctatgtgtccaacgaaaaggacgacaccatcagcgtgatcgacctggactcgatggaaacggtggacacactggaggtcggccaacggcctcgcggcttggcactgtcccatgacaacaagctgctctatatctgcgccagcgactcggacactgtccaggtgatggacctggcgacgcggaggatcatcaagcagttgccatcgggcgccgacccggaacagttcgccctgcatcccaataacaagtggctgtacatctccaacgaagacgatgcgctggttacggtggtggacgtcgacagcgaagcggtaattgcccagatcgaggtaggcgtcgagccagaaggcatggccgtgtcgcccgacggcaagtgggcgatcaacaccagcgaaaccaccaacatgctgcactggatagataccgccaccaacacgctggtggacaacaccctggtcgaccagcgcccgcggcatgtcgaattcagtcatgacagcaagaccctctgggcctcgtcggaaatcggcggcacagtgactattgtcgatgtcgaccagcgcaaggtgctcaagaccatcgatttcgagatcaagggcgtgcaccgcgacaagatccaaccggtcggcattcgcctgagcgccgacggcaagtacgccttcgtcgccctcggccctgctaaccgcgtagcggtcgtcgacgcgaagacctacgaggtgctcgactacctgctggttgggcatcgcgtctggcatatggcgttcaaccccgatgaaagccgcctgctgacaaccaacggcgtcagcggggacgtgtcggtcatcgacgtgccctcactcaaagtgaccaagtcgatcaaggtcgggcgttatccctggggcgtggtggtcgcgccatgagcgcgctggaggtagcggacgtcagtttcgcctatggtgcacgtcaggcgcttcaggacgtcagcttcagcgcggccagcgggcgcttcaccgcgctgctcgggcccaacggggccggcaagtcgacgttgatcgccctgctcacccgtctttacgacctgcagcgcggcgagatcagggtggacggtcatagtctgcgcgagcagccgcgcgaggcactgcggcgtctgggcgtggtgtttcagcaaagcacgctggatctggacctgagcgtcgagcagaatttgcgctaccacgccgccctgcacggcatgccgcgcaagttggccggcgagcgcatcgagctggagctggaccgccagcagctcggcgagcggcgcaagagcaaggtgcgtgagctcaacggcgggcatcgccgtcgcgtcgagatcgcccgcgccctgctgcatcggccgcgtctgctgctgctggacgaagccagcgccggcctcgacccggcgagccgccaggctctaaacgatcacgtccggtcgctgtgcgatgaaggcatgagcgttctctggacgacccatttgctcgacgaagtcagcgccgacgatgacctgatcatcctcaaccgcggtcagctcgttgcacagggcagcgccgccgggctgtcagctgccgatggcggcctgcagcaggctttcgcgcggctcaccgcccagccggtgccgacatgagcccttgcgccccgaaccgcacgcctcccctcgtgggagcggtcttgaccgcgaagagagtggataggcacgttcgcggtcgagaccgctcccacagcaccggcgacttttttgggcccctgttcaataccatgcagggctcaccggccagcgggtgccgacatgagcccttgcaccccgaaccgcactcctcccctcgtgggagcgggggttggggcggagaggattgaacccccccgtagcgggggggccccc

(The sequence listing continues in the following parts.)
